United States Patent Application Publication US 2023/0235365 A1 - sequence listing, part 5

SEQ ID NO: 12179 - RNA, 1122 nt, synthetic construct
  source 1..1122: mol_type = other RNA
atgcagtcacccatgtatcaccagatgacgctggaagagttcctcttcaatacgtatgatgccaagtccccagtgatcaaccaaaacgccgggaacacccgcacctatgaattcgaaagggtttctaatcgatttctgtctcggattgacgtcaacgagcttgtgggccatttagtgcggttcaatgaatccacagaggaactaagaaacgtaaatagacaggacctgtacaccaccttctatattccaaagaaaagtggaggcttacggaggattgacgctcccaaacccgagttgatggatgcgttgaggagactgaagactatattcgaggagaaattccacgccctataccacacttcagccttcgcctacataaaggagcgaagtaccctgaaagcaatccagcgccaccaaaataacgagagcaaatggttcggcaaatttgacctgagcaatttcttcgggagcactactatcgacttcgtcatgcagcagctcagcatgatctttcctttttccgaagttgttaaatacgaacttgggaaaaatgaactcaggactgccctcgagctggcctttcttaacggcggtttaccgcaagggacacccttctctcctcttataaccaatgtgatgatgatccctattgattaccggctcgctaacaagtttcgagattttggtcggcagtcttttgtgtacacaagatatgctgacgactttattgtctcgtccaagtacagctttgacgtcagaatggtcgagagggcgatgatcgatgttttgacagaattcaatgcaccatttacactgaacgaagagaagacccgctatggaagttcagcaggacgcaactggaatctcggaattatgctgaataaagataacgagatgaccgtgggtcatcgtgctaaaaagcagtttaagaacatgctgcattcctacgcactggataggaagaaaggcgtaatgtgggatagacatgatatccaggtgatgaatggctattacaactactaccgtatggtggagaaggatactatcgacaagatcgtggagtatataaacaaggaaacagattgcgacgtgctgcgcgacattcacgaggacttgaagtga

SEQ ID NO: 12180 - RNA, 1167 nt, synthetic construct
  source 1..1167: mol_type = other RNA
atggtctacattacagtcaagcaagggcaccatgagagacaaatgagcctagaagagctgttttacgaagagtataatcctagacgattttctccacgaaacacaagcgacactcgcacggacatcagatccgcaccgagtgctgagatgatgcggtacgttgacgtaatagggttgatacacaaactcagcgagttcaacacgcagactaaggagctccgcgaatgcaacagacaagaactgtacaacacatggtttattcctaagaagtcgggtgggcgtcgcaggatcgatgcaccgaaaccaaagctgatgcttgctttgaggaacctgaaaagcattctggaagaagacttcggcgccctgtatcacacctctgcctttgcatatatcaaaaatcgttccacattggatgcgataaaaagacatcagcagaatgagtcaagatggttccttaagctggacctccacgattttttcggatctaccacgccagagttcgtgatgaagatgttcagcatgatttttccctttagtgaggtcgtgaagtccgcctacgggaaaacacagctggaaacagccctcggcttagcttttcttaatggtggactgccccagggcacccccatctcacctactatcacaaacatcatgatgattcccatcgaccatcggttgtccaattccctgaggggattcagtaccgaacgggtaaatcctaaaactctggagccttttaaagagcatttgctctatacccggtatgctgacgatttcctcatttctgacgcctacagcttcgattggaagaaggtgcaggagtatatcctaaacgtcttaaaggaattcgacgcgcccttcaccgttaacactaaaaaaaccaggtacgggtcaaattcaggaaggaactggaacttaggagtgatgctgaatgccaataatgagattaccgtgggttacaagcggaaaaaggaatttcagcgactggcatatcagtacataaccgaatctcgcggcggcaacaaatggccacttgaggaggtgcagcacctccaaggcctgtacagttattatcacatggttgagccagagacttttgataggatcgtgaagttcatgaatgaaaagtacaacgccgatatccttactatgatcaagcgcatttga

SEQ ID NO: 12181 - RNA, 1146 nt, synthetic construct
  source 1..1146: mol_type = other RNA
aaggagcatgacatgccatacatcaccttgcaacaatctccgatttactaccagctctccctcgacgatatactggatggcgccgtggacgtgtcaaaaatggttgtgcctaacgctactaacacaagaactcggtataaggagatcctctcagaaaagttcctcaataaattcgatttcgacgccatgatcagagtgcttgagcaattcaatgagcagcacgagaacctgtttaacgttgagaggaagaccctgtacgagacattttatatcccaaagaggacctgcggattaagagaaatcaacgccccagtgcctgaattaatggacgcgctacgtcagttgaagaccatctttgaagtgaacatgttcgctttataccacacatccgcattcgcctatgtgaagggaaggtctactattgactctatcaaacggcatcagcataatgagagcaaatggtttgggaaatttgactttagcaacttctttggtaacaccaccgaggaattcgtatttagcatgttcagcatgatattccccttttccgaagtagtcaaatcacagcgagaagcaaacgcgttgcgccgggccctgagtttgtgttttctgaatggtggactgcctcagggaacgcctattagtcccattatcacgaatgttatgatgatccccattgatcaccaactttgtaatgagctgagggccatggatgagcactatgtctatacccgatacgctgacgatatccttataagtagcaaggtgaacttcgacatcacaaaggtgcaggagtttattctgtcagtcctgcgcaagttcaatgcacccttttcgctgaagaaggagaagactcgctacggcagctccgcaggccgcaattggaacctaggggttatgctcaataaagacaacgaaatcacaatcgggcaccagaaaaaaaaaactttcaaagccatgtgctgtaattacgtggaggataaacggaagggcataacttgggatcttcatgatgtccaggtattcgctggcctgatatcttattaccgtatggtcgaaagagagtatattgattacgtgattgaacactgcaataccaagttcaatacaaacattgaactgctcattaagcaggacctgtcctga

SEQ ID NO: 12182 - RNA, 1134 nt, synthetic construct
  source 1..1134: mol_type = other RNA
atgccgtacattacgattcagcaatcacctatctactatcagatgtctttcgacgatattcttgatggcacagtggatttgtcacggatggtggtgcctaatgtaactaacacccgaacacactttagggagttcctgaagccaagcttcctggaaaggttcgattttgatctgatgatcgcagtgctggaaaagtttaacgagcaacacgcaaatttgtttaacgtggagaggaagtcactctacgaaaccttctacattcctaagaaatcgaaagggctgagagagattaatgctcccgtgcccgaactgatggacgcgctacgccagctcaagactatattcgaaacgaatatgtttgccctgtaccacacatccgcattcgcctatgtcaagggccgctgtaccatcgactgtataaaacggcatcagcagaatgaaagtaaatggttcgccaaactggatttctccgatttttttggatctactacagaggagtttgtgatcagcatgttttcccagatattcccattttccgagatcgtaaagagaaaagatggtctagaggctctcaaaaaggccttgagcttatgtttcttaaacggcgggcttccacagggaacccccattagcccaaccatcaccaacatcatgatgatccccatagatcatcagctctgcaacgaactgcgaaagatggacgaacactacgtttatactcggtatgctgacgacattcttgtctctagtaaggttggatttgattgcaacaagctccaggactacatcctcggtgtgctgaaaaaattcaatgcccctttctgtcttaaaaaggagaagaccagatatggcagctctgcgggacgtaattggaacctgggcgtcatgctgaacaaagacaatgagattacaatcggccatcagaagaagaaaacttttaaggctatgtgctgcaattacatatgcgacaagaagaaaggggttgcatgggatttacacgacgtccaagttttcgccgggctgatctcctattaccgcatgattgagaaagactacatcaactatgtgatcgaccaaaacaacaaaaagttcggtgtcaatctcgaagccctgattaaggaggacttgagttga

SEQ ID NO: 12183 - RNA, 1140 nt, synthetic construct
  source 1..1140: mol_type = other RNA
atgccatacattaccgtgcggcaacccccgccacatcagcagatcacttttgacgacctgttttttagtacatctgttcaggaccacttccagcccgtcagacgggacatgagcggcaccataaccaggtttgtcaaggaacctaagaaagagctactacagaggaccgacatcaattccatgatttcatgcctggagatgttcaaccagaggcatgctgacttgctcgccgcagaaaggcgcagcctgtatcacacgttttttattccaaaacactccgggggtttaagaaagatcgacgaacccaacgaaaatctcatgaatgccttgagggagttatgtagtatctttgttaacaagatgggcgtgctttatcatacaagcgcctttgcctatgtacccgggcgctcaactatagatgcaatcaagcgccaccaggccaacgaatctcgttggtttctgaagacagatttctccaatttcttcggatccaccaccgaggattttctctaccgggctttctctgtgatgttccctttcagtgagattgtcaagactaaaagaggatcggaggccctcaaaaaggctctgtcactgtgcttcctggatggtgggttgccacaaggaacacctataagccctatgcttactaacgccatgatgattcccatcgaccatcgactgttcaacggcttgacaaaacagggcttcgtttatactcgatacgcggacgatattcagatcagttccaagtacagctttgattataaggaaatggtggcacacatcaatggggttgtgaaggatttcggcgctccatttgtgattaaggaccaaaaaacacggtacggatcttcttcaggtcgtaattggaatctcggcctgatgcttaacaaagataacaacataacggtggggtaccaacgcaagaaacaggtaaaagccatgaccaataatttcattgtggatcacctgaaccatattccgtggcccaaggaagacgtgagacacttcgatggaatccttagctactgtaaaatggtcgaaaaagagtatttcgagcacatgatcaaagcttttgaggagaagtacaaagtcaacttcaagatcatgatgaaggcggcactggagcagccttga

SEQ ID NO: 12184 - RNA, 1134 nt, synthetic construct
  source 1..1134: mol_type = other RNA
atgccttatattaccgttcgccaaaggaccgagtttagacaaattacattcgaggagttgatcttgggaattgcgcctgcgccaaccagaaaacatacatctaagggcggcactatcactcgctacgttcgaaatgtggaccctagcataagggctacagtgaacatgaatgccctgattagcagtcttgagcggttcaacaatctgcaccagaaccttttcgatgctaagagggagagcttgtaccgaacattctacatacctaagaagactggagggctccgccgtattgacgccccaaacgacgaactcatggatgctctccgggaattaaagactattttcaccgatcagttcggtgcactccaccacacgtctgccttcgcatacgtcgaaaatagatccccggtagacgccataaaaagacaccaggtgaacggctctagatggtttctcaagacggacttttccaattttttcgggagcaccaccgaggattttctatacaccatggtgagtatgatcttccctttcagtgaagtcattaagtctcgggtcggcaaggaagagttgaaaaaggcactatccctgtgctttctgaatggcgggctgccccagggaaccccaatcagtccgatgcttaccaatctgatgatgatcccctttgatcacaagttttgcaacgagctgtccaagaaaggatttgtgtatactcggtacgccgacgacatacagatctccaacgaattcgactttaactatcacgaaatcgtccaatacatcagcgatacactgaagtcgcagcatgcccccttcgttattaaaccccagaaaacacggtatggatcatcaagcggtaggaactggaatctgggtgtgatgctgaataaggagggggacatcacagtaggccatgagaagaaaaaagtgttcaaggctatggtgaataactttatcgtggatactctgcgttgtgtgccatggtcaattgaagatgtgcgccatatggatgggttactctcatactataaaatggttgagcccgattactttgaccacatcatcaaatctttcaacgagaagtataaggtcgactatcatacgatggtaagggcagtccttaaaggcaaatga

SEQ ID NO: 12185 - RNA, 1140 nt, synthetic construct
  source 1..1140: mol_type = other RNA
atgccttacataactctcatgcagtcccccgcttttcaccagatcacttttgacgagatcatctctggggttgttgacatcccgactatgattctgcccaatgaatccaacacccgaacatatttcgccacaagggtgaaccagaagtttctggaaagattcgatttctccgaaatgatttccgatcttgacaagtattgtgaacgccatgccggtctgtatgacaaaaagaggaagagcttgtatactaccttttacctccccaagaaaagcggaggtctgcgtgaaatcaatgccccagtacctgagctaatggacgctcttcgggaattaaagaccctctttgaaaccaagttttttgccctgtaccacaccagcgcttttgcatacgtgcctcacagatgtgcagtggatgcggtgaaaaagcaccagagcaatcaaagccactggttcctcaaaaccgacttctccaatttcttcggatcaaccacccacgattttctgatgaggatgctttcaatgattttcccgttctctgagattatcgccaatgaacacggaaaagcagtattggagaaggcactggacctatgctttctggatggcggcttgccccaaggcacacccatcagtccaatgctcacaaacctgatgatgattcctatcgatcatcgtcttttcaattgtctccgggatttcaaaggccacagttatgtgtacacacgatatgccgatgacatcttaatttctgccagacatcatttcgattacgcagagattgtggactttataaactcgacactgaaggagttttgcgcgccattcaagataaaggacgagaagactcggtatgggagtcgcgccggctcaaattggaacctgggagttatgttgaataaagataacgagatcacgatcggcactaaaaacaaacagcggttcagggctatgctgtgcaactacaccctcgacagaaaaaatgggaaaccatgggaactgcatgatattcaggtcttaaacgggatcatgaactactacaagatgattgagaaggattacattgagggtgtcatcaaggctatgaatgagaaattcaagacggacatagtctctaacatgcgcgaggacctggggcagtga

SEQ ID NO: 12186 - RNA, 1122 nt, synthetic construct
  source 1..1122: mol_type = other RNA
atgcaatcacccatattccaccagattacatttgacgaaatcattagtgggaacgttaatttggccaacatggtgaaccccaatgagacgaatactagaacctatttcagtaaagtactgaacccaaaattcctcgagcgtttcgatatcgacgccatggtggtaaccttggaggaattctgtaagcaaaatgctaaactctacgaagccaagagatctgacctgtacgacaagttctatatccctaagaaatctggtggtctgcgcgagataaacgctcctcagcccgcgttaatgaatgctctgcgcaatctgaaaacaatctttgagactcagatgttcgcactgtaccatacgtcagcctttgcctatgttccggggaggtccaccattgatgcagttaaacgccatcagaagaatgaaagccactggtttctgaagactgacttctctgatttctttggatccaccacacctaagttcttgatgtccatgctttctaaagtctttcccttttccgagatcgtcaagagccagcgggggtttgacgcattagaaaaggccctggacctctgcttcctgaacggcggattgccacagggtaccccaattagtccgatgcttactaaccttatgatgattcctatcgatcaccgaataaataattgtctgcgggattttaatggcaaccactacgtgtatacccgctatgctgatgatagccttttcagttcaagaaaagggtttgataaggacgagatcatcggctttattaactcaacactcgcagaatttggagccccattcaaaattaaggacgagaagacacggtacggaagccgtgctgggtcgaattggaacctgggagtcatgctcaataaggacaacgaaataactatcggctacaaaaacaaacagagactgagggcgatgatttgcaattacatcctcgataggcaaaacggcaggcggtgggatctacatgatgtgcaggtcctacgaggcctggtgaactactacagcatggtcgagaaagagtatgtggactccgtgatcaagtataacaatgagaagttccacaccgacgtgatgaagagcatgtctgaagacttaaaccagtga

SEQ ID NO: 12187 - RNA, 1146 nt, synthetic construct
  source 1..1146: mol_type = other RNA
atgtattatatcaccaccatgcagcacagaaaacctaggcaactgtcttgggaggacgttatcatggataagcttgtcatgaatgattatgtgaacgacaaatcaaacagcacagccacaatcactcggaagtatgaaaatatcccggatgaagttatcaagaagataaatgtagagctgatggtccgttggttacataacttcaatgaggagagtaaagaactgtttgagagaaaacgcgagtctctttattcaacctttagaatcccaaaacagtccggcggctttcgccgcattgacgctccctgcgaggaactgcaaaatcaactaaggaagttggtgacatttatttccgatgactgcggagtgctgtaccacaccagtgcctttgcctacattaaaggacgatctatcgtggattgcgtgaggaaacatcagaaaaacgaatccaactggtttctcaagacagacttcagtgggtttttcccaaatactaccttggatttcacgatgaaaatgctgagcatgatcttccctctgagcgagatctgtaagcggaaagacggatactcggaattagaaaaggcaatttctcttgggtttctgaacgggggtttgccccagggcacagtgctatcccccatgctcacaaatatgttcatgattccaatagaccacaagctgttcaatgaacttgccgggcgaaagctggtctacacccggtacgcagatgatattcatattagcggtcaggaacacttcccctttaaagagatagtaactctcattgagaacactctcgctgaatttaatgccccttgggtcatcaagaaagagaagactcattatggcagcaggaaaggcaagaactggaacttgggactcatgctgaacaaggacaacgacattaccatcgggtggaaaaagaagcaatacttcaaggctgcattatgttccttcattctggacacgaagaataaaaagtactgggatctgggcgacgtccagcacctcagaggacagctctcatattacatgatggtggagaaagagtacttcgagaagataatcatccagcagaataagaagtggaacgtgaacgttaaggaaatgtttaaagagtacctgaatggtaccttcgcgtga

SEQ ID NO: 12188 - RNA, 1128 nt, synthetic construct
  source 1..1128: mol_type = other RNA
atgccttacatcaccgtgatgcagtcaccaagatttcaccagataactctcgatgagatattgtccggcgaggtgcaggtgtccgatatcgcgcctcgctcagttactgggaccgtaacacatttcagtgaaaggctcaacgatcggttaacccggctggcccaagtggatgagctggtcgccgttctcgagactttcattcagaaaaatgagagcctgtatgaacagaagcgctcaaagctgtacaacacattctatattgccaagaggtcaggtggccttcgtaagatcaacgctcccctcgaggaactcatgtctgcccttcgagaacttaaggaaattctggagacgaagttttctgccctgtatcacaccagcgcatttgcatacgttaagtgcaggagcacagtggatgcagtaaaaaaacaccagactaataactccaggtggtttctgaaaacagactttagcgacttcttcggaagtactacgcccgagtttctgatgaagatgctgtcccaaatataccctttttcggaggtcgtgaaattagaaaggggtagagtcgtgctgtctaaagccctggacttgtgtttcctggacgggggcctacctcaaggaacaccaatcagcccaatgcttaccaatttgatgatgatcccgatcgatcatcggatagctaatgaattgcgccgaaacaactttgtttatactcggtacgcagacgacattattatcagccataagttcgactttagtttcaccgagaaatgcgatttcatcaaccaagtgctcgccgagttcgaagccccattcaagatcaaaccctctaaaacaagatatgggtcttccagtggaaacaattggaacctgggtgtcatgctaaataaggacaataagatcaccattgggtatcagaagaagaaaacctttaaagctatgtgttacggatacattacatccaaacagaataatcagccctgggacagacacgatctggaagtgttcaatggcttaattagctattacaagatggtcgagcgcgattacatcgcttatacgattgaccactacaaccagaagtacggcgtgaacatgatggcgatgatccgtgaggacctcagatga

SEQ ID NO: 12189 - RNA, 1149 nt, synthetic construct
  source 1..1149: mol_type = other RNA
atgccctatgttacaacattcatgactagggctaaaaaacagcttacccttgaagacgtgctctttggggtgaaaaacctaagcccttatatcaatggtgtggatttcgggaccagtacaaggacttatgagtacaagaaattgcctcaggaattgaaagagatggcccgggttccttacttgataggaaaactgaagagcttcaatcggacttaccagccaaaattcgatgcaaacaatatgagagagcattataactcgtttaagatccccaagaaaagcggcggctggaggcagattgacgcacctgatgacgaactgaagcaagcgttgtactcactcaaggccatctttgagaacgactttaaggtactgtaccatacagccgcctttgcatatatcaagggcagaagcaccactgacgccctgaaggtccatcagcgcaataactctaactggtatctgaagacggatctgagtaatttcttcggctccactacattagagtttaccatgcgcatgctgtcagtgatctaccccttttgcgaagtggtaaaatatgaggacggcgaaaaggcactacgtgatgccatctccctgtgtttcctggacgggggtcttccccaaggtacgccaatctctccactgctgaccaatgtcattatgattccaattgatcacgagatatcaagaaggctccgggcttccgagacaaatgatttcgtgtacactcgatacgccgacgacgccaccgtgagttccaagaagggttttctgttcatgggggtgatcgaaatgatgaacgacgttttcaaaaaattcgatgctccgtatacgattaaaaaggaaaagacacactacggatctcgggctggccgaaactggtgccttggactcatgattaacaaggacaacaaaatcaccgtggggcacgagaataagaaagtgtttaaggccatgctcaataattatatagtcgcgagaaaggatggaaaaggatggccccctgaagaggtcatgaccttacgcggcaagctcagctactactctaacgttgagccggagtactttgactatgtgatttcctggtataacaaaaagtaccactgtgatgtcatcaagatgatggcagatgacgtagctgcttga

SEQ ID NO: 12190 - RNA, 1173 nt, synthetic construct
  source 1..1173: mol_type = other RNA
atgatatatgttaccgtgcgcatcacagaaccctataagcagattgctctggaggacatcatgctggctctgtttcagggagaaaatgtgagggagcgtactcctagatcaccctacaccagaactttcacctacgagagacttcctgaacgaatcctggcaggctttgatgttgagaaaaagatcggccttctccggacgtttaataagaaacatcacaaccttatggagtcagacattcgcgagcattatcacaaattcttcataccgaagaagagtgggggaatgagggaaatcaacgctcctgacgacgagctgatgaactgcttacgcgaactgaagctcctgctagaaagtgagttttatgcttcctcacacgctgcggcatacgcatatgtgaaaaacaggtccagtgtcgacgccgccaaggtccatcaatggaacaaatccaagtggtatcttaagacagatatctctggtttcttcccaaataccacgcctgagtttgtgtggaatgcactgtctatgatatatccattttgcctcattatggaatgtaaaagcggtcgggaagaactcagaaaagccctgtccctgtgctttctggatggcggtctacccatgggcactccgatctcgccaatgttgactaacctgatcatgattccctttgacttcgagttctctaagttcctgagatccttacagaatccagaaaacaatcctgacaaaaaaggccgacggttcgcctacacccgatacgccgatgacatgaatataagctgtggaatcgaattcgacaagagtttcattattcggaaaatcgaaaacctcttccgcctgtttggagctagctatatcattaaggatgagaaaacacactacgggccatcataccacaaaaactgggtgctcggcgtcatgatcaacaaagacaatcagattaccatcggctacaagaagaagaggaacttcgaggccatgttgtttaattacgcaaaggatcgggagagcgggacatactggcccttagagcaactccagtacgcccttgggttgatgagctattaccgtatggtgaacaaggagtctatagatggggtaattatcaggtatagccagaaatttggatttgatattgaggccgcgatgaaaaaggatttgaagaattga

SEQ ID NO: 12191 - RNA, 1131 nt, synthetic construct
  source 1..1131: mol_type = other RNA
atgccatatgtgaccacgcctttgtcaccggtaactcgccagctcacttttgaagagatcattatgggcgaggtcgacgtctcccggcccgtttattctaacgcgacaaataccaggaccgtctttgttaagtcaatctcgaatgaggtggcgcagaaagctagagtagctagtcttaccaagcagctccaggagttcgcagagaatttcaggggactatacgaagtggaccgtagaagcttatacgacaccttctacattccaaagaaatccgggggtctgcgcaggatcgatgcaccgaacgacgcactcatggcagcactgagagtccttaaaacaattctggagggagccatgcctgccgatcaccataccgcagcctttgcctacgttaaaggccgaagtgccgtggatgccgtgaagagacaccagcgcaatgactctcactggtttctgaagattgacttctccaatttctttggttctacaacgaaggagtttgttgtgaagaccatgatggaaatattccctttctgtctgttgggcgaagacgggcgcactgctttggagacagccttagagctttgctttctggatggagggctgccccaaggcacacccatcagcccacttctcactaacattgtgatgatacctgtagatcatcagataaataagagactggccaaagacgaagggaacagctgggtctacacacggtatgccgatgacatgctgatctcagcccataagtcctttgaccccaagcgcgtgatggatctcatatctgctgctttgcaacatgtggaagctccctacatcttcaaacgggagaaaacccgatacggcagtagggctggctcaaactggaatctgggcgtgatgctcaacaaggacaacgaaatcactatcggtcacaaaaaaaaggagaggttcagggcgatgatccacaattacatgactgatcgtcaaaacgggacggcttgggatcctcatgacattcaggtgctatgtggacacattgcctattatcgatccatcgaaccaagctgggtctgcgatctgctggaaagatatagccagaagttcggacggaacgtggaggacacaatgaaagaggatattcggtga

SEQ ID NO: 12192 - RNA, 1395 nt, synthetic construct
  source 1..1395: mol_type = other RNA
atgccctacatcactatccctgttagacaaaaggaataccagatctcttttgatgacatactgaatggcatcaatgagtcatttttcgccatgatgatggatgatacgtgcgacacccgaaccgtatatagagatcacacccccccccgattacttgagaagatcaatatcggtgccatggtcgggatgctggaaaagtttaacaatcgccaccgggagtacttcgacgtgcctaaagaaaatctctatgagacgttctatctaatgaaaaagaacaagggattcagtgttgtcgtgagggagattttcaagactcacaacgccaacagtgggatttcttattccgggaaggatgtgtacgcagacgtgtttgcgattttgaagggcctattgactaatcatccctgtgcagaacacaataggatcgagcaagaaacactcgcaaagtgtgtgcaatacctgaccccattaggattcgaggtcaacgaggagaaaattaaaagcttcatcaaggccggatttagaaggatcgatgctcctcgggctgaattcaagtctgtgctgacagatctgaagatcaccttcgagaacaaactgtttgggagctaccataccagtgctttcgcttacgtgaaaggacggagtacaattgacgcacttaaacggcaccagagaaacaactcacgttggtttctgaagctggacttctctaactttttcgggtctactacccatgagtttgtactgcgtcagttatcctccatattcccttattcagagatcgtaaagagcgaacgcggtagggaagcgctctcgaaggccctcagcctgtgttttttgaatggagttctcccgcagggtactccgttttcaccaaccataacaaacattatgatgatcccaatcgaccatgcaattgctaaaatgtgccgtgagcatagtccccatctgtgctatacaaggtatgccgacgatattcttatctcctctgatctttccttcacctgggaggtcgacaaggagggcagcgtgcagaacgaaattttggacatactccggcgcttcaacgtgccattctccctgaatacagaaaaaacacggtatggcagcagcgctggcagaaactggaatctcggccttatgctgaataaagacaatgagattacgatcggccacgaaaaacgcaaagcgtttaaggccgccgtttactcatttttgaacgattatactcaccaccgcgtctgggatgtggaagaggttcaggtgctgggagggcagattgcttactacaggaatgtcgagaaagaaaacattgacgccataatcctggcctacaatcagagatttggcgtggacatgatgcagataattaaggatatcatctccaaccgatga

SEQ ID NO: 12193 - RNA, 1110 nt, synthetic construct
  source 1..1110: mol_type = other RNA
atgagacagatcacaatcgacgatattctgaacgggatagatgagtctaagcttgcactgcagaaggatactagggacacgactacctggaaagtggatgccatctcccgagagctcatcgagaaaaccgatttttatgctatgcaggtagcactcatggaattcgtcgaaaaatacaaggatttgattgccgttgaggacaaatctacgctgtatcggtcatttaagattcccaagaggtctggaggcttacgccagatcgacgcgcccaatgatgaactgaagaaagcactttacgagctgaagttcatcttcgagaagaagttttacatgtcctatcacacatccgcttttgcctacgtgcacggtcggagtaccatcgactcagtgaaacgacaccagcaaaacaacagcagatggttcttaaagacggacatgcgccatttttttcccagtacaactccagaatttttgatgaaaatgctttgcatgaccttccccttctgcgagttcattaggtatgattttggatgtaaggagttgctcgaaaaagccctgtccctgtgttttctgaatggtggactcccacaggggacacccacaagcccaatgcttactaacgcgctgatgatccctgtcgaccatgcaattaacaagatgtgccatgaatacgctcctcacctgtgctacacccgctatgccgatgacatactgataagctctcagtacaatttcaagtggagcgacgttcagggtagactgatttcgattctcgagacatttggagctcctttcacattgcacccggaaaagactcggtatggcagtagcgctggcaggaattggaacctcggggtgatgttaaacgccgaaaataagatcaccataggccatgaaaagaaaaaagtgttcaaagccatggtgtttcaattcatgaccgacgacgccaaagggaatcactggtccctggacgatgtgcaacatttcctaggcctcattagttattaccgtatggtagagaaggattgtatcaatgagatcctgcagacttactcacaaaagttcaacaaagacgtcgaggcaaccgccaaggctttgctaaaaccttga

SEQ ID NO: 12194 - RNA, 1233 nt, synthetic construct
  source 1..1233: mol_type = other RNA
atgtatattacctactggaacccacccaagacacgccaaatcacctttgacgagattatcgcaggtgtccagaatgttgaggccttgcattacggcggaagtacgacatccaccatcactgtctgcaggaacgatctgaccccaagactgcaaaaaatcactaacatcccggatatgatagctaaattaacggaattcaaccagaaatacgccggcttagaggcctgtgatctagccgcccattacgaacacttcgaaatccccaaaaagtctgggggttggcggcctatagatgcgcccgacaaggaactgtcagatgcccttgtggagctgcgagaaatgctcaggacatttatgattgctgactatcataccaacgcctttgcatacattcctaaccggagttttatcgacgctgtgagaaagcaccaggcgggccacgtgaaaacaaagaaaaatgaggagactggcgtgcagacaacagtcacctttgagaaccactgggccgtaaagttcgacctccacggcttctttcccagcaccacccccgattttctgctggggatgctgtccattatctatccattcgctctcattatgaaggatgaaaggggccacgaacagctggcaaacgcgcttaagctctgctttttgcacggtggactgccccagggcactccgatcagcccatggcttaccaatgtgatgatgattccatttgaccaccttatcactcggaagctctgctatggttacaaagcaaaagacgggatcgaacgtgaattcacttatacaagatacgctgacgacatgatgttctcatgttatcactccttcgaccctatggagatacagcaaatcgtaattgacggactcaacttcatacatgcccctttcactctgaatgaggcaaagacacattatggaaatcggcactcttcgaaaaactggtgtctggggctaatgtggaataaggataatcagattaccgtcggatggaggaatttaaagatgttccgcagcgccatgaaaaattacatcgacgctaagaagagaggggagacgtgggagctggaggatttgcagaagtttatgggcaaactcaactactatcatatggttgaacctgaagtgattgatgacttggtgcatcgatacaatgagaagttcggagtggatgttatggcaatgctgaaagacgatcttcgcctgaaggacggggaggccgcttga

SEQ ID NO: 12195 - RNA, 1233 nt, synthetic construct
  source 1..1233: mol_type = other RNA
atgtacatcacctacctcaatccacctaagacaaggcagatcacctttgacgaaatccttgccggcgtccagaatgtggaagcactgcactatggtggtagtaataccagcacgatgactgtttgcaggaacgacctcacatcaaagctacgcgccataactaacgtgccggagatgatcgagaaactcgtagactataatgtgaagtacactgcgctggagtcatctgatatacccagccactactcgcatttcgagatccccaagaagagtggaggttggaggccaatcgacgcccctgatgagactcttagcgacgccctgatcgaactgcgtgagctgctgaagtccttcatgatcgctgattaccataccaatgcatttgcttatattcctaaccgaagcttcattgatgccgtcagaaaacatcaagccggccacaataaaaccgtagtcgatgaagctaccgggatgaagaaggtggtgaattaccagaaccattgggccgtcaagttcgattttcatggatttttcccttccactacacccgacttcttgctgggcatgatgtccgtcatctatcctttcgccctgattatgagagatgctcgcgggcgcgatgaattggctaaagcagtgaacttgtgttttctgaggaacggcctccctcagggcactcccatcagtccatggttaaccaacgtgatgatgatacccttcgatcattgtattacacggaagctctgttatgggtataaggccaaagacggaatagaccgtgagtttaccttcacaagatacgcagacgatattctcatctcttgctatcaccactttgacccgatggagatccaacagatcatcattgacgcattaaacttctttcacgcgccctttacgcttaatgaaacgaaaacccattacggaaaccggcactcctctaaaaattggtgcttggggctgatgtggaataaagataaccagattactgttggatggaggaatctaaagatgttccgatcagctatgacaaactatattaacgctaaacagcacgggcgcacctgggaacttgaggacctgcaaaagtttaatggcaagctgaactactaccacatggttgagccagaggtgattgatgaactcattcggagatacaacgccaagttcggtacagacattatagcgatgttaaaagaagacctgcggccaaaagagggcgttgtggcatga

SEQ ID NO: 12196 - RNA, 1233 nt, synthetic construct
  source 1..1233: mol_type = other RNA
atgtatattacctattggaacccaccaaaaacacggcagatctccttcgaggagattctcgccggggtcaccgatatatctaatctaagtcgcggaggcgataacacttctaccatgaccatctgtagagacaacctcacaccacgcttggagcagataacgaacattgactccatgatcaatcagctggcagcttttaatcgcaagtacgccgagctggaaagctcaaaccttccaagccattattaccactttgagatccctaagaagacagggggatggaggcccattgatgcacccgacaaagaactttccgacgcgctgagtgaactgcagcgtttactgaagtcgtttatgatagccgactaccacactaatgccttcgcgtatatccctaatcggtcctttattgacgccgtgcgaaagcaccaagcaggccacgtcaaaaccaaaaccgatccagagactggggagaaaaaaaccgtttgttacgagaacaactggtcagtgaaatttgaccttcatggattcttcccgagcactacacccgacttcctaaaggggatgttctcaattatttacccctttgctctcataatgaagtatcctcgcggacaggccgagctcgacaaagctttaaatctgtgctttctgaatggtggattaccgcagggcaccccaattagtccttggctgactaatgtgatgatgatccccttcgatcacctgatcacgaggaagctgtgctacggttataagatgaaggatgatatcgagagagaatttacctacacaaggtacgccgacgatatgatgttctcttgttactgtagctttgatcctatggaaatccaagaaattgtggtaaatgcactcgaattcatccatgctcagtttactttgaacgctgagaaaacgcactatggctctcgtcattcctcaaagaattggtgcctcggcctgatgtggaacaaagacaaccagatcacagtaggttggagaaatctcaaaaacttccggtgcgcacttacaaattacgttgaggccaagagccatggcaggacttgggagctggaagatctgcaaaagttcatgggcaagattaactattactatatggtggaacccgatgttatagaggatttgatccagagatacaacaagcgattcaacgtcgacatcatcgctatgttgaaggacgacctgcggcctaaagaaggggtggtggcctga

SEQ ID NO: 12197 - RNA, 1233 nt, synthetic construct
  source 1..1233: mol_type = other RNA
atgtatatcacctactggctgccgcagaaaactcgccagatctcattcgacgagatcatggccgggattctgaacgtgaatcagcttaagaacatcggtgacaaaactgctaccgttacggtctgccgaaacgacctgagtgatcgactctttcggataactaacaccccagagatgattgcgcaactctacgctttcaatgaaaagtacgtggctctcgagcagtgcgatcttaagacacactatcgccatttcagcataccgaaaaagtccggaggctggaggccaatcgatgcaccagacaaggagttgtctgacgcccagacggaattgcgcgaactgttgaacggattcatgatcgctagctatcacaccgcagcccacgcgtatattcagaacaggtccatccttacagcagttcggaaacaccaggctggccatatcaagaaaaaatttaaccctgagttgggttactctgaaactatcgtgtacgagaacaattttgcggcttcctttgacttccatgggtttttcccctccacaaatcctgagttcctcctccacatgttcagtcagatatacccctttgcactgatcatgcgctcacagaacggggatgaacaactgcgtaaggctctttctctcgtattcctgaatggtggcttacctcagggcacacccatatctccatggctgaccaatgtgatgatgatccccttcgaccatctgatgagcagaaaactgaccagagggtacactatgaaggatggagtggaacgtgaatttacatacactaggtatgccgatgatatcgatatctcgtgtccattaagctttgaccccctggaaattcagcaaatcattattgacgccctgcacttcataaatgctccttttaccttaaacgagaagaaaacccattatggaaatcggcactcatgtaaaaattggatgcttgggctaatgtggaaccagaataacgagattacagtcggctggcggaatatgaagtattttaaagccgccctcgcaaattacatcgacgccaaaaagcacggaagaagttgggagctggaagatgtgcaaacactaaatggcaagattagctattacaagatggtagagaagaacgtcgtcgattatattattgcaacgtacaacgagaagttcaaagtggacattgaagagatgattagagccgacctgaggcctgttgatggctacgccgcctga

SEQ ID NO: 12198 - RNA, 1236 nt, synthetic construct
  source 1..1236: mol_type = other RNA
atgtacgtcacttattggaacccccctcgaactagacagatcacgtttgatgagatactgtctggcgtggtcgatgtgaatcagctcaagtacgctggcgatgagacgtcaacccaaaccgtacaacgcgaaggactgaacgacagactagtggcaatcacaaatgtaacatcgatgatcactcagttaacggagtttaatcaaaaatacgccagactggaggcagtgcgggatctttccacatactattatcacttcgagattccgaagaaaacaggcggagtgaggcccattgacgcccctaccaacgaactttccgacgcccttgtggagctgagaactttgctcaaaagcttcatgattgctgattaccacactgccgctcacgcctacatcaatggacggggaaccctaagcgcaataaaaaagcaccaggcaggccaccgttatacagtgaaggaccgcgaaactggcaaggagaagattgtcacctatgagaacaactgggctgttaaattcgactttcatggttttttcccctccagtacacccgaattcatctactccatgttctccaagatttacccattcagcctcattatgaaggaccgaaatgggtacaatcagctgacaaaggctatgcggctgtgttttctgaatggcgggctcccacagggtacccccatcagtccatggatcaccaacgttatgatgataccgtttgattacatgctcaataagaagttaagctacaagtacaccatgaaagatggtatctctcggactttcacttatacaaggtatgccgacgacataaccatttcatgctacttgagtttcgatcctatggaaatgcaggatatcattaaagagacactcgatgcgatcaacgcgcctttcaccctgaacgaagagaaaacgcattatgggaaccgccatagctctgaaaattggatgttggggcttatgtggaatgctaacaatgacatcaccgtagggtggaggaacttcaaggactttaaaaaaatggccagcaactacattgtgtgcaaaaaggaaggcaaaacctgggacctggaagatctgcagcagtttaacggtaggctgaattactatcgtatggttgagaaggagtctgtggacacagttatctcacgctataacaagaagtatagggtcgacatgatggccatgctgaaagcagatttgaaaccaaaggagggagtggtcttttga

SEQ ID NO: 12199 - RNA, 1233 nt, synthetic construct
  source 1..1233: mol_type = other RNA
atgtacatcacctataaagccgcaccaaagactcgtcagattacaatagatgaaatcttagcaggaatcatagaaagcgagaaacttaaataccgggaggatgtcactagtacagttactgcctgccgtgatgagcttacgcctaggctcagggccatgaccgatattaaccggatgattcgcgagctggaagcgttcaataaaaagtatgagcagctagaatccgagccggatatgtcagtccattacacccactacgaaatcccgaaaaagactgggggtatgcgccccattgatgccccagataagatcctgtctgatgcactcaatgagttgcagactctattgaaatcttttatgctggcagattatcataccgcggctcacgcatatgtgccacatagatcaacactcaccgccgttaagaagcaccaggaaggccacgtaagaacaaagacaaaccccacaaccgggaagaaggaacaagtgatctacgaaaataactggtcagtgaaattcgacttccacggcttcttcccaagtagcaatcctgagttcgtcatggggatgctgtctgtgatttatccttttgccctcataatgcaggaccccttcggcggtcacgaggctctgtctgacgcccttaaaatcgccttcttgcgaaatggcctgcctcaaggatcacccctgtccccctggctgactaatgtgatgatgattccttttgaccacctcctgtccagaaagattcggcatggatttaagatgaaagacggcatcgcccgcgacttcacatataccagatacgctgacgacataactatcagctgttacctgagttttgactatatggagatgcaagacgtgattaagaatatccttgcttacatccacgctccctttacactgaatgaagagaaaacccattacggcaaccgacatagctcgaagaattgggtcctcggtttaatgtggaatcaggataacgagatcacggtgggatggaggaacataaagacctttaagattatgatgtccaactacattaggtgcaagaaggagaacgcaacctggacgatcgaggatgttcaggaattaaacgggttgatctcctactataagatggtcgagaaagacaaaattgaagctctgatcagcaaagcgaacaacaaatatcacgtggatgtaatggccatgattaaggacgacctgcggccaaaagacgccgcttga

SEQ ID NO: 12200 - RNA, 1335 nt, synthetic construct
  source 1..1335: mol_type = other RNA
atgcttgctcagaagctgattaagacaagccccgaagctcatcagtcaaatgaacgcccaatcggaaatcgtagactggaactcctgcggcagcctacatccctgagcgagcacaagcacaaccctcatattcggtcaacacatatggtatacattacctacaattgtcctgagcggtttagggagatgacattcgaagaactcctgaggggcgacttcaacctcgccaaccttagcactggaggccatggggccactaggaccgtaatatgcaataaggtgccaccccgcattatgagaatcacaaaggtggaacaaatgatcttccagctgcaagcattcaatcagcagtatgagtccctcagattgacgaccccacggtcgagtctgtataaccacttcagtatacctaaagcatcaggaggcctgcgttggattgacgcacctaacccagaccttatgaaagctctgaaggagctgaagaccctcttccagtcatggatgttcgctgaccaccacacctgtgctttcgcctatgtcgaggatcgctccgtgctatctgcggcaaaaagacaccagaaatttaacgcctggtggttcgcgcacttcgatttccacggattttttcccagcactacgccggagttcgttttaagccaattcgagctgatttatccatttaacctgattctggcaagtcctatcggccatgcggagctgtttaaagcgttggatctctgttttctaaatggcgccctccctcagggaaccccgatctctcccttgataaccaacatcatgatgatcccgtttgatcatgccttcgcaaaagccgtcaatcactttgagtctgggaaacataatcctgacgggacccccatcaccgatagactctgctataccaggtacgccgacgacatagaagtgtcttgcaaagtgatctttaactaccacgctgtggagcggctgatcgttcagttactttcccagatgaacgctccatttactctgaatgagactaagacccagtttcattccagggccggccgcaattggatcctaggtgtcatgttgaacaaggataatcagattacagtcggttaccgaaaaaacaaaattttcaaagccacgatcgacacttattttcgagataagcaaaaggggaaaaagtggccagatgaagacttacagagttttcaagggaacatcacatggttcaaggatgtgcaacccgacactactaagtacattatccagaagtacaatgcaaagtacggtcttgatctggaaagctgcataaaggctgacttggcccccccctctgttacagcctga

SEQ ID NO: 12201 - RNA, 1191 nt, synthetic construct
  source 1..1191: mol_type = other RNA
atggtgtacatcacctacaacacccccgaaacggtaagacagatcacttttgaagaactcatgctgggagtggacatccctctcgattcactgcgcagcggaggtcacggatctacccggaccgtggtttgctctaaggttcccgaaaggattatgaaaatcacttatctggacgccatgatcagccagctgaagatgtttaacacttgctataaggacttgatcgattaccctaataagtgggagctttacgaccatttcgagattccaaaaaagacaggcggcaagatgcgcccaattgatgctccacaccctgagctgaaaaaagcactggcgcaacttaaagatatgatgtccgggtggatgtttgccgaccaccatacctgtgcattcgcatatgtcaacggccgctcgactaaggatgccgtgataaaacatcaaagattcaggagttggtatttctgtcactttgatttccatgggtttttcccttcaactacactacactttgtgttaaaacagatggaggagatctatcccttcaacctcatccttgccgatcctatcgggagacgggagctcagacgtgcactctccctggccttcttgaataatggtctgcctcaagggacgccatttagccccttcattaccaatgtaatgatgattccgttcgaccataagttcgcaaggctgttgaatcagtttcagtcaggcaagtgtaaccccgacggcaccccgataacagatcggatttgctacacccgatatgcggatgatatccatatttcctgcagggtctttttcaattaccgcaaggtggaacgggaactcatcgccatgttacacgagctcggcgccccattcacactgaacactgaaaagacgcactttggaacacgtgctggtcgaaactggatgttgggcctgatgcttaacaaagacggagacataactgtcgggtatcggaatcacaaaattctgaagagcacaattgagacatattttaaagacaggcgaaatgggaagaaatgggatgaggaagacctacagaagtttagaggaaacatctcttactacttaagtgttgagcccgccaccatcgctggcgtgattcagaagtacaatgccaagtacggtgctgacctgctgacctgtatatccaacgacttgaagccaaaagctgcttga

SEQ ID NO: 12202 - RNA, 1155 nt, synthetic construct
  source 1..1155: mol_type = other RNA
atgccttatatcgtggtcaaagcaccacctcggtataggcaggtgtccgttgacgagtttttgtttgaggatgaagcacgtacttcttacgtggctctgtgcgaaactgaaaccatcacccggttccgagatcacatccccgggaacgtgagagatgcatacaatatcccactcgccatcagagctctccagtcatttaacgaaacacactcagagctatttgagccagaccgaacggcgctctatcatactttctatataccgaaaaggtctggcgggggagtgcggaggattgatcaacccctgcccgagttaatgaatgccctgtatgaactacgccgcatattcgaaagcatgttccacgcagatatgttataccatacgaccgcccatgcatacattcacaaaaggtcaacggttactctggtccgaaagcatcaacagaacgcctccaaatggtttgctcactacgatttccataatttcttcggatccgtcaccccagagttcctgagcaaaatgttttccatgatttacccttttagcgcagtgatgcaaagcgctggcggcaaagctgccctggagaaggccctttccctctgtttccttaatggcggcctcccccaggggacacctatttcacctatgctgaccaatatacttatgattccctttgaccacaagtttagtaaccacctggaggcgtttggagagcgcaattacgtatacactagatacgccgacgacatcagtattagctccagatctccatttgactacaagaaagtagaggccgagatcgctgcctcacttaagacaatggaagcttcgctggaattgaaccggaagaaaaccagttacggtaataatactggatctaactggatgttcggcatgatgctgaactccaagaacaacatcacagtcggttggaaaaatgtgaaggccttccgctctaccctgaatacatacctgtatgagaggagtcaggggagattctggccgcttgaacaggttcgttctctgagcggtaccataagctattataagatgatcgacgagcaatggttgaacagcatcctcgacatttataaccagaagtacaagacaagtgtgcgctattgcttgaaacaggatcagaagcggaagcagtga

SEQ ID NO: 12203 - RNA, 1146 nt, synthetic construct
  source 1..1146: mol_type = other RNA
atgtgttactacgtatgtcttccaaaaactgaatctaaacccaacatctggtcctggctcgaaggggatattcattcaccccagtggctatggggcacgaaatcagccgctgcaactgtcacaaggagggttgactttattagcgcgagtgtgaaagacaaatacaacgtcaacttcattatcgggaccttagatgctttcaataagaaatggtcctatctgggtcaggagattgagaagcactacagtcacttctacatacccaaaaagaaactggacgagtacggacgcgtcaaatggcgagagatctgcgcaccagacgatgagctgtcagaggccctaaaagatctgaaggaaatctttgaagctgccggcgttagcctgcaccacaccaacgcgtatgcctatgtgcgccataggaccgcctctgatgccgtgtccaagcatcaatacaaccatagtcggtggtggataaccaccgactttcagaacttctttggcaatacaacaaaggactttctcatgagcatgatggctcagatattcccattttctgcagttatagagagagacttcggtaaggagtgtttgtcacgcgcactggatctctgtttcttgaatggtggactgcctcaaggaacacctattagccctatgctgactaacatcatgatgattcccttcgattatatcatgaccaaaaagtgccgagaaaaggattacatctacactaggtatagcgatgatattcaggtgtcgcaccggagaaagtttaacccggacgaggtccttcgttttatccatgagactctcacccagattcacgcccctttcacaatcgagaaagagaagacaaagttcaaatctgggaatcagtttgtccttggcgtgatgtataatcaaaactgtgacatcacggtagggcacaagaataagaaggaatttaaagccaccctgtttaattacatgtgcgacagactcagcggcaaggtgtgggctctgccacagttgcagcagatgatgggaaagtatgcatattactccatgatcgaaaaggaatacttcgagaatgtgatgaaggaatattcccggaaattcaaacaagacgtgatgaagtgcattaaggctgacttaagacggtgctga

SEQ ID NO: 12204 - RNA, 1233 nt, synthetic construct
  source 1..1233: mol_type = other RNA
atgcagttcacttccctagctaggcccagtttgcaatggaccgcccacatcaaggtgacagagaagaagggattcgttatgtatatcacttacaaggttccaccgcgatatcgccagatgacctttgaggaaatgctttctaatgagacaaacctgagtgaattcaaatactcatcaaacagcatgacacggactatcgttcggaaggtcctcccttctaagttggtagacttcacggatattccccggctaattaaacagtttgaggacttctgcgagaagcataaggccctttatgaagtccctcgtgcgtctctgtacgatacctggagaactccaaaaaaaaagaaaggcccccatggggagactaaatataggaccatttgtaggcctaatagccaagaactccgcgacgcgcataccgaactgcagagaatcctggaggattcgatgatcgcatcctaccacactcgcgcatacgcctatatcaagaacaggcgtaccaaggacgcaatacaggtgcaccaaaaatggaaaagcaaatggttttccgacttcgactttactgatttctttgggagcaccaccctggaattcctgagtcagatgatctttatgagttacccattctgtctcattcctgaggagcatcgggagacagtgagaaaagccttggacttatgctttttaaatggaggccttccacagggtacaaccatatcacccatgcttacaaacctcatgatgattccgtttgatcacatggtatccaatgagttgcacaagcatgatggcgaccgcttcgtctacacgaggtatgctgacgatatcagaatatcctgccgggtgcaatttgacgtgaagcagatggagagctatctgataaagaaactcagacagttcgatgctccttttacaatcaatccagagaaaacaggatatgggtctattaatggcaagaacttttgtctgggttacatgctgaataaagataaccagatcaccattggacacgaaagaaagaagcgatgtaaagccatggtgaataactacatcctggacaggatgtcagggcagccctggtctttacacgaagtgcaagtcctgaatggccagctcaactattggcgctatgataacgaagacggtacgtacgctgtcatgattaacttctacaaacgaaagtacggctgcgacgtggaaaagtggattaaggcagatctgagcgcctga

SEQ ID NO: 12205 - RNA, 1335 nt, synthetic construct
  source 1..1335: mol_type = other RNA
atggtcatccgggtgctcgccatttatgatctcagccagcccaataaggctttcattccggtgatctccccttcccatagaattcaaaaccctactcagatcacggaaactactcataggaaagagtacatgatgatctacatcacttactcgcagcccgccagatatcatcaactgaccttcgaagagatgatggccggaattaccgtaaatgatattgccgagctccggaccggtacagtaagcggtacacgcacagtgtgcctcaaacgggtcccaaagaagtttcgcgacgcagccaacatcccagagctaagggctcggttgcagatgtttacagatacgtacaacactatgatctccaatccaaatcgccagtcctactactacaagttttttatccccaaaaagtccgggggcctgcgagaaataaatgccccattgcctgacttaagagcagctctagtgcagctgcacactatactgtctggtgcaatgctggccgatcaccacactgccgcttttgcctatgtgaccgggaggtctacacttgatgcagttaaacaacatcagaaatgggaatcaatgtggttcgtcaagtttgacctgcacgacttcttcggaagtacaacactggacttcctcatgtcaaccttctcaaagatctaccctttttgtatcctctgcgaggataaaagcggggaagaccttctgagaaaagctcttagtttatgtatgctgaacgggggcttgcctcagggaacccccatttctccgtttctgacgaatgttatgatgattccattcgaccatagaatgtttaacacaatgcgtaactttcgtttaagcgaaaaccgaaccgatcgttttgtctatacacgctatgcggacgatatgtgcatttcctgtcgcgcggggtttagatacaagaccgtggaagactatattgtgtctaccttgaagtggatgaacgctcccttcgaactaaatcgcgagaagacccactacgggagtcgatgcggtcggaattggatactgggagttatgctgaataagaacaatgaaatcagtgtgggcgagagagagaaaaaatatttcgagagcatgttgacttcttactatatgagccacggcaggggaacgtataggggccacttcgacaaggcactcaccaaaccttggccaatggaggatgtgaggaggcttcacggcctgtattcatactacaagatggtcgagcccgcccggattgcggagatcatcgaagaatataacaagaagttcggcatgaacttcgaggctctgctgaaaatggacgagcagcttatagcatga

SEQ ID NO: 12206 - RNA, 1170 nt, synthetic construct
  source 1..1170: mol_type = other RNA
atggagaataaaattatgataaccataccgcagccagagaggttccgagctcccactttcgatgactatttgcgcggcctcaactcgttcgatcagctaaaaacttacgatgcaactgggtgtgttacgcggatggtaaatgtggaagctgtccgtgggaaatttgacctttccgccttcaagttagtactgaacaactttctaacagcaacagaaaagctccgtgcggacgacattcatactcattaccatagcttcaaaatccccaaaaagtctggtgggctgaggcagattaacgccccagatgatgaactgaaattcgccctccaaatgctggttaacatactgtcaaacgtgatgcctcgaacgtaccataccaatgcatacgcctacgttacaggcagatgcacctatgatgcagtcgccaaacaccagaggtgggagagcaattggttcggccactttgactttagaaaattctttgacagcacgaccaaggagtttctgatgagtcagatggcgaagcagtatccatttgcactcattaaggaggacgtggagacttggaccaaactgagccaagctctggacttatgctttcttgatggaggacttccccagggcacaccggcctcacctttgctgaccaatatcatgatgattcccttcgactacgaggtgacacaggacatcaaatccatgcctaatagaaagtgtccaaacggaacagatcgctttatctatactcggtacgctgacgatatccacatctcatgccgggtggagttcgacattaaggagcaggaaagatatctcatcaagaagttgcgcgaacagaacgccccttttacaatcaatgctgagaagacccactatggtaataggtctggacagaattggatgctggggtatgtcttgaacgcctctaacgccatcagtattggccaccaaaacaagaaacatattaaggcgatgatacacacctacgcaatggataagcggaaccagatcatgtgggataaggacgatctcatgaccatgctgggcaaaattcaatactggcgcttctccgaaaaggaattagtggattatactctggagaggctttcccaaaaatacggtttcgacgtgctggaagagatcaagaccgacatgggaaatgccgcttga

SEQ ID NO: 12207 - RNA, 1155 nt, synthetic construct
  source 1..1155: mol_type = other RNA
atgccatacatcacgttgcgggccctaccaaattaccatcaggttagttttgaggagctgttaactaatagcatcgatttgaagcagttcttctacaataagacaccgtcaaacactagaacacactacgtgcagaatgtgaacaagaaactcattacctccattaacttcgacgacatgaaaaaatccctctatcacttcatagatctcaatcaacaattcttcaacggcaccatatctagcctgtccacaatgtacgacacattttatatacccaagtctagcgggggtctgagaaggattgacgctccgaatgatgaactcatgcggaccctcaaggatctcaagagattgtttgaggataagctcctggctatccatcatacatgtgcatacgcctacattcctggccggtgccctctagatgccattaaacgtcatcagtccaacgagagtaagtggtttggaaaattcgatttcaacaacttcttcggaagcaccacccaggagttcctcgagtctcagcttaagcaaatctttccatttagtgaacttctgaacgacgcccaaatttcggggcttttccaccaggtgctatctctgtgctttctgaataattgtcttccccagggaacacctatgtctcccatgctgactaatatcatgatgatcccaattgactttcacatctcaaaatggcttaggagcctggacaagcacacttttgtgtacacccgctatgctgacgacatgcagatttcaagccgatcccctttcaatatcgggaaggttcagaacctgatcctggacgtactgaacagttttcacgcgccctttaggttaaacgatgaaaaaacgcgctacggctccacctcgggctctaattggaacttagggctgatgctgaactcacagaacgagattactatcggctacaagcgaaagaaacagctcaagataatgctgaacaatttcttgtacgactattccaacggtaaattttgggatgcatcagaagtgaggcatctgcagggacagctgcaatattatttgagcatcgaacccgattacataagctatcttgtcgatcgctatagccagattcacaatgtcaaaatctatgacaccttcagtaaaatcttgaagtccaattga

SEQ ID NO: 12208 - RNA, 1167 nt, synthetic construct
  source 1..1167: mol_type = other RNA
atgctgtttactttctacaaaaaagaagcagagacaaacgtgaatttcacagatctcctagaccaattctataagggtactatgccactttaccatcccgaagagatcaagagctacaagaagacaataaccgtcactctgcccgcgcctataactgatgaagccgccaatgaaaaataccacgtcgacaaaatggtggaggccctgaaagagtttgaggtagcaattgacctgcttaacaatattccgcgaaaagatctctaccgtttctttaccatcccaaaacgatcaggaggactgaggcagatcgctacgccttgtcctgagctgatggccaccctcagagatctcaagaatgttttcgagtacaagataaagtgtctgccccacaatgctgcctttgcctatatcaaggagaggaactgtaagcatgccctggaggtgcaccagagaaacaagagcaggtggtttctgaagctcgacattcacgatttcttcgggagcgtgaccgttcataacatgatgactgagtttggcaaaatttttccactccagacgatcatggaacgggttcctgagctgttcgtgaagatccttgacatctgcaccctgccaaatgagcagggccaatgcgtgctgccgcaaggaacaccaatgtctcccctcctgaccaatctatatatgattgggtttgatcacacaattcagaacaccttacgggactataaccatcagcaatttgtgtacacgcgctacgcagacgaccttttgatcagttcacagtacgacttcgattacaaagaattgactgcatacattgcgagtgtcctgcagctctatcatctgcaattaaatcccgataagacccggtatggatccaacgctggcaggaactggaatctaggcatgatgttaaataaggacaaccagattaccatcgggcaccagcagaaagaacgcttgaaagctatgttgcacaacttccttagagacttcacactgggtaagccttggtccatcatagatactcaggtcttggtcggccaggtatcttattatcgcaacatcgaacctacctacgtgagagaactcatcaagaaatatgatgagaagctgaatacagactttaaacagtgcgtgaaaaagattcttcggcccaagacatga

SEQ ID NO: 12209 - RNA, 1194 nt, synthetic construct
  source 1..1194: mol_type = other RNA
atgctttacacttacaagataaagtacgttgaggagcgacataatgtcgaaaacctgctggatgtcctctacggcgacgcaccggctcagacagaaaccgtgcggagtaagaccaacaaagtgtacaatgactttagctacgatcgatttaaaacgaccgaaactacccctgagagatttatactgacttcgcctcatgtgaactcagatgagcagacgttaagacaaatctataacctcacagcagaaattgagtctttcctgaataataacccatcccccgcgaccatgtatcacaatttcaaaatccccaaacgcacaggagggttccgtgaaattaatgcacctaacgagacactgatgaagtttatgagagatatccagccctggttcacctacaaactgaacgccctgccacacgactccgcttacgcatacgtatataaaagggattgcaacaaggccattcagaggcatcaggccatcaagagcaattggttcctgaagctggatataaaaaagttctttgacaactgcgatcccgcctttcttcgccaacagttaaaaatgatctacccctttggtattatgcgggatcaggattaccaccgtttcatggacgcgctgattctattgatcacattaaacaatggactgccacaaggcacaccgctcagtccagtgataactaatctgatcatggtgccaatcgatcgcgatatcaacaaaaagctcggcacttatttcaaggacaaacagcagtctttcatgtacactagatatgctgacgacatgctcatttccagcaataaggagatgaacgtccaagaggttgtagggattatcgacaccatcttgcacacttatactaataaactgcagatcaatcctgacaagacccggtatggctctaaagccggatccaactggaaccttgggatcatgtataataaggacaataagctcacagttggttaccgcaggaaaaagaagataaagacaatgttgttccagttttacagctgttacaatgaaggcacccgggacaaagaatatgctcaggccattttgggggagctggcctatcttcacaacattgagcctgagtataccagggaactcgtgaggttcatggacgataagtattcaacggacttttacaccattctacataagacagtgaaagagaactga

SEQ ID NO: 12210 - RNA, 1065 nt, synthetic construct
  source 1..1065: mol_type = other RNA
atgtattatactcacaataccaagaatcagaacgatagcaagtatcaaagattctcaactaccaaactgaaatccgaagaaatcaccattgagcaatatcgggagttcgaggctattaacaaacagatcttagggctgactaaaaagatcaaagactggttgacaaacaaccagtcggcgatcaagtactcaatcttcaacttacccaaaatgaccggcggctttagaactattaaggctccagaggaaaaactcaaaagctttatgcgcgagatcaaatttgacctggaatctattggcatcgttccacacgattccgcctatgcctacattccaaaccgggactgtctcaaagccattcagtgccatcagagaaataaaagtaactggttcctgaagatggaccttgagaagttctttaataattgtagcgaacaggtcatagccattcaactcaagaagctttacccttttagtttgatgacggagactgattatacttcattcatatctagcctttgcggtctagcatgccacgaaaatgagctgcctcaggggacacccctatcccctatcctgacgaactggctgatgatatccattgacacacagatcaataacgcgctggccgaaaggtctgaggagagcttcatatatacccgttacgcagacgatctgttagtgagcagtaagcagccctttcggcacgaagagatagtggagctcgtcaagggagtattggaacaggaaggtacccccttcacaattaaagatacaaaaacccgatacggatctcggtcaggtaagaactggaatctcggcatcatgtacaataaggaccataacctgacagtgggacataagcgcaaaagacgcattaagaccatgttgtttcagttctatagggggcaacgagacaggggctacgcactggaacttaatggagagctggcttacctcaagaacatcgagccggattaccacgattacctgatcgggtttatgaattccaagtacaggtttaacttcaagaaagccattaacatcgctatcaagcagaattga

SEQ ID NO: 12211 - RNA, 1149 nt, synthetic construct
  source 1..1149: mol_type = other RNA
atgtacataacctctatcaaaaagaatacgggacctggaaacagtaaagcccagctgaacttgattgattccctgttcggtgagtatcaagaacctgacataattatcgatgccgggaggtttattagaaccagaacaaccagtgcttccacaaatgccttaatggaccttaacaactatgacaataacgtcagatacctgtacaggaaaatctccaacttcctgtatggccacgaaattccctctatgtattatgagttcaagatccccaagaaaagcggaggattgcgcaccatcgatgcacccaacgacgaactgaagaccttcatgtccgagattacccatgaattcgggaataagtttaagctcttgacacacgactcagcatttgcctatgtgaaaaatcgctgtgttgtagatgcggtgaaggaacataataataatggctcacggtggtttcttaagatcgacctacataacttctttgggtcttgcacaaaagactttattgtccaacaactgaagcagatctacccatttgctaagcacgaggctgaaacccccactaaggatctgctcaacgccctcgctgatctggcaacattgaataacggcttaccacagggcacccctctgagcccgatgcttactaactggattatgatcccatacgattatcgaataaaccttctgctcaatactctggttaaacaggagaaacttctgaagcagaggtatatctacactcggtatgcggacgatatcattatttcagcaaaggagaagttcgacaaagacattatcgtgaaggagatcaaaaagctctttgagcacagtcctttagagataaatgagacgaaaactcgatttggtagcaatgccggcagaaattggaatctaggagtgatgctcaacaaagataataacatcacagtgggccacaagcgcaagcggtacataaaagacaacatctactacttcatcaagttcaaagagacttgggacaaggagcagtgtcggtggctgctgggtaacctgtcgtggcttcagaatgtggaaccagaatattgcattgggctcctaaactactacaaaaacaagtacagcttcgatgtactgagggaactccatttggtcctgaaacgttga

SEQ ID NO: 12212 - RNA, 1098 nt, synthetic construct
  source 1..1098: mol_type = other RNA
atgtatctcaccttctacacgaacgctgccccgaaacagctgacctgggctgatattctgaataacccatacatcaccagacaaacctcagacatcactaagaagaaagtcactaaagagatccctgacgactacgcggaaatcctgtgggctaagcgtagagtgatgtacaatcccaacctgattccgaccgatgtgaccgctattgatacctctgaacattaccgccactttcaaattcccaaaaagagcaatcccacaaaaatgaggcagatcgacgcccctgatgatttcttggggaacatccagacgatgtacaaaaatcagattgagaatgagttgcaggttctttctcacaaagcagcccacgcatatgtcgccaaatgtagcacagtgactgccatgcagacacaccagagaaacgattccaagtggtacttacagatcgatctgaaggacttctttaatagcataacaggagagtggctaaaaactcaactgctccaggtgtttcccttcccactaattgaagagcgggaactggacaaaattatccatgttagtctgctgaacggtacattacctcaaggaagtcatctctctcctctcttgaccaatctggcaatggtaccaatagactacgttcttaccgaaaagctccacaatctgaatgggcaccattacgtgtacacaaggtatgccgacgatatcacaatctcgtgcaaggaaaaatttaacgagcacatgatccttggccttatcaagcacatatttcgcgagttcaacgtcccctttcgagtcaacaatgacaagactaaatttggctccatagcaggtcggaactatcatctggggatcatcgtgaataaggataaccagttgagcgtaggccatgagaagaatcagaagttcagggccatgatttttaacttctgcacgataggcgacgaatgggagttacacgatgtgcagaagatgctcggactgatttcatattataaggccattgaaccagacttcgtcaataaggtgatcaacaagtataacgagaagttcaacattgacattatgtccaaagcgaaagctatgctcacttga

SEQ ID NO: 12213 - RNA, 1185 nt, synthetic construct
  source 1..1185: mol_type = other RNA
atgcggcatttaaactcaagtgatttgcagagactgcccgtaattaccgtgatggaagaaactaagatgtattataccatccaccgcgaaaaaatcaattatccggaagtgaccctccggaaaatcctattgaataagcccattccagagaagacaaagctcagggagtatacaactgtggagatcccagacacgaccaactttaccctgactgaggacgccattcgatttcgtgactacatcctgaatagctgggaaagcctgtccaaaagcagtatccagctgtactcctcctttaaaattcccaagaaatctggtggcctgcgcgaaatagacgctcctgtccagggacttaagacaattcagtccactttggcctattggttgcaagacgagcttcgaattcttccacacgatgccgcctatgcttatgtcaaggggagaagtcatattgagagcctgaaaaaacaccagaatatgcaggccaagtggtttctgaaaattgacttctcaaacttcttccccgcacataataaggaatacatcctcaatatgctggagcaggtctatcctatcggggcactgatcaaaaatgatagggccgtgatatctaagatgttagacatctgtcttctcaacgataaactgccgcagggaacaccagtctctcctgcactgactaacatctgtatggttcctatcgattacgctattacgaatttatgcgtgactctggggaagaaatacaacaccttctttacatacacacgctatgctgatgacataattatttctgccggaaagtcattcaaatggaccggtgtgatcaaggagatagaaaacatcctgaacaactttaacgccccattcaagatcaacaataaaaagaccaggtacggctcgaatacaggcaggaattggaatgtgggcctgatgctcaacaaagacaaccggatcaccctcgggcacaagaacaacaaaatcctcaatgctaagataaacagattctgctacgaaaacatcgttgagaaaaagacttggacagtgcccgagattcaagagctacagggcaatatagcgtatgcgaaggcagtagatcctgattacacgaattacattttgcacaagtacaccgtcaaatacaagaccaacgttgagcaatgcatgaagaatatgctttactga

SEQ ID NO: 12214 - RNA, 1155 nt, synthetic construct
  source 1..1155: mol_type = other RNA
atgtacatcagttatatcaacaagaagaacaaccagattgaaacgcgtgacacaagcggaccgacggagaaaaatatacaggagcttgggaaaagactccagtgtttctactacctgtacgaggaggcattaaaaatactccagaatggagacgtctcgagccgctaccggaccgaggacaggctgaagaaaaataagaccaggcgacgcattgacgtcccagatgaagagctcatgaagtaccaaaagaaggtggtggacatttttaacaaccacctggcactggtctttcctcagtccgtgtatggctatgtaaaaggtcggagtcccaaagccatggctgaggttcatcggaatcagtaccaagtaatcaagatggatatcaaagacttctttcccaattgcacacttgatttcattatgaagagcatgtctaccgtctatccattttgcctgctggattcagagctaattgaaaccatcatcaagccctgtatgatcttttatgacggccaataccgactccctcagggagcccctacttctcccatcttgtctaatatagcgatgatcccagtggactatgaacttgaatccggcgccttgaatggcagagggtacaattacacatacacaagattcgctgacgatatcatcatttcacacggcgaatttgatttctcttccagtataagcgctgaggaaagaatcctcagcctaatattcggtattgagtatgaagaacctccaaaatccttggaagagaaatacagcgagattaagaagataacctgcaatgtgatcaacaccattaaggattgcttacacaaccagaacccgaacttcaaaatcaattccgagaaaactaaggttctcaacacagagtgtggaaacgtgtggatgctgggtgtgaccgttgggcaggatgtcaagattgggaatcaaaggaaacagggcctgaaagccactctgtggacatttcttaacgattgtaagaacggaaagccttggtcacagaaggacactcgccatatgttggggattctgggttatgccaaatatatcgagcccaatttcgtgaacgagctgattgcaaaatatgaacagaagaccggcacttcattcaggaaggaagtgaagaaaatcctgtgctga

SEQ ID NO: 12215 - RNA, 1131 nt, synthetic construct
  source 1..1131: mol_type = other RNA
atgtatataacatacatagaccaggacaagatgcagaaggtgacctgctccactaatattattaccgagcgtaatatcgcatacgcggagagggagaatggatccttgatctcacttgccgaggaggctagggagctgttgaagaagggcgtcaattcaaagtacacgacctactataagaagaagagcaatggccagaaacggcagataaatgtgcctgatgacgagctcaaagcctttatgagaaaggtggtcaaaacctttactgctatgagcgggttcatgtggccggataacatgtacgcttacatcgaagggagaggcatcaaacagcacgctgaactacacaaaaacgctgccgtcatcatccgcatggacatcaaatcgttcttcgacaattgcaccttcaagtttgtaacggagtctatgaaggaggtctaccccttctgtctgatggattggaatttactcgagcccatagtaaaagcatgcatgcttaaggggcgtctggcccagggtgctcctactagtgctattctttctaacattgcgatgattccatttgttacacacgccaataattggaccaaagccaagacaatcaccctgggcctggcaccaaggggaaaatactttaagatgactaagggtacccggaggaaagcaacatctattgtggccaaacgcatcatcttcagcatgtatgccgatgacattatcatctccacaaacataaaggccccttttggtgaaaacgcgtggaaaacaatccggataattcagaaattactcaactggtatacgccactgcaagttaaccccagaaagaccaaatatgtggatattcggagaaaggggggagcctgggtgacaggattgatggttaataaagaacacaacgttactgtcggccgagagaagaaggaaaagctgaaagcaactattttcagctttctggcagattgtaaaaacgggaaaccctgggacgaacatcgcgtgcgccaaatgatgggcactgtgtcctatatccgacatatcgaacctgagttcgtggacatgatcattcagaagtataaccaaaagctcaacattgattaccatgaacagatcaagaacatcatttacagttga

SEQ ID NO: 12216 - RNA, 1161 nt, synthetic construct
  source 1..1161: mol_type = other RNA
atgcgggaaaacgtggtggaaattaccagaacgcacatcacaggaggagctgcaaatcccgtcagccatatcgagaactggtacgacctggctgccgtattagggctgaaaactgggaccttgtcctatgctctgagagagcgggataaactgcaaaccaaaatccgtttaggggacagaactgtttataagtctgggcgagctctcaaagtgatacagtcgcgcctgacaacactggtagaacctcttttcgacgcacttcccgggaatgagtgcgccttagcctatcgcaccggcgtgtccgccacagatagaatacgtgaaatcccccatgctcggatgctcgtcacatttgatatccgaaagtactacgataatgtcactctaagacacattgaggagtgtctaagaggctgcggcttccgaactcttggagcgcggctggtgggtcgctactgtgtggtaaggcgggagggcaggtgcactttgcagcagggatcaccagtgagccctgcaattagcaatattgtgggtcatttctactttgataccccaattcgcgcgtggctgggctctgagtttccagacgtcagggcgacgtatgtgcgctactgcgataatatcgccttgtttctccacgatggagttccggagggtttcaccgacaagttcaagtccttcgttagagagacatttaggagcggggggttccgaactcacaaatggaattgtatcacagacagtaaccccgtaaaaaatcagaagtttcttggcgtcgtgctgaacgccgaggccagggttgaactggttgtggtggatcggctgagagccatactctttaattggtgtttgtttggcggtcaatgcacggcagacaggtttatgagtgaagagggcatccagctgcgcgacttcatgttcgatggaatgaaagtcgggaagctgaggcagataatgcggggacatattaactacgtcaagaggatcaactccaaacacggcctgtggctcgacaagctcttgggcgctgctctttatctcgatgaaaagggaatgcctgcctgcgcaaacgaggaaatgttccgccgtgtgaagaagtacaaagactgtaacgaatcttatgacgacttcatggccggtattacctcaatcaccggctga

SEQ ID NO: 12217 - RNA, 1149 nt, synthetic construct
  source 1..1149: mol_type = other RNA
atgcagatcctgcggacttacgttgaagatcagagaaccaattcagtgaggcatatccgcgactggtacggattggctgccgtgttgggcctgaagacaaacatactagcgtatgcgttgaaagaacgcgacaaattgcaaactagaattaaactcggagatcgtactgtgtataaatccggacgggccttaaaagtgattcagtcgagactgaccaccctggtggaacccctgtttgatgcgcttcccggcaatgagtgtgcattggcataccgcaagggcgtcagtgcaactaagtacatccgcgagagcataccccacgcaaggctgctagtaaccttcgacattaagaagtattacgacaacgttacacttaaacacattgaggaatgtctcacaaagtgtgggttccaagtcctcggtgcccgattagtcgggcgctattgtgtggtccgaaaaggcaacagatcaacccttcagcagggctccccggtgagtcctgccatctctaatattgtgggatacttccatttcgatgtacctattcggagctggctgacatccgagtacccagacatcgaagctacctatgtccgatactgcgataacattgcactgtttgtgcacagcgatgtgcctgacgggtttacggagaagttcaaatcctttgttaaacgtgctttaggagatggcggatttaggactcacaaatggaactgtatcacggacagtaacccagtgaagaatcagaagttcctgggcatagtgctaaattcacaggctcggatggagctgtgcatcgttgaccggcttcgcgctatcctctttaattggtgcagattcgggggattcgccgctgccgaaaggttcatggctgaagaaggcatacaactcagggagttctgcatcgacgggatgaagctggccaagtttaggcaggtaatgcgggggcatatcaactacgttaagtctattaacgagaagcacggcctctggctggacaaactgtttgaggctgccacatatctcgacgcaagagatctgtgcgcatgcaataatgccgagctgttcaggtctatcaagaaatataagaacggtaacgagccacttgatgagtttatgagaggtgtcgaagccagcgccggttga

SEQ ID NO: 12218 - RNA, 1293 nt, synthetic construct
  source 1..1293: mol_type = other RNA
atgaagtgccagaaatatacggaagaagtatttgactctccactcagcctcgtgcacggatgggacgaattgggcgcactgctcaaaatcaaaactaagtacctttcttgggtgggtggcaaggataagaatggtagtctcaggcggaaccacatgcagcacttagtgaaggtcaagggtagagacacttacaagagcgacacaactttagcgcgtatacaaaccgctctgaatattcctttcgatcagattcaggactccttcccccatgagcacctgcttgcttaccgaaagggcgtgaattacaaaaaggagcttcagaaataccttgggcgcaaatacatggtgcactgcgatatcaagggctactttgataacatatcaatgcgcaagatcgtgaagacgttgtgcgctctgggcgccatgtcagaagcaggggctaaactgatcgccagatattgtattgtacgccgaagacaaagcgaccggtgggtccatacactgcagcagggaagcccttgtagcgccctgctatccaatctagtaggctacgcgctgtatgacagggatattctagcgtgggttgcccgcaaacagaaagagtatccacgagcctctctcgaatacgtcagatactgcgacaatctggttctctttgtcgatggagatgcccccctggagctgataaaggagtatcggcaatatgtgcatgtggtgatgagtaggcgcgggtttcagacccacaaatggtctgttaccccaaagaaccacccgttcaggaatcagcgatttctgggagtggtactgaatgttaaagccagagtggacctggagcgtttccagcggattcgggctgccttgttcaatgcatgcagaactagcgttacagaggctgccaacacctatttctcactgtatcccttcagggccgcagagttccctaccgagaacgtgggagaagaccgggccgtgttcgcaatcactcaacatgcaagagatgaacagtttttgagtatcatgaggggtcacgttgcctatatcgattccgtctccaaagaacaagggtccctgctcaaaaagctttttcaagcatgtgtctttctcagggaaaaccctcagggggtcagtcagcgtttggcggagcccgtgttcctggctctgaagacatacaacaggaaggtcgaatcagtcgaggtgtttctcgaaagactttccagtgcttgtagccggacccgcaactcctcggagtctttaacccaggagaacacaggccattgggagtctgtgttgtga

SEQ ID NO: 12219 - RNA, 1155 nt, synthetic construct
  source 1..1155: mol_type = other RNA
atgaaactgcgcagcaccgaagcatctcagatgatgaagctcatcgacaacttctccgaattaggctcactactccacatcaagaacaaccatatggcatacgcccgtaaattccgagacgatcttcgccggaaaattaaagtgggtaagcgaaccgtctatgcttctaaaagtccactctcggttatccagcgcagacttgggatggtgtttaatattatgatggacgacctgccgtataacgaagtggcaattgcctatcgacctggagtcaatgtggcggaaaaactcgccgtgtgtcaaggctctgctatcatgatcaaaactgacattcgccattactacgataacattagttatgctcacatcgagaaggctcttatggattgcggcatgatcgccagaggtgccagacttatagcctcctactgcactatctggaatggcaggtttagctcactgcaacagggttccgcttgtagccctgctctcgcaaatatcgttggaaaccggtactttgacagacccattgtccggtggttgcgcgatcactgtcccgtggagcacacctactatcgctatagcgataacttggtcttattctgcaaggaagagccaggcaatgacttcataaacgagtacaaggagttcgtcaagaccacagcggctaggggagagttcaggacacacagctggagttcaatcagaaacaatcaccctactagacatcaggaatttctgggcatcgtactgaatgaggtggctaatatttcccgtgtgaaaagggataggatcagggcgattttgtggaacgcggtggtggggaatacagccgaagaggccaagaagtactttgccgacacaggagagctgccccgggggattgctgacgaagaggaggtatatacgaccaagttcatgatggccatgcaggggtatgttgcctacgccaggatgatccaggacaaattcgcaaaccggatagcaaaactgctgattgccgttcgaatcaaggatggctactttaatgaggacgggatgatattcaagtatggtctggataacaagcatattgagtgcgcaaagctgtacaaagacgattccgtaggaatagaagaatttcgtagacggtttctggattgtctaagttcttga

SEQ ID NO: 12220 - RNA, 978 nt, synthetic construct
  source 1..978: mol_type = other RNA
atgatgctctatgacctgataggtgtgtctaaaaatgactttgacaacttcatcgagaacattaacagcgtcgtgatcaaagagggtactcactggaaacatgtaaacccaagttcccacaactccgtttccataaagttcgacaaatacttcgaagatcagttcaaaaacgtaatctctgcttctagccccaaacaaggagccttttgcggaaagagtatcatccaactcctggccccccacagcagcaaaaagtacgtcttaaccctggatatcaagaatttcttcggtagcattaactttcacaaagtgcaggagtgtaccaaggatcattcgtctcttcagctgtatagcgacatcatccatatattttacttcggaggcgatgatcagctgcgtagaggactgaagggcagcgcagccatagccgaagttgtcgggttgaagattgatcacctcatccgcaaaatcatttattcgaacaaggaatactccaataaggaccttgtgtactctaggtactacgatgacattattatttcaggggactcatttggcgccctaaggagcgtggcaagtgtccttgcaaagagtatctataaggaactgggcctgctcctgaatcctaaaaagacgcgcttgcggatcctacacggatcaaagatattggggttgaggttccatgatagagatattacagttccgcagagtttaaagcataaactgcgagcgattatgtacgaatattcctccgctaattacgatgaatcagactatgagtcagtgcgggacgctaagcgccacgttggccagatcatcggcactctgaggtacatcattaatttcacatctgccaatgtgtccagatacgaggattggctggctgacttttatgaggagcttgaccggctcgaggagattcgaaaagatctcgcgcagtactatgacgacgaaaaggggatttattttgacatgtga

SEQ ID NO: 12221 - RNA, 1074 nt, synthetic construct
  source 1..1074: mol_type = other RNA
atgctggataagagacggctggccgtcaacacgaaagacttcagcatccttaaaggcatcctgcccggcgttatcgataccctgattcattatccagagggcgcttacaagcggattgaaattccgaaaaagtccgggggcatgagaattatccatgcccctcttggtgaggcaattatgcagatgaacgccgacaatacatcaacgtctctcttaggttggattcaaaagagaatcaatcacgtgctaggcttcatccttttaccctcgtccgtgtgcgccttccgacctggaatagatccatatagttttctgcgaacaactttggacggcatctctaactgtaggtcttcccaagtggggggtatctacaagatcgacatacaggattttttcaatagtgtatcggaggatcaggtgaagatggtctgggaaaagagcctacctaagctcagtggcaacttctactctaaggacatcatcaatatcctgactctgctgtcttgttacgaagggaaactgaatcagggtcctcccagctcacccattatagccaacatagttggatatttgtgcattgactccaatctccgcggactgcagcagaccagaaacattggcagcaacaggactccgaagtcattgtggattaggtacctgcgttacgcagatgatatcatgattctatctttcgacggagcaataccaagcgatatcccagatacaattaacgaaaccatcaaaaacagtggatttcacatcgctaaaaaaaaaaccctcctgttgaatgacagccactcctatcctctgctcggcataagccttttgcgcgacacctccccagtgggttttcagtttcaaattggaacagcccgtgatcgcgacttggcttccgagttactggggtaccagggggaagggattaagtcaatcgcggggaagctcggatttaataagcgcatcagtctgctgggacggtcaggggttgaggtcgagcacttccccggcaggtatagcaaacgggtggctcatgcgctttctatgaaatccgacctcctcctgtgcagccagtga

SEQ ID NO: 12222 - RNA, 969 nt, synthetic construct
  source 1..969: mol_type = other RNA
atgccctctaaagtcctgcagcatattcccctgaagttgaaccttcacgagataaaatacttaactacccctcttaagactaccgagtccagactcctgaagatcatctcaatcaagtcaaaaatcgtgaaggaaaagaagattcccaaaaagaattcagacgaattccggattttgaattacccggttggcgagtttaaactcattctgaaacggcttcataaattccttatgtctaggtccaagtttccaaaaagcgtttgtggtggaattgtcgacaaaaacctttatgatatggtgaaatcccattgcggccgagaagggatttaccagattgatctcaaagactttttcccaaacataaactccgacagagtatactcttttttcaaaaattcggggagaagtgaacggatctcccaaatcttgacagacctggtgatttacgacaagcgcctgcctcagggttttcccacgtcacctattgtagccaatctaattgcttggaagatggattatgatctccagagtatctgcaataaccacaaactcaactattccaggtggatcgacgatgtgctcatcagcggcaggatcagtgaactgaataaagccatctacaagatcgataagagcatactgaagaatggattctacatcaacaacaagaagaaaaggctgctgaagcgcaagaacagcaaagaaatcgtcagcgtcggcctggatctaaagcgccacaaacctgatgtgccaattaaggtttatgagaagctggagtatatactgcaagtgctgattacagagggtgtggagttcgcacgtgacttctttgaggaggaatttaagttgaaggacatacagaaaagcttaatagggaagatccgattcattgaagagtataataaggcgaaaggcaacttcctctctaacttatacatccagatcaattggggaaaggggatcggatga

SEQ ID NO: 12223 - RNA, 1257 nt, synthetic construct
  source 1..1257: mol_type = other RNA
atgcaattccttaaaaagctgaaactggcactggatagattgatcctaggacgatctacccccggcagaatgctagagcacgtgttcgacaggaacttgagtattctcgacaaggttctggagagcattctgcttaaggacggcctcgaacattccgaattccgcgggcgtttaactcggtggcggaagagttatatcggcaagtcttgggggttatggacggatttttctgacagcgccaacatttgcgagtttctcggcgatagctcaatagccgagagcgacatcgtgtccattttcgctgatccagatatgcactaccgccgtttctggcttcccagccgcaggtcagataacacaaggtctaaagggcgcgtacgaaagagaaggttaattcacgcgcctgacgatagcctgctgagcatccatagactactgctgcgcgaggtgttggacagttttgatctcgtgatctccgatgcggcacattcatatcggcccaggagaagcccaaggacatgtatgttccctcacaagtcatctggctggatgatctgcatggacttcagaaactttttcggaacaattactgaagacaaagttctgcgcgccctggtcgatagacttggttgcccaagtagcactgctgcctgttatagtcgattgtttactgtgaactgtgaagacaaagggatccgagtgctgcctcagggtgcaccgacctccggttttatttcgaacgtctgcttaattggctttgatcagaggctgagagccatgctttcctccgtcgactctaatatagtgtacacccggtatgctgacgatatagtaatctccggccctggcatgctcagtaaatccgtgaagtcccgagttatcgccctggtgagccaggcagctaatgggaagggatttgtaatcaataattcaaagacccgcgtctatagcggggctagtgtgatgagggccctcggaatcgacatccggggaggtgagctgttcccacggaaatcgatcatcgattacattgagaaacaggtgcggttgataaagacacgttcactgacggaagtctctaacggatggggtggactcgtcgacggccaggacaataccctgaaatacttggatcacctgtgggggctcataatctacgcctcaggaattaatagacggtacgcacaaggggttattgctgagctcgagaatgtggaaacccccctctccggcaggcttggcctgattgactcttga

SEQ ID NO: 12224 - RNA, 1131 nt, synthetic construct
  source 1..1131: mol_type = other RNA
acgcccctgaggacacctaaacctgaagagccaaataaaggcgttttgccgatttatggcgtggcgcacctgagctggatgctcgacgtgagccctagttcgctatccactctgctgggatccgagagggccgttcgctccgatttacgacgccgtggctctcgccccagagccatttatatccccgactcagagtacctcgcaattctaagaaagattaatcagctggtgttcctcccagccgacgagaggctcgacttagccgccttcggttttaggcctggctgctcacctagtgactgtatggataagcataaacacgggaagtggatgcttaaactggacatccacgaattcttctcaagtatcagcttcttcgacgtgaagcgtacttttatacgggtcggccatagcgagacggtaagtgagacattggctgagatctgtacaataaacgagaatggtagacgagtgttgccgactgggtttccaacctccccatacatctcgaattgggtgctcgcatcatttgacaagagaatgagggcttggtgcgcggaaaacaaaatctattacactcgatatgtcgatgatctgtttttttccggcaccgaagctgcccccaataatataatcggaagcatccaagggctggtggattaccgtctgggtctgcacggactgaccttgaatctgaaaaagacccggttctaccggggagatagcgtctttaaaggcctgggagttgaactccacccctctagggacgagcttgtgggggctggacggtacatgttgccttctagacgcatgcgcgcccatatcgagaaccagaccaggtgcattaagaaatttggcgtcgaaacagcaagcagacactggtgtgagcggagcggtatagatagagggcttggcattccagagtatcggtacgtccagcatcttgcaggtgcactgagctacatcaagaacatcaacaaggcttacggcaatgatctggaaaacgaactccaaattgctttaggggaatccgtttcttcatacctacttgggcatcagagtattttcccaaactctgtgtattcttcatcttatgacgtaccctccgcccgcaagttcggatccaactga

SEQ ID NO: 12225 - RNA, 978 nt, synthetic construct
  source 1..978: mol_type = other RNA
atgttcaaatttgacggagtgccaccgatcagttatcaagagtaccacatacccaagaagagcaaaggagtaagaattatcgaggaacccaacgctcagctgaaggccgttcagaaacgcatcttaccttacctgtacgattgcacaagagtgggtctgctccctgtgagtcacttggcccacggcttcataccatataggggctgtatgaccgcagtgcccaagcattcccttaatagccccgtactgattggtgcagatgtgcacgactttttctttaatttcccagctgaacccgtggagaataacctgtggttcgccatggactcaagcagagtcgattatatcatgacctgtgcactctggaaaggaaattatcctaaggagcatttcccccagggatcgcctatctctccatacctaactaacattggcatggtagacgtggaccgaatgatcgctgctttttgcaagaaaaacggactcttctttacacggtacgccgacgatatgctgttcagtataattgacggggccgaggattctccgcaggtccgaaagatgatgcgtgaggatgaacctttttcctcactatttcacggggtggaagtcattcttcaagaccatttggggcttgagttatctgcaaaaaaatctcatgtgatgtggcgccattccacttgtaagacgcaggcgctgggcatcacatttcggcaagataataaggggtacaatgctaacaaacggaaacgtcgcaacaccagagcccagctctacaacctgttccggaaggtccaagcgcaggggggccacttccaggatgaagactggcaggagtggaggagcgtgaatggttcaatgaattattgcaacctcgttaggagcctgtccaagttccctgaggttgcaggcattgacccagtctttcagttgtcctactataacgaaatcgaaaggtgggccaacgctgccgtttga

SEQ ID NO: 12226 - RNA, 1590 nt, synthetic construct
  source 1..1590: mol_type = other RNA
atgacggacaatttcgactacaaaaacccacataacataaccacagggagattgctgtactctgacgagctccccttcttcgacatgatatccttttgtatgttcctgggaactacccctacacagctccagcggatcttgggcaatatcgattctatgtatagtcgcttctatatcgataaggacacaggtcgagtgacaagcaagcatgcaggattaaggctgcgggaaataaacgcacctttggagccccttaaaacctggcagcttcgtctactggatgtgctcaatctgttccctaagcatgaggccaatacggcttttatggaggggtgctcggttatcaatgcagcaaagactgcgaccaaaggagatgttctcgtgcatgtcgacataaaagatttctttccaagccacactgccctctacataaaacgtaaactgtccgccctggtatttaaaacatttcggatgtacctccccgaggaagtcctggtggcgattactaagttaatctgttacagaatgcagctacctcaagggtccccatgctcacctatggcaaccatcgtactaaattacgatttagacacacgaatcgacgctgtggccaagaagtacaacctggagtttaagaggtatgccgatgatatgtggttcacaggcgttcagtcggacgacgtgatccaggagtttttgtacgagttacaggatgcaattcaccccttctctctcaactacaagaagactaacattatgaggactagagcctaccccaagttcaacggagtcagaattaagttcaccaaatcttacgtgccaagtacgcaagctgctaaaataatcaatatggtagttgccgctctcggcttcaccaagcacaaagctaacatctcaaagaaccaggtcctgattgagggctatcccactccccagcttgctttggacgatgtgcgcagtctgatggatagcgtagccgcaaccatcatggccaaatatccgaacttggtctttacttgcaaaccgaactggtactatatccaatccaccaagaaatgccttgggctgaatatcgtcggcgaaaatgtggtctatccacgcaaaaggtataacgacctgagactcgaggccatgcttatggggagacagcgagcgctgttcgccctatacttcgctattgtggccaagcacaaagcaaacccacggctgctgccccctattaagaccgccccttttgtgtttgcctcaaaaggttccgtgggacacgagaattttcggaatctgctgaccaacccgtttaataggagggtttttatgggaaaggttgcttatctgcgcagcattaacccagaaaaggcagataagatcatggctattgaaaaggcgagctatcaaaagtgtattgacgggtatttgctgtggtaccctacagtgaacgtggattattacccagacgtgcagtggctcagcagtcttcgcgacatccccaatagcgaagcctgcgtcgacattttcatcggttcctcaatctccaatgaggaactttcttctattctcggcgaagccggcattggctgttgggctctgtga

SEQ ID NO: 12227 - RNA, 1704 nt, synthetic construct
  source 1..1704: mol_type = other RNA
atgattgagctgatgaaaaattacagcttcaaaaccacccttaagaatctcgtaaagggcttcgtcgctgccgaaacagctgctccgaagcttttcacgaaaagtttagacgactggccattctttgatatcgcaaccttgtgtgcttatctagggatcacgccactggagttgcaggccttatgcaattgccaacctacactcctctatcaccgcttttacattgataaggcaactaacaggattgtgccattcaacaaaaccgcgaacctgcgaatgatagaagctcctcggcctgagctgaaagagtatctaatgaaactgattcccttcttcgaaaagttccccattcacaagtgtaactatgcttttatacgcggcaaaaagatcaaagatgctgtggagtctgtgaaagagggcgaggttctcatccacaccgacctaaaagacttttttacagaacatactccgctgtatattaagagcaagttggagatgctgatgctccagaacgtacccgagatgtatgaccctgagttttgtaaggtgctgactaggctgataacagtgtacacacatctcccccagggatccccctgttcccccatcctgaccgccattgtgaattatgatatggattccaccatccagtctcttgccgacgaatacaatttgacctatatgcggtacgccgacgatatctgcttttccggagctatagccaacgatgacattcgcgtgtttctggacaaacttgtcgacgccgtccaccccttccgactaaaccggaagaaggttgcaataatgcgggatgcagcatatccggtgttttctgggttaaaactctacatcgaaaacgaccgccaatacattccaagtagcctcttagggaagctcattaaactgctgaggcatgaattcgaaccaatggagttcacctccgtccacactgtggccactcagggaaagatccatttcaaactgggcaaaatcgttgagacaccagtggggagtctgaaggagaagtgcgatcgtttcagctgccacctgaatagcaagtactcagccagcggttttaagttcaagctgaagcctacatacttttacatcaaaagtctgaagcaagttctcgggatgcacattacagatggaaagatttgttaccctcggaaaatgtacaatcaacttagactggaggcaatgttggtgggtcgtcagatggccttccagttcacgcagaaatatatcgccaagaatactatagaccccatcacctcaaaacagcatgtgtatcttgacttgcagaattttgtcgacaacatctctgacaaagatgacccaatgtactccaggttttttactgtgagatacactaacgtccctgtcggtaacgctcgaaatgccctgtataccatctcatccagatcttataaattggtgtcttacgcagagattttaggaatcacacccacgtatcttagaggcaagaagagaacctcgaagggctacaggaacatgctggataagcctgtgtcactcaaggttttctatggcaaagtgaattgggtaaacactgtcgatccagaaaaggccaccaagctcaaggagatcgtcaagaagtacaagcttaaaacactggcggcgctggtgaaagcatttcaggaaagcgcgagtcgcgaatacgtaaaattctcagccgtttga

SEQ ID NO: 12228 - RNA, 1458 nt, synthetic construct
  source 1..1458: mol_type = other RNA
atggacatcaacagattccccaagctggtccgggagtattataatacgttaaccggacgtcatactccattagagtccatctgtggcaatcgggttctcaccctctctgaactaccttttatcgactacaactcattttcaagctacatgggagttactccagagatccttaccagtatcactgacgtgacagcaaaagcttgctactcacgcttctacatcgacaaaaacaccaagaagattgtcccctacagcttcggcattaaactgagggagataaatgccccaaccgaagcacttaaggaattacagctgaaactcatggaattcttcaaccagtttcctaaacacccatgcaattacgcttttatgcaggggaagaacatagtggacgctgccaaaactgtcgccaatgatggcgtactggttcacgtggacctcaaagatttttttcctgctcacaccagcctctacgttcagaagggcctggagcatctgattgccaagaatttcaacactaaccttcctttggacgtcctgagccgcattgtgaagctggtgtgcttggatggggtgttgccccaaggcgcccctacttctccgatactgaccatcatcctgaattacgatttcgattgtcgggtggcagagttggctgaaaagttcggtttcacttatacaaggtacgccgacgacctttgtttttcaggtaataagagcgatgcggagtgccaggattttatcagcgaactgtccgaagtggtccacccgttcaggatgaactacaaaaaggtgggcataatgagggacaaggcatatcctattgtgacagggtttagaatcaagacaaaggtcacctatttgccaagtacacagtctgcgaagatcatcgggattatcacaaactatctccaaatgcccgacctgaggggaacgatatcggccaaagtaattgagtttaccttttctaaggacacaaaaatacccctcgatgagctgcccgaaaccctgacacggatcactgaccttgtacataccaaatacccaaacctggaattcattgtcaagcctatgtacaagtatgtgcagtccgtgaagacggtgttgggtctacacatctccaattctgaagttaagtatccccgcagcaaatacaacgatctgagagtggaggcaatgctgattggaaagcaactcgggattcgagaggttatgtataatattcatccggccagaattgctttagtgaagaaatatgccgcgcataacaagttctttaaatccagtttccgaaacctcatggtaaagccactatccaaaagagtcttcaatggcaaacttgccttcctgagtatcgtggatcccgataagacactcaaactgaaaaccattatggataaacaccgtcagaagacggtcgaggacatgatcgacatcttcaaacgcgagggattttga

SEQ ID NO: 12229 - RNA, 1185 nt, synthetic construct
  source 1..1185: mol_type = other RNA
atgaaaaagtacactgtcaacacatccatgctgagcctgctggagggatgttctttctttgttaagggcaagggggccgagccccttccatactctcatgcagaagaaggcaagctggggaacaaatttttctataagatcagcgggtccgagtcaaaacaaattaataccattcacgaactcctgatatcctcattatttgagcggctccctgttaatcaatctgcaacagcttatctgaaaggcaagtcttacctagactttctcgagcctcaccggaacaattattacttcctgaggactgatctcaagaacttcttccattttattgacaaagagatggttgtcgaggctctgaggcatcacgtgagcgaagaacctgtcactacagaatacagtcagtcttccttggagctcgtctcacgcttagtgacccttaccctgccaaaaaatagtaagaatttggagttcgctggtcagtccatcctgccaatcggatttaaaactagtcccgtggtgagcaatgtggtgtttcgaaagttcgacattttgattgaaaagttctgcgcccagcatgacatcttgtacacccggtacgcggacgacatgcttttctcagcctcggatataaggacttccaaatacaaggagaaggacatttttagtgtgctgagaaaccccaaggtgaaggagaaaaagcctttcctgcactctagaagattccttgaacagatctcattcattgtaaatctcggcgggtttaagatcaacaataagaagacgcatatgagcaaaggttactttaccataaacggatacaccatcagcggcactaactacccgtatacatccggcaccattcgtgtatcgaacaaaaaaacgaaaatcatctgcaaactcttgcacgagtgtaagattaatgtcgatgatggagatatccttaagactgtttttaactatcgcgagacaaaagcacggctaccctataagagctccaagaaatttatgaatacgtatcacgccacccagctgaataacaagttaatgggttaccgctcatatctaattagcctgctgaagttcaacgaaacatataggtgcatggacagtacattcataaacaaatgtacctctctcgtgtgcgaactggatagcatcatcaatagacgaatcaacaaacagtga

SEQ ID NO: 12230 - RNA, 1179 nt, synthetic construct
  source 1..1179: mol_type = other RNA
atgaagaaatacacaattaatgcctccatcctcagtacccttgagggatgtagcttcttttttaaagggaaaggagcagaacccttacccttctctcacgttaaggaggggaagctgggtaataagttcatctataaagtgagcggatccgaagctaggcagatcaatctgattcacgaaagtctgatcagcacattgtttgagaaacttcctgtgaaccagtctgccactgcctacctgaaaggcaagtcttatttagactttctcgagcctcaccgcaacaaccactattttctaagggtcgatctacgcaacttctttcatttcatagacaaagagatggtcctcgaggccctgcaccatcatgtttcggaagataagattacagatgaatgcaaccaaagctctctggagcttgtcagccgcttggtgactctgaaactgcccaacgaatccgcgaactccgatttcaccggcaagagtattctcccaattgggtttaagacctcaccagttgtgtctaatgtagtgttcaggaaattcgacatcctcatcgaaaaattctgcgctcaacacgatatcctctatacgagatatgcagatgatatgctcttttcagctagtgacattagaacatcccagtacaaagagcgagacttaatctttgatctggttaaccctagggtgaagaaaaagaagccatttctacatagccaccggttcatcgagcagatttctttcattgtgaacctgggcgggtttaagctgaatgccaagaaaaccaagatgggtgagggcaacttcactataaatggttacaccatttcaggcactaactattcatacaagagtggggccatacgggtatccaataagaaaacaaagatcatctccaagctgctccatgaatgtaatacgaaagacgacgacggatcgattttgaacgcggtgtttaattaccgggtcgctaagatcaaactgccgtacaaaccttccatgaaattcctgaaggtgtactatacttctcagcttaacaataagctgatcggatataagagctacctgatttcattgctgaagttcaatgagcactaccgatgcatggaccccgcattcataaccaaatgtgaaaagttggtcagcggccttaatgagatgatcatacgtagaatgaagtga

SEQ ID NO: 12231 - RNA, 936 nt, synthetic construct
  source 1..936: mol_type = other RNA
atgaaaagctacaccatcaattctactgtcattgcgacattggagacttgttccttttactctaaaggcaaaggcgtggaatcatttccatattctcaggtgaaagagtgtaagttgaacaacaagttcatttacaagctgtccggagcagataccagacaaattaatgagatacacgacatcctgatcaagactctgtttgacaaattgcccatcaataatgctgccacagcctacctaaagaacaagtcctacttagattttttggaaccacatcgaaactccaactatttccttcggattgacctgaagaacttctttcacttcataaacaagaagatcgtaaaggaggtgctcttccaccatgtgtcatcagatcctattagcgagaaaaccacacagtctagcctcgatcttatcacaaatctgctgacgatcacactcccaaataacgttaagaatctggaatttagtggaaagagtattctcccaatcggattcaaaacctcacctgccgtttctaacatcatcttccggaagttcgatatccttatagagaagttttgcagtcgccatgacgtcctctatactcgttatgctgacgacatgttatttagcagcagtgacactaggaccgagcagtatattgagaaaagcctgttcgatatccttctgccccccccgaacaccaaacccttcctgcactcttccaagttcacagaacagatcgccttcatactgaatctcgggggttttaaaatcaacaccaagaaaacgtccatagcaaaggggaattttaccgtgaatggctacaccatttccgggagcaactatccttacaaatcaggtacgattaggatttcgaataagaaaaccaagacaatcagcaaactaattcacgaatgcaaaaagactagtcctatgagaacttactga

SEQ ID NO: 12232 - RNA, 1170 nt, synthetic construct
  source 1..1170: mol_type = other RNA
atgaaaaactatacagtatccagctcaattctgagcctggtgaaagagtgtatgttctttaacgaaggttctggcgtgaaatcccttccactttcatgcgtgcacgaaaccaaggtcaagaataagttcatctacagcatcacaggaagtgaaggagataaaataaaccacattcatgaggcattgaacagatctctgttttcaagaataccggtgaatcagagcgccacggcttatgtcaagaataagacctacctgaactttcttgagccccaccgtaaccactatcactatctgcgcgtagacttgaagaatttcttccacttcattagcgacaagattgttagggagagtctcaaggagcatgtgtctactagcaacatcagtgaaacttgtagtcaatctcatttggacctggttacaagcctggttacttacacactcccaaagtccgcgaaaaataccgatttcgtggggcgctcaatcctccccatcgggtttaagacatccccactcattagcaatattgtgttccggaaattggacatcctgatcgaaaagttttgctcagaacataatatcacctataccaggtatgctgatgatatgctcttctcctcttccacaatgcgtgatggcaaataccgagagaagactccttttgacggagtcctggggatcaaggacaaaaaaccctttgtacattcccaaagattcatagaacagctcagtttcatcataaatatcgacgggtacaaaatcaatcgccggaagacgatcaaaaaaagcggctacattagcatcaacggctactttattgaaggcagtaattacccttacattattggtgagctaagagtctctaataaaaaaaccaaagtggtcagcaagttaatctatgagtgctcaaccgataaatccgaccgggagattttaaaagccgtttttaacgtggatgtggagaaacttaagttcaggtttaaccctaaggattccttcaaggatgagtactcaaagtcccagataaacaataagttaatcggatacaggagttatctgatttcgctgataaagtttaacgactgtactcagtctatgaataaggacttcataaacaagtgctcgaagctaatttctgacatcgagctgatcattaaccggcgaatgtga

SEQ ID NO: 12233 - RNA, 1176 nt, synthetic construct
  source 1..1176: mol_type = other RNA
atgaaatcatataccgtgaattcctctgtattaagcgttctggaagagtgtacactgttcgataaggggagcggactgaaaccgctacctccgacccagtttaaagagacaaagatcggtaacaagtttatctacataccctcaggctccgagaggaaaacaatcaactatattcacgagagcctgaataagaacctttttagcagaatccctattaatcaaagcgccacggcctattccaaagggaaaagctaccttaacttcttggaacctcaccggaacaactactattttcttcggcttgatctgaagaactttttccatttcatcaatggcgataccatcaaaaatgcgatttctgaacatgtgtctagcagtgcaatcatggacgggtgtatccagagtaatttggactttattgtgaaagctctgactattactctccctaaagagagcaagaacaaagagttttctgaaaaaaccatcctgccaattggctttaaatcaagccccatcgtaagtaatattgttttccggaagctcgacattattatcgaaaagttctgctccgaaaacaacataacctatacaagatatgctgatgacatgctgttttcctcatccactaccagggatgagaattaccgcgaacgcactttagtggcctccctctttgagaagaaagacaaggtcccatttctccacagtgataagttcatcgagaaaatcagcttcatagtcaatatagacggcttcaaaatcaatagaaggaagacagtgaagtcaaagaaatatctgtcactgaacggttacatcatatctggatcggattacccctacctctcaggatctattagggtcagtaacaagaagaccaagattatttccaagatgatccatgagtgcaacaagtccaatgatgatatcctgatttataagtccatctttgggtctgacccatctaaaatcaaattccagtacaagccaaaagagagtttcttgataaagtactgtcgctctcaggtgctgaacaagctcgttggatatcgaagctacctaattagtatcctgaagttcaatacggactacttatgcatcgacagaggcttcataaaaaagtgcgaacacctgatacgtgagttggaacccctcattgagtcgcgaattgacaagtga

SEQ ID NO: 12234 - RNA, 1176 nt, synthetic construct
  source 1..1176: mol_type = other RNA
atgaaaaactatacagtcaacagcagtgtactgtctgtgcttaaggaatgcaccttctttgatgagggctccggattgaagtctctaccatctactcattttaaggagactaaggtaggcaaaaaattcgtttatgttcccagcggatccgaaaggaatcacattaacgccatacatgaaagcctgaataagagcctgttctccaggattcccattaatcaggctgcgactgcctacagcaagaacaagagctacttgaactttctcgagccccacagaaattcatactatttcttaagactggacctgaagaacttctttcacttcatcaatcgaacggtggtgagaaatagtatcagcgagcacgtctccagtagcgaagtgatcgagggttgttcacagtctaacctggatttcattgtgaatattctcaccattacgctgccggacacatccaaaaatgaagaattctcaggaaaaaccatcttacctatagggtttaagtcgagtcctgtcgtgtcaaacatagtgtttcgcaaacttgacattctcattgagagattctgtgcaaaaaacaatgttacatacacccggtacgccgacgatatgttgttctcttcaagcaccgtgcgcgacgataaatacagggagaagtcagtctttgacgacctcttcaagaaaaaggaaaaggtcccattcctccatagtgataaattcattgaggagatctccttcatagttaacatcgacggttttaaattgaaccggaaaaagaccgtcaaatccaaaaagcacctatctctgaatggctatttaatctcggggtcagattatccttacctgagcgggtctattaggatctccaacaagaagactaaaataatctccaagatgatccatgagtgcaacaaggatcaagatgatatctctctctataagtcggtgtttggggtgaatccctccaagatcaattttcggtacaaaccaaacgaggcttttctgatcaagtattgccgaagtcaggtgcttaacaaactggtaggctatcggagctaccttatcagtatcctgaagtttaacgagaattacagctgcattgacggcaagttcatcaataaatgtgagtctctcacccgttgtctggaaacaattatagaatcccgcatggacaagtga

SEQ ID NO: 12235 - RNA, 1182 nt, synthetic construct
  source 1..1182: mol_type = other RNA
atgaaaaactacactgccaactctttcactctttcattacttaagcaatgcacctttttcaacgaggaatctggactgatctctttgcccagttctcatgttattgagacacgggtgggcaataaatacatatacaagctagttgggtcagaatcagagctgatcaataaactccacgaaaatcttaacgagacgttattctgtagaatcccagtgaatcaggctgcgactgcttacacaaagaataagagttatctggactttttggaacctcaccgtaataatttttactttttgcgggtggatctgaaaaatttcttccacttcatcaaccgcgagattattaaagattcactcaaggatcacgtgtctagcaaaccaatcatctctggctgcagacaaagcaatcttgactttatagtcaacgtccttacgataaagctgcccgaaaccagtaaaaacacagacttcattggaaagtcaatcctgcctatcggcttcaagagctccccagtagtcagtaacatcatttttaggaagctcgacatactcatcgagcgcttctgttttgagcataatatcatttacaccaggtatgccgatgacatgctgtttagctccagcgatctgcggaatgataagtatcaggaaaagtccgtgttcgatgacttgtttaagaagaaggagaagaacaatttcctgcattcggaccgatttctcgaacagatttcattcattgtgaacatcgacggattcagaattaacagcaaaaaaacagtgaggtccaaaaagcacttaggtctgaatgggtatctgatttccggttccaattacccctatatagatgggaaaatccgcatcagcaacaagaagaccaagaagatatctaaactaatctacgagtgcaataccgacaaaagtgacctcgatatcttcaaggtggttttttccattgatccgtttcggattaaatttcgaaggaaacctaaggtcgaatttttgaacaactattgttgtgcacagatcaacaacaaaattatcggctaccgttcgtatctgatttccctgctcaagtataatgacaaatacagctgcctggaagacgatttcattttcaaggtaaaaggcctgataaaagagagcgagaaaattatcaacaacagaatgaagaaggagatctga

SEQ ID NO: 12236 - RNA, 1176 nt, synthetic construct
  source 1..1176: mol_type = other RNA
atgaaaaagtactcactgtctagcgtggttctggatcttctgaaggaatactcctactataaagaggataaaggagtcttgcctctctcatcctcccatgtcagagaattcaaaattgggaagaagttcgcttattccaccgctccggcaataaatcgtatccactcacacctatcaaaggtaatattttcccagtacgttagcaaaatacctgtgaaccagagtgccaaagcttaccttgcaggcacctcctattatgattttatagaaccccatcgcaacaattatttttttctccggctggacctgaagaacttttttcattcaatctccaaggacgtaattcagaagaacttccttgagtactttagtgacgagaagatttcggagacttgtgagcagacacacgctcaggccatctgcaatttgatcatgtataagctggacgtgaataacagcaacgtggcgtttaaaggtaaatatatcctacccatgggtttcccacttagtcccagcatttcaaatgtggtcttcagaaaaaccgatttgctgatcgaaaaattctgcaacgaaaaagggattacgtatactcgctacgccgacgacatgctgttcagcagtaggggaacaatcgtcccaccacccatattccggctgatcggaaagaataaggacaaagttaaagcctatgagtctccttttttgcacagcaaacgattctacgatgaaattagctacctcgtgggcctggacggatacaggatcaacaagattaaggtgatcaaggcagtaaacacaattagcctcaatggttatacgatagccggcactaattactctgatctgaagggcgacattaggctatctaacgccaagaccaagatcatttataagctgctccacgaattaaaggtccaaaaatccgatgacgttctcgtgtttaaaaagtgtttctcgtctgagatgcctgtgcccaaatataaaaagaacgtgggcaaattcatcctgaatttctgcaccaatcaaatcaataacaagttagtcgggtacaagagttacatcatcagcattttgaaatacgatacagagaaggattgtctgagtgtggagtctaagtctaagtaccttaacctgctcgggaaattagacgtggttattaagaagagaatgaaatga

SEQ ID NO: 12237 - RNA, 1173 nt, synthetic construct
  source 1..1173: mol_type = other RNA
atgaaaaaatattctctgagtcccgtgatcctagatctgctcaaggaataccctaattatgaagaggataaaggtgtgattccactgacatctagccatgtcagagaatttaagatcggaaagaagttcgcatatagcaccaatacagccattaataaaacgcactcccacttgagcaaagtcatattctcccagtatatttcgaagatccctgtcaaccagtccgcaactgcttaccttgaaggcaaaagttactatgacttcatcgaaccacataggcataactactttttcctcaggctggatttgaaatctttctttcactccatcaggagcaacattgtgtcagagaatttcctggagtattttagcgacaaaaagatttcagagaactgcgagcaaacgcattcagaagcgattttcaaccttatcatgtacaagattgacaacaagagtaagaataacacctttaaaggcgagctgattcttcctatggggtttcctctgtctccctcaatctccaatattatctttcggaagacagatctcttgatagaaaaactgtgcgatgagaatagtatcacttataccagatatgctgatgacatgttattttccagccgcgggcagatcattcccccgagtattttcccactaatcgacaagaacaaaaaaaaggagacaacttacaagaacccgtttgtgcactctaagagattcttcgacgaaataagctacctggtgaaactggatgggttcaagatcaacaagaaaaagacaaagaagtcagtacacaccatctcattaaatggatataccattaccggctccaattttcccgacataaagggagagatacgaattagtaacctgaagaccaagataatctctaagttaattcacgagctcaacaacaaaactgatgacgttatcgccttcaataagtgtttcaaaaaggaaaatcccatcccaaaatacaagaaaggtagcgaaaacttcattagcgagttttgcaagaaccagatcaataacaaattggtgggctacaattcctacataatctctatcatcaagtacgacaaggagaaaaattgtctttctcgggactcccgcgagaaatacgccaatctcgttaaggatctgaacaagctcatttcgaaacgtctgaaatga

SEQ ID NO: 12238 - RNA, 1173 nt, synthetic construct
  source 1..1173: mol_type = other RNA
atgaagaagtattccctctccccgattatcattgatctcctaaaggagtatgcttattataaggaggataaaggcgttttacctttgtcgagctcacacgtgcgtgaatttaagattgggaagaaatttgcctactctacctcaagcgcaatcaatagcgtgcattcccaagtgagcaagctgatatttaaccagtacattagcaagataccagttaaccaaagcgccaccgcatatttgtccggcaaatcctactatgacttcatcgagccacatagaaacaattacttttttctgcgcctggacctgaagaacttcttccactctatctcaaaggatataatcgagcggaactttctggaatactttagcaatgatcccatttctgataagtgtgagcagactcacgctcaggcaatctataacttaatcatgtacaagctggacagtaaatccgacaatagcacattcaaaggctgtgagattttacctatgggatttcccttgtctccctcaatttctaatctcgtattccggaagatagacctgctgatcgaaaagttttgcgacgagaagggaatagtatacactagatatgcggatgacatgctattctcttccaggggaaaaatcgtgcctccaccaatcttcgctttcttcggtaaagacaccaaaaagaggaaatcctacgatccgccctttctgcacagtaaagccttctatgaagagattagttatctccttcagctcgacgggtacaaaataaacaagaacaaggtgaagaagagcgtccatacgattagtatcaatggatacacaatcactgggagtaattatagtgacatcaagggtgacatccgaatttcaaacatcaagaccaaaacaatcacaaaacttatccacgaactgaaagtcaacaaagacgatatcctggtttttaagaagtgcttcaaaaaggagtttcccacgcctaaatacaaaaagggcgccaatgatttcattagcgacttctgtacaaaccagattaataacaagctggtcgggtacaagtcctacattatcagtattgtgaaattcgatggcgataaagactgcctttctaccgcctcaaggtctaaatacaccaaattgcttgaacagctggataattcgataactaagcgcctcaagtga

SEQ ID NO: 12239 - RNA, 1182 nt, synthetic construct
  source 1..1182: mol_type = other RNA
atgaagaaaattctgctccatcccagcgtggtggagctgctgaagaattttagcaactacacagatagcaaaggcattctgccactcttaagttctcacgtcaaagagttcaaaataggaaaaaggttcgtctatactctcagtgagaagatatctccttcctacaaacatatcataagagccattcacacgcaaaatctggcgaaaattcctgttaatcagtccgcaacagcttatcttaagggcaaatcctactttgattttatagaaccacaccgtaacaactacttcttcattaagcttgacttgaagaatttcttccattccatatctgaagacgtgatcaaatccaatttcctcgaatatttctctgacgagataatctttcccaattcaacccagacccacgctgaggccatttacaatctcatcaagattgacctgtctgaaaaatcatcgaacaagaggttcatcaaaaaatccattttgccagttggttttccgctgagcccaatcattagcaatatcgtgtttcgaaagattgatcttctaatagagaagttctgtgacgagaaaaacattgtatatacacggtatgccgatgatatgctgttttcctccaaggggaaaatagaatataatcccttctcaaccaagaacaacaagtacttaaatccgtacctgcactcaaaaaatttctacgacgagatctctttcatcctgagtatcaacaactacaagatcaacaagaacaagattaagaagtcggtgcataccatgagtctcagcgggtataccattacaggctccaactatagcgacattaaagggttcattagtatcagcaacaagaaaactaagatcatcagcaagcttatccatgagcttaaaatcgaaaatactgatgaagaccgcgatagagatagagatatcctgaagaaatgcttttctatgatacctcctaaacccaagtatcgcaaaaagaccgacgaatttatcaaaaagttctgcgagaacatgattaacaataaattgctgggataccggtcatttctaattagtatcctgaagtacgacaagaatcacgactgtatcaacattgagaacaatgagaagtacaacaagttgctgaacgaaatcaatatcatcatcaggaagcggctctcattaaatgatttttga

SEQ ID NO: 12240 - RNA, 1197 nt, synthetic construct
  source 1..1197: mol_type = other RNA
atggaagagatagaaatgaaaaagatcacgctatcaaagacagtgtttgatatcctcgacgattactcattttttgataaggccaaaggcctaactccactgtcctttgaaaacgtcaatgagtttaagattgggaaaaagttcacttacacccccgaaagcaacctgaaacctttacaccaaaaattgagcaggttcatcttgaacaattacctgtctcatatcccacttaatcagagcagtgtggcgtatcagacgaaaaaatcatacttcgatttcatcgagccccatcgcaataattactttttcatccggattgatctgaagaacttcttccatagtatttcccctgccatcattaaatctaatttcctgaaccacttcagtgatgacccaatctctgagtcctgcccccaatctcacgctaagctcgtttacaacctgataacattaaagctcgacgagaactctaaaaataagaccttcatgaacgaggaaatcttgccaatggggtttcctctttctcccgtggtgtcaaatataattttccggaagatcgacatactcattgagaagttctgcgacattcaccacattaaatatacccgatacgctgatgacatgcttttttccagcaagggatcacttcttccgaaacctatcttcgagccgatcgtaatgggtctgaaagccgtgacaaaatcgtacaagccccactttattcacagcgaaaggttcttggaagagatctccatattactgaacctggatggttttaagctgaacagaaagaagaccactaaagcagtcaacaccctaagcctcaacggatatactatcagtgggtcgaattttcctgacatcaatggcaccataaggatcagcaataagaagacaaaactgatttcccagctgattcatgagttgaattcagaagaacccaagacagacgttgagattttcaagctgtgctttcgccatgagtttcctaaaccaaagtataagaagaatgcaggacagtttatcgaaaccttctgtataaaccagattaacaacaagctcatcggctatgtctcttacctgaaaagcatcatttattatcacgacgaccataattgtctgtccaatgagagcatcaacaagtacagtaagattataaacgagctcagtacgatcatttccaaaagagtgaaatga

SEQ ID NO: 12241 - RNA, 1152 nt, synthetic construct
  source 1..1152: mol_type = other RNA
atgaaaaagtattcacttacaccagccatgttggaggtgtgtaaagaatataacttcttctcagatgtgtctggatttatgcctctgacttccgagaatatcaaggaaatcaagattggtaagaagttcgcctatagtcaccaggataataataaacccacccatcagaagcttagcaagatcatcttcgagaattttctctcaaacattccgttgaaccaatctgctattgcatacgtgaaaaagaaatcctacttcgactttattgagcctcacaggaataactatttcttcttgagaatagacctcaaagacttttttcattccatttccgaggatctactgaaacgcaccctgtccgattacttttcatctgagagtctgagcgaaacaattaaacagtccaacatcgatgctatctttacctttctgacagtcaacttaaaatctgacagctctaacgtgaaattcctggacaaaaaaatactgcccataggctttcctctcagccctaatctggccaatatagtttttaggaagacagatcttctcctagagaaattgtgcgatatgcatggggtaacatacactcgatacgcggatgatatgttgtttagctcccgtggaattatggagaagaacctgctcttcagaaagaataacaactacaaaaagccctacattcacagcgacaatttcttatcggagatcaaatatctggtgagtattgacggatttttcatcaaccacaacaagactatcaaatctgtcaacactctcagtctgaatgggtacaccataagcggtacgaattttccagatatagaaggcaagataaggcttagtaacaaaaagaccaagattatcgagaaggtgattcacgaaattaatattaaccccgacgacaaagtcactttcgaaaagtgttttaagaaggagttcccaaagcccaaatatgagaaaaatcgcgacaacttcatcaacaacctctgcaccatcaaaatcaatcagaagctgcttggctatcggtcctacttaatctcgatcatcaagttcaataacaagttcaattgcatctctgaaagctcagaagacaaatacaacacgctgctgagcaagatcgaaaatgttattaagaagcggatcaagtga

SEQ ID NO: 12242 - RNA, 933 nt, synthetic construct
  source 1..933: mol_type = other RNA
atgtctgccgtagcctatatcgagggcaagtcctacctcaatttcatcgaacctcacagaaataacttcttttttctgcggctcgacataaagaatttctttccaagtatcacagaggctctcgtcaaagagtgcttccgtgattatttcagcgaagagcccataaatgatgtgattaaacagagccatctggatgccttcgtgaacttcgtaacgttgaatatcactaactcttctgtgaatgacacctttaaaaattccagtattctgcctatggggtttccactgtctcccataattagcaacattatcttcaggaagatcgacattataatcgagcggctgtgcgttcagtcctacattacctatacacgctatgctgatgatttgctgtttagcagccgcggaaaggttgacatgtcactggcgtcgttcatgaaaatcaactcaacctacaccgcttttattcacacagagcgattctgtgactccattagaaaaatcctagcagtcgatggatacaagatcaacaagacaaagactattcaagccaaaagcattgtgtctcttaatggttataccatcattggttcaaactattccgacgttagaggggaaatccgggtgtccaataagaagactaagaaaatcgagaagcttttacatgagcttaagaagaagatttccgaccaggctgtctatctgaaatgttatagtaaccagatcccggtgcccaaatacagttcaaagaaagaagtgtttctcaacgccttctacaagaaccagatagacaacaaactgtctggctacagggcatacttaataagcatgatcaaatttgacggcgaatacgattgctttgatagccacgcactccagaagtacaaaaatttgatcagtcaactagacctggccctgtcaaagaggaaatga

SEQ ID NO: 12243 - RNA, 1182 nt, synthetic construct
  source 1..1182: mol_type = other RNA
atgaacaagaataaattcaacaacgacttcctgaaaagaatcgtcgtggactacaagaattacaatgagagccacaaagttcccagtatagaacccgatatggtcgtggagttcaaattgggtaagaaatatgtgtacaagcttaacgaagcgcactctgattacgaagggatttccaagtgccaaaacaagctgatcactgagtttttgtccaatataccaatctccacagttgccaaagcctatgtttctggcaagtcctatctggactttctcgagccacaccggaataattattatttcgtacgaatggacctgaaaaacttctttcattcaatctcttccgaactgatccggaactcttttgacttatacttcgaaaatgagttcactaacgaggacaaaaagcagaccctcatggacgcatttattaatatcgctacctacaaactcgatcaggagtcaaaaaacgtggccttctctgggaagaggattctgcctatgggctttaagagctccccgatcatttcaaacattatctttcgcaagatcgatattctgatagaggatttctgttcgaaccataatatcacctatacacgatacgctgatgatctgctattttcctcaaaaacgaatagtgacccttacggtagtgtatttttgaagcggtttaattccaagccaaggaccggatttatccactctaacagatttttggatgaaatctcatacctagtgcgcatagacgggttcaaaatcaacgctagtaagaccataaaagccatcaatactctgagtctcaacggatataccatcgaaggctccaactattctgatctgcagggaacaattcgcattagcaataagaagacacagataatcagtaagcttattttcgaggtcaagaaaggcagctctaatttcaacgtgatgaagaagattttcgatttcaaagtgtcgaataagtacttcaactatatcccccccaaagaagaacatattgaaaggtactgtagggaccaaattataaataaagtcagcggctatcgtagctaccttatcagcatcttaaaatatgagtcagagtacaaatgcatcgacgaaaagagcattaacaagtacaacaagctcattaaggagctggagtggattcttactaagcctgagtttgcaagctga

SEQ ID NO: 12244 - RNA, 1104 nt, synthetic construct
  source 1..1104: mol_type = other RNA
atggacaaaatcgataaagataccttctttagcgaattgctcgttggagactatagtacgctaataaatcagggcgtaccccagacagatttcggtgacgtcacagagattcagtctggaaagaagtttttctacaaactgaaagaggactcagatctgaacaagtgtctcaaagtcctgaccactaggtttttgaacaagatcccgattaataatagcgccaaagcattcagatcaaatcagtcttacctgaactttattgagcctcacagaaaaaactaccattttattcgcatcgacatcaagaatttctttcactccatctcagaagatattctgaaggattgcttttcctcgtattttgagaaacaaatcgtgaataccaagtcccgatccctgcttgtggacagcttcattaatttagtgaccttacggctcagtgagaactccaaaaatgaggtgttctctaacaagatcatacttcccatcggctacaaaacgagtcctatcattagcaacataatcttccgtaagttcgacattctgattcagtctttgtgtagcatgcataatatcgagtatacacggtacgctgacgaccttctttttagctctcccaaacactccaacacaattcactctactttcttctacaacgagatctcgtttatcctgagtctggggaggttcaaaatcaaccagaagaaactcttgagcgctaaaaagattctcagcattaagggttacactattgatggcaccgaagatgaaaaacggttggggactatccgaatttccaacaagaagatcaagatcatagagaagttactctatgaattcgacaaagggtcatccaatatcaagatcctaaggaaggtcttcaaaataaacgtggaaaagaagaagttcaagtataagccaaaaccagagtttatagataagtacgcgaaggatcaggttcataacaaaaccctgggatatagaagttacctgatctcactcataaagtttaatcaagactacaagtgcatcgatgacaaatctattctgaagtatctgaagctggtgaaacgccttgaaaagctggccctagaaattaaatga

SEQ ID NO: 12245 - RNA, 1233 nt, synthetic construct
  source 1..1233: mol_type = other RNA
atgaagattatcgagaaaaaggactttgtgaatcaggtgctgcaaggatatgatgggtattcaaatgagatgggagtgaagaccttgactcccaacgagattgttgagtttaagatcggctcaaagttcggctacaggtgtagcaacaacgatcttgccaagtccctggaaaacacccaactgcgcgctctctcccgggtcgtgaatacattggaaatcagcaaatgtgcgacagcttttgtcacgggatctagctatctggattttctcgaaccccatcgttattcataccatttcattcggttggacattaaagacttctttcactctatctcctcctctgtcatctcagaatcttttagtaagcacttcaaggacactaatatcactagcggcgagactaaacagacactgctcaagtctttcctaaaccttgttacatatacgatcccacctgattccacgaataagaaattcgcaggcaaaactattcttcctatagggttccggacttcccccgccattagcaatatagtgttccgcaggctggattgcttaatagaggacttctgctaccgaaataatgtaacttacaccagatacgccgatgacatgctgttttcgagcaagataaatacaaagttcaagtccatcttgcagaagaaagatgtcctcccacctattccgattacccataaagagcacaaaaccagattagctaaaatcaaaagagaggaggcactgaaacacgggtgttttctgcacagcgacaagtttacaaacgagatctctagtattatccggataatcaacctgaaactgaacatcaaaaagacaatcaagtccaatcagactattagtctaaatggctacaccatcgatggtgtagatagctatctgtctgctggtacaattcgagtgtcaaataagaagcttaacgtgataagcaagatcattcacagtctcaacaaaaacatgtctgccattgaaatcatggaaaggtacttcaagatgaacaaagcccatgaatgctttaagtaccctcccaaatatgactactacaacaccttttgcattcagaagcttttcaataagatcaccgggtatcgctcgtacctggtttcattgatcaaatatgacgaggagtataactgtattaccccaagtagtttaaagaagtacaaatccctcatagcagaactcgacaaaaccttcaccaaaatcaagctgtga

SEQ ID NO: 12246 - RNA, 1143 nt, synthetic construct
  source 1..1143: mol_type = other RNA
atggtcagcgaaaagaaaatagggaataaattcgcgtactccctcaaagtgaacggtgatgaaggccagaatatactggctatacacaacaaactgaatcagctgttcctgaataatatcgagattaatcgttgtgccaaagcattcataaagggaagatcctacttagattttatcgagcctcatagagagaactttcatttcataaggctggatatcaagaagtttttccactccattggaatcgatcttctgaccgaggcctttgaaaattacttcaagaaggactacctcatcaataatgagaacaaacagtctctgttgaacgcctttattaagctcgtaacctatacaatccccgacgactcacctaacatcgaattacgaggggtgaccgttttgccaattggcttcaaactgagtcccgtgatatctaacattgttttccggaagttcgaccttctgattgaagactactgttatcacaacaacataacatacagcagatacgccgatgacatgatcttttctatgaagatctctaacaagttcaagaactttaagaggatcaaattcccatccctcctgatcaatgccgaagacgatagggagaggaaactggaaattctcagctttattcacagcgacaaatttatcgatgacatctccgatattctcagtattggacagcacaaatttcacttgaaccccaaaaagacaatccggagtcatcatactattagtctgaatggctatgtcattgagggttgcgaagaccatttctcgacaggctccatccggctgagtaataagaagactcactttatctccaaggtgattcacgctatcacgaagaaaaagctgtctccggagagcattttcaagactatcttgaaggagtcaatcgataagtctaatattccatacacccctgctacccctgcattcaaaaaacagtattatcgctcacagcttatcaacaaacttgctgggtatcgaagctatattatctcatttctcgtgtacgattcaaagcaccattgcattgaggacaagtacattcgcaaatatttagagatgatcaacgcaatcgaaaagagcataaacaaactagagaaacaacgcctacaacagcccaagtga

SEQ ID NO: 12247 - RNA, 1119 nt, synthetic construct
  source 1..1119: mol_type = other RNA
atgaaatacaagaaactcacagtgaaatccttcgtgagtatgctgtctgatgaagcctccgatcagttggaattacttaaacagcccattgaaccctacaaatttagcgatgtcaaacagagaaagctggggaagaagacaatattcaaactcacgcctgcaaagtctcagtaccttgaccggctgaataacaaactgttctctcatatccgcattaacaattccgccatcgcctatgtcgaaaaaaaatcatacctggacatgtttgagccacacagaaagaacatcaattttctgcgcctcgacattaagtccttctttcatagcattaatcgtaaaaccttggaggagactcttagcccttatgtgacagacgaaaactttttcgaggtcgggtctgtgaaacagagtctaatagatgccctcttaaatctcgtttctctgagggtatccgtggagtataatgacgagtcactgcacaataaagacattttgccgatcggcttcaaatcctcacccgtgattagcaacattgttttccggaaatttgatatcatcatccaagagttgtgcgctaagaatgacattatttatacccggtatgcagacgatatgctgttcagttcaccagtccattccaagtatatccacagcgataaattcttaaacgagatcagttacatcctgtcattcggcggatttcgactgaatcagagcaagaccatcaaggacaagcgtatgatttctataaacggttatgtggtagaggctggagagaatggagattcggggacgatccgcataagcgaaaagaagactaggaagatctacaagcttatctatatgatggagaataacatccctccaaagactattatgaaccgcatatttaaggttagggatcgggacatcgtgtaccgatacaagaaaggtaaggcgaagtttaaagaaaccttctacaaaacacagaccttgaatagactgactggctatagagcgtacataattagcctactgaaatacaacaacaagtacaactgcattaaggaaaggcaggtcaacgagtaccaaaagatgattatcaagctcgaaaagcaaatctataggctgaacctctga

SEQ ID NO: 12248 - RNA, 1146 nt, synthetic construct
  source 1..1146: mol_type = other RNA
atgtgtcgcggccgctctagagatataatgaagtacaagaagctcacaactaaagcttttataagcatcctgagcgacgagacaagcgatcaacttgaactcctgaagaagccaattgaaccgcacggcattagtgatgtgaaacagggaaaattgggaactaagtccattttcaaacttactcccgccaaatcccagtatctgggtcgactcaataataagttcttctgccacattcaggtcaataattcagcagtcgcttatgttgaaaagaaatcctacctggacatgtttgagcctcatcgaaagaataccaatttccttcgtatcgacataaagagcttttttcatagcatcaacagggagatactagctgaagccctgtcgccttacgtaacaaatgaaatctttttcgagtctgggaaagtcaagcagtccttgctcgatgcgctgcttaacttagtatctctgagggtgagtacggagtataatgaccaaagcctgcacaataaagacattttgccaattggcttcaaaagcagtcccgtgatctccaacatcgtgtttcggagattcgatatcattatccaagagctgtgtgccaggtcagacataatatacaccagatatgcagacgatatgctgttttctagtcccgaacacagcaagtacctacataccaacaaatttctgtctgagatttcatacacactgtcattgtccgggttcaagttgaaccaggcaaagacgatcaaggacaagaacatgatttctgttaatgggtatgtgattgagtcaggcgagaatgggaacagtggatctatccggatttccgagaagaaaactaagaagatatacaagctcatctacatgatggaaaacaacattccacctcggaccatcattaacaggatttttaaaatccgcgatagagatatcatctattcctacgacaaaggaaaacgtaagttcaaggacaaattctacaagacccagacactcaacaaattaactggttatcgggcctacatcatttcgttactgatttacaacgagaaataccactgcatcaaagaagagtatatcaacgagtataagacccttatcggcaaactcgaagtgcagatctataagctggttaagtga

SEQ ID NO: 12249 - RNA, 1131 nt, synthetic construct
  source 1..1131: mol_type = other RNA
atgaaatataagaaactgacgaccaaaactttcattagtatcctgtccgacgaagccaacgaccagctggaactattaaagaatcccatcaaaccctacaaatttagtgatgtcaagcagggcaagttgggaaacaagtccatctttaagttgccaccggctaagtcccagtaccttgaccgcctaaatgtgagttttttctcccatatccaaataaacaactcagcagttgcatatgtgggcaagaagtcttatctggacatgtttgagcctcacagaaaaaatactaactttctgcgtgtggatatcaagtcattcttccacagcattaataggaagactttgaaaaaagccctgagcccttacgtaagcgatgagaactttttcgaaaaggataaggttaaacagagcctgttagatgccctgttgaatctggtgtcattgcggataagcaaagagtataatgagaaatcccttcataacaaagacatactccccatagggtttaagagttccccagtgatttcgaacatcgtgttccggcggcttgatattctcattcaagaattctgtgctaagaatgacatctcatacaccaggtatgcggatgacatgctgttttccagcccaacccactctaaatacattcacaccaataagttcctgactgaaatctcttatatcctctctttatcagggttcaaaatcaaccagtctaagacaataaaggacaagaatatgatcagtgtcaacggctatgtcattgagagcggaaagaatggcaacagcggttcgatccgcatttctgagaaaaagacgaaaaagatctacaaactgctgtacatgatggagaataatattcctcaccgaaccataatgaatcgaatttttaacctgagggatcgcgacatcatttacaatcatgagaaaggtaagggcaagttcaaggataagttctacaaaacacaaacactcaacagactcaccggatatagagcctacatcatctccctcctcaagtacaacgaaaaataccattgcattaaggacgagcacattgaagaatacaaggacattatcaaagggcttgagaaccagatatataagatcacatatcagcccacaaaatga

SEQ ID NO: 12250 - RNA, 1116 nt, synthetic construct
  source 1..1116: mol_type = other RNA
atgaaatacaagaagctgactaccaaagcttttctatcctttctctccgacgaccctaatgacagattggaactccttaagacaccaattgcaccgtataatttctctgatgtgaagcagggtaagttggggaataagtctatcttcaagctgagtcccgccaaaagccactatctcgaaaggttaaatcggaacttcttgtccaagatcaagattaacaatgccgctattgcatacgttgagcaaaagagttatttggatatgttcgagcctcatcgggagaacactaactttctgaggctggacattaaatccttctttcacagcatatctagggagactctggctaaaacctttgaaagttatattagcgacgaagtgttctttgaagtgggcaagacacggcagtctctgctcgatgccttccttaacatcatttgtctgaaagtcaccacggatttcaatgatctgtccctgcatgacaaagagatccttcctattggttttaaaagctcaccagtcatatccaatatcgtgtttaggagattcgacatcatgattcaagaattttgcgctcgacatgatataaactatactagatacgcggacgacatgctgttttcttcacccaataagtctcagtatctccacaccaaaaagtttttcagcgaaattagctacatcctatcattaggagggttcaatattaatcaggcaaagacgatcaaagataagaacatgatctcaatcaacggatacgttatcgagaattatagtgatggcgtgcccggaagcatcagagtatccgagaaaaagacaaagaagatatacaagctcctgtacatgatagaaaacaacgtcagctacaagatcataatgaatcgtatcttcaacgtgcgtgatcgagatatcgtatataactatgagaagggcaagcgcaaattcaaagacaagtactataagacccagacactgaaccgcttagccgggtaccgcgcctatatgatctcgattctgaaatacaacgacagatacaattgcctgccaaaaagtaaatcagacgagtacttcaagattatcaaccggcttgagaaacagatcctcattattaaatga

SEQ ID NO: 12251 - RNA, 1143 nt, synthetic construct
  source 1..1143: mol_type = other RNA
atgtgtcggggtagaaatcggtacatcatgaaatatcggaagcttacaacaaagaccttcctgagcattctctcagatgagattatagaccagttggaattatccaggaaccctattcaaccctatacagtgaaagatgtcaagcatgggaaaatcgggactaagtctatatttaagttggcacctgctaagagtcaatacttagagcgtctgaaccagaagttcttcagcaatatagaggttaacaattccgccgtagcttatgtgggaaaaaaatcctaccttgacatgtttgagcctcatcgaaataatgcgaattttcttcgcctggacattaaaagcttcttccactccatcaacagggaggcactgaaaaaaaccttttctgcctacatatcagatgaagtgttttgcgaagatggcaaaagcaagcagcccctgatcgatgcttttttgaacctcatcagcctgaatgtgacaaaagactacaatgacccccagctcgttaacaaaagcattttgccgatcggctttaaatcaagtccagtcatctctaacattatcttcagaagatttgacatcctgatccaggagctatgtagtcgctcaggaatctcttacacgcgctatgccgatgacatgctgttctcttcaccaagtgaacatacatacctccacaccaacaagttcttcaacgagatttcctatattctgtccctgggcgagttcaaaattaacacttccaagaccataaaggacaagaacatgatttcgatcaatgggtatgtcatcgaaagtaaaggcgatggacgtaacggcaccattagaatttcggagaagaaaaccaagaagatttacaagctaatctacatgatggaaaagggagtcccacacaaggtcataatgaatagggtgtttcgcgtgcaggacagggatatcgtgtacaactttaagaaagggaaggaggagttcaagaagaaattttacaaaacccagactcgaaatcggcttacgggttacagggcatacatcatcagcattctcaagttcaatgacaagtatcagtgcatagaagccaagtatgtgagcgaatatcaaactattgtagagtctctggaaaagcagatctataaagttatctga

SEQ ID NO: 12252 - RNA, 1119 nt, synthetic construct
  source 1..1119: mol_type = other RNA
atgaaaaatcgcaagttgacaaccaatacattcttgtccatactctgtgacgatcctttagagataaacgagctactgaaaaagcccattccggcctataccaagcaggacatatctgagacaaaggtgggcactaaaaccatatttaagcttactccagccaaggcccattaccaaaaaagactcaacgatcggtttttctccaggatacctctgaaccagtcaagtgtggcttacactaaacggaagagctacctggacatgttcgaaccccatcggaaatcatataggtttcttcgtctggatatcaaatccttcttccattcaatctcccgcgacctactgaaggacaccttgagctctcacgtgtctgaggacctgtttttcagcagcaattatgccaaacagactcttattgacgcccttttgaatattttaacgattaacctcggtgatacctacaaagataaagatctcacgaatagagacatcctcccaattggatttcccagctcacctgtcgtatcaaatatagttttccgtaagttcgactttctgatccagaagctgtgctccgaaaataacattatctataccaggtatgcagatgatatgctcttcagtagcacagcagatagtaagttcatccactctgaacacttcatccgagaggtgtcttacattctgagtttgggcgggtttaagctgaacggtgacaagaccattaaggagaaaaacatgatctcgatcaacgggtatgtcatcgaaagtaacggaaaggataaaaactccggacacattcgcctcagcaataaaaaaactgctatgatctgcaagctgatcgataagctggacaagaatgtggcacacaaggatattttaaagaagatcacagggttgaaggagaaccatattaaagtgtcctttgacaagggcaggaatgagtttctggctcagtactacaaatctcaaattatcaacctactggcgggctatagagcctaccttatcagcatcatcaagttcaataaactctacggctgtgttgaagacaagtatctggacaaataccagaacatcattgacgatattcagaaacacctgtttcggctggtctga

SEQ ID NO: 12253 - RNA, 1089 nt, synthetic construct
  source 1..1089: mol_type = other RNA
atgataaagaggaagaaattgaccaccaacacctttctatccttgctgtctgatgaccacaaggatcgatttgagctgtcaactcagccgatcggcgacatcacatccaaaaacgttattgagttcaagatcggaagtaagacctgtttcaaattcaaaaatgccggtgtgctggaacagtaccaagaacgtataaatcggttgtttctgtcagagatcgaggtaagtcatagcgcctttgcttatgtaaaaaacaagtcctacctggagatgtttgaatctcataggaacggatactattttctcagagtggatatcaagagcttcttccacaatatttccagacagctcatagccgatagcctgtccggctacatcagcgacgaagactttatcaagaacaaacagaagctcatggatgcattcataaatattatcacccttaacgtgacgaaagaacaatcttctttcgtgggtagacagatcctgccaattggattcaagacttcacctgcagtttctaatataatcttccggcgatttgacaatttaatccagtccctgtgctccaaaaataacatagtttacaccaggtatgctgatgatatgttgtttagcagtcccctaggctttaagttccttcacactgagcgctttatgaacgaactgagctacatcctttcgctgggcggcttttctattaacaacaagaaaacgctcaaggacaaacatatgattaccctcaatgggtatgtgattgagtcgagcttaactagtgggaagatcgcatcaattcgcatttcaaacaaaaagacagacatcatttccaaactcattaataagctggagtataacgtcgacagcaagttaatcatgcggaaacttttcggactgacaaatgaaaaagtcaaaccccaattctctagtaagaagaacaagttcattgaccagtactatgagtcacagctgctgaacgcgattgctgggtatcgcgcctaccttatcagcatcgtgaaattcaatctcaagtacaattgcgtcgagcaaaaatacattttgaagtatcaggggatgatcgataagacatga

SEQ ID NO: 12254 - RNA, 1122 nt, synthetic construct
  source 1..1122: mol_type = other RNA
atgaagcgcaagaaaatcacagtgcgagctttcctgtcaatactgagtgatgatccgcatgatagggcggaattaagcctgcagcccatcaagtctattgaagcagatcgtgtaactgagtgtaagataggcagcaagactgttttcaaactcaaagatgctaagcttcttgagcagtaccaagaccgggtgaatcagagattcctttccaatattgaggtgtcaaacagcgctatagcctatgttaagaataagtcttacctagacctgtttgaaccacacatctacggttaccactttctgcgggtggacatcaaatcttacttccatagtatcagtagggagctcattaaaacctcctttagcacttacatcaatgatgaggatttcatcaaaggccaacagaaactcattgacgccttcacgaacatcctcaccttaaatgtcggggataaacccaagaataacgcactggcaggtaaagaaattctcccaattggctttaaaacctctcctgccgtgtctaacatcatttttcgcagatttgacaatctgattcagtcgttgtgtagtaagaaccatattacatatacccgctatgccgacgacatgctgttttcatcacccctcaagttcaaatttatccacactagaaagttcatggatgagctcagctatatcctaagcctgggcgggttcctgatcaacgacaagaaaaccgtgaaagaaaagcatatgatttccttgaacggctatgtaatagaatcaaatggggtcacaggacagcctgccaagatcagaatctccaaccgaaaaaccaatataatcgccaagctaatcaacaagttggaccacaatgttgactgcaagctgattatgtccaagctgttcaatttatccgagaaaagtatcaaggtcaaatacaaaaagggaagggatgactttatagaccagtattaccggacacagctgattaacgtgatatctggatatcgggcttacctgattagcatcattaagttcaactgcaaatacaactgcattgataagaatcacttgagcaagtatcaactcatgatcaacaaacttgagaagcacttgcttaggctgtccaactggtga

SEQ ID NO: 12255 - RNA, 1122 nt, synthetic construct
  source 1..1122: mol_type = other RNA
atgaaaaacaaacggattctgattgataaggtgttctatgaacgatttctcagtgtcgattcttttaaggagaacctgatcagccaaattcctatccccaagatcacaaataaagaagtcaggttgatttcttcaggggctaaaacgttttatgctattaacaacacctcaccccactcgcatgtacaataccggctgaatagatatttcttctcccacattcctattaactctgccgccaaagcctttgtgaaaggtgggtcctatctcaaatatctggagccccacatttatggatcaagtttttgtaggctggacatcagcagcttcttcaataatatcagtttcaacgacgtggagatgtgcctgtctccctacataaaagacgaataccttatcggaaatgaacagaagttgctgagcgcaatactgaatagtatcgggtatgaaatccctattcacaagaagcataccttgattgtcccaatgggatttaagacatccccaatcataagcaacattgtttttcgcaagatggacctgcttatacagaacttttgcgcgaagaaaggcataatctactctcgttacgctgatgacatgttattctccaatccaaaggagtctaagttacttatcagcgattacttcttcgatgagatatcaagtctgctgtccattatgggcttcaagatcaatgaatcaaagtacatagcaagagagaaagagatttctatcaatggctatgtgatcgaaaacaaaggcggttacggggctgttggtactatccggctctcgaagtcaaaactcaagactatactcaaggtgatccacggcctaaatgaaaacatgccgcataaatccatctgcaacaagtacattgacatcagactcagcgagtccgacttcaagtacgaaaacaaaaaggccgagtttgagaaaaagtattacagggaccagttaatcaactatctgtccggatatcgcgcatacatcctaagcctcattaaattcaacattgagtaccgctgtgtgaataatcactttttgagccagatctccgccatgcttgatgatattcagaagcatatcatcaaggagaaaaataagcgactgcggtga

SEQ ID NO: 12256 - RNA, 1134 nt, synthetic construct
  source 1..1134: mol_type = other RNA
atgaaaaaacaggccatccttattgacaagtcgttctatgagaaatttctgtctgtggaaagcttcaaggaaaatatcactttgcagacggcaattcccaagattacaagtaaagaagttcgcttgatttcatcgggtgccaagacattctatgccatcaacaaggcatccccacatagccatgtgcagcatcgcatcaatcaatattttctgtcccacatccctctgaactcttcagccaaggcttttattaaaggcggcagctacctcaaatatttagaaccccacatctatggatcctccttttgtcgtctagatatatcatccttcttcaacaacatctcattctatgatgtcgaggaatgtctttctccctatatcaaagacgagtacctcatcgggagtgagcaaaagctcatagacgcgatcttaaactctatcggatacaactcacccatacagaataaaatcatcgtgccaatgggctttaagactagcccgattataagcaatattgtcttccgaaagatggacatattgatacaaaacttctgcgcaaagaaaggaattctttactctcggtacgctgacgatatgctgtttagcaatcctaaggaatccaaaatccttctgtccgattactttttcgatgagatcgcctctctgttgagtattatgggcttcaagataaacgagtccaagtatatatccagaaaaaacgagatcagcattaatgggtacgtgattgagaataaggggggatatggtaaaattgggagcattagactgagcaaatctaaaatcaacaccatcctgaaggtaattcacgccctgaagcaggacattccaaataagattatctgcaacaagtacatccagattaggctgaaagaaaccgatttcaaatacgaaaacaagaagctggagtttgagcagaaatattatcgggatcagctgattaattacctcagcggctacagggcttacctcatctcactcatgaagttcaatctgatctttaactgcatcaatcacgactttctaacccaagctaatatgatcctgagtgacatccagttatacctccacaaaattaagaacaagagaagtcctaggcatataaataacatttga

SEQ ID NO: 12257 - RNA, 1125 nt, synthetic construct
  source 1..1125: mol_type = other RNA
atgaaaaccaaaaagatgattctggtcgacaaggtgttctatgagaaaatcctctcagtggagtccttcaaagaaaacattatcacacaatcagcaatccctaagatctccaataaagaagtacgccttatcagctccggatccaaaatcttctacgcgattaataacactagtccacatagccatgtccagctgcgattgaataggttttttctctctcacataccactgaatagtgcagccaaagcctttgtacgaggagggtcttatcttaagtacctggaacctcacatttatggaagtagctactgtaggctggacatcagtagcttcttcaacaacatctctttcgatgatgttaaacagtcgttatctccctatatcaaggatgaatacctgataggcacagagcagaagttgattgacgccatcttgaattcagtcggctatgagagccccatccggaaagataagggaatgattattcctatgggctttcgcacgagccccgctatctcaaacatcgtgtttagaaaaatggacctactcatccaggatttctgtgcaaagaagggggtgatttattctcggtatgctgatgatatgctgttttctaatccaagagagagcaaactgttaatgagcgactactttatcgacgaaatcagctccctgctgagcatcatggggttcaacatcaaccaatcaaagtacattagtcgcgagaaggagatttccattaacgggtacgttatagaaaacaaaggcggtaatggttctatagggaccattcggctctccaaatcaaagctgaatactgtgctgaaagtcacccatgctttggcccagaacattccgtacaagaatatctgcaacaagtacattaaggtgagactgaaggagaagaacatcaaatacgaaagtaagaaggacgaatttgagaagaaatactatcgtgaccaattaatcaactacctcggtggctataggtcctaccttatttctctcgtgaaattccactcggagtataagtgcgttaattccgacttcattattcagataaacggcatccttaatgatatacagaaccacatacagaagataaagaataatcggaggctatga

SEQ ID NO: 12258 - RNA, 1113 nt, synthetic construct
  source 1..1113: mol_type = other RNA
atgaagcgaaatactttcgtgatagacaaggaatactacgaaaaatacctgtcagctgaaagcttcaaggagaactttatctcaattacacctatccccaagataacgaagaaagaggttaggctgattaaatccggctttaaaaccttctacagcctgcagagcaccagtccccacagtcatatccaaaatcggcttaacaactacttctttagcaaaattccgttaaactccgcggccaaggcctatgtgaaaggcgaaagctacctgtcttatctggagccacatatctatggaagctctttttgcagattggatattaagtccttcttcaacaacatctctttcactgatgtgaaaaaatcactttctccctatgtaaaggacgaattcctgattggaaaggaacagacagttcttgaagctattcttaacagcgtgggctatgatgacgagaagtatgacagaacactgatcccaatgggctttaagacttctcctgtcatttcgaacatcattttccgaaaaatggacatcctgattcaggacttttgtatcaagaaagggctaatctacagcagatatgccgatgacatgctgttctccaatttaagggatgggaatctgctactctccaattactttttcgatgagatttcaagtctgatctccatcatgggatttaagctgaatgagagcaagtatatcgcaaagaagcggatgatctcggtgaatggctatgtgctggagaataagggagggaggggtgtagtcggcaacattcgcctctcttctgagaaattgtccaccataaataaagtcatccacgccctcaattcaaaaattccgtacaagaccatatgtaaaaggtacctcgatattaagttgaaggacggtgattacaaatatgagtccaaacgggaagattttgaacgcaaatactaccgggaccaattaatcaattttatgaacgggtacagagcatacctcatcagtataataaagttcaactccgactataactgcatgtcaataaagtttatcgagagtgtgaacttgaccctcaatgagattcaggttcgcatccgtgagatcattaaaaagcgtatttga

SEQ ID NO: 12259 - RNA, 1116 nt, synthetic construct
  source 1..1116: mol_type = other RNA
atgaagaataacaacattctgatcgacaaagccttctatcaaaaattccttacttccgaaagctttaaagaaaacctgatctctggtatccctatcccagtgatctctaacaaagaagtaacctgcttttttagtggctacaaaaagattcatgtgattcgcgatacatcaccgcatagccacgtgcaatatcgactaaacaaatactttttcccccacatccccctcaatagcgccgcaaaagctttcgtcaaaggcggatcttatcttaaatttctggagcctcacataaatgggtcctccttttgcaggttggatatatgttctttcttcaattccatctcctttgagtatgtcgaggagtctctgtccccttacatcaaagacgagttcatcattgataataagcagaagctggtggaggctgtgttaaatagtataggctttaaagacgagaagattaacaaggaggaaatgatcattccaatgggattcagaacttcacccgccatcagtaacattatcttccgtaagatggatatacttatccagtcattctgcagcaagaaaaacattattttcagtaggtacgccgatgacatgctgttttctaccccaaaggagagcaaaattctgagctccgattactttttcaacgagattgcatcgttgctcagcataatgaatttcaagatcaacgacaagaagtacatcagtagagaaaaggaaatctccctgaatggctacgtcattgagaacaaaggtgggtatggagcttcagggtcgattagactatccaataagaagatgatggttatcacgaaagttatgtacgcgttgaataacaacattcccgcaaaaacaatatgtctgaagtaccttgacattaagctcaaagagaagaacatcaagttcgaaaacaagaaaagcgaatttgaaaagcggttttatcgggaccagttgttaaattacctcgggggataccgctcttatctgatatcaatcctcaagttcaatagctcatatggctgtataagggacaatttcacccatcacatcatctttattctgaatgatatccagctccacatggtgaagattaagaagaaaatctga

SEQ ID NO: 12260 - RNA, 1134 nt, synthetic construct
  source 1..1134: mol_type = other RNA
atgaaggaaaagatttctaagatcgacaagaacttctatatcgacatcttcataaagtccagttttcaaaaggagttcgaaacaggagatatcatcccgctgattgccaacaaagaagtctcgatcattaacgacaagaacaaaactttctactccttggctcactccagccctcattactctatccaaactaagatcgagaagttcctgttaaagaacattccactgaatgcatcttcatttgcctacaggaaggatctgtcctacctgcattatctggaaccacacattcagaatgtgaaatattgtcatctggacatagtgtccttctttaattccatcgatattaacctagtccgggataccttttctgtttatttttctgacgagtttctggttaaagacaaacagagcttacttgacgcatttattgccagcgtgacctttagcaccaaagtgggggatgtagagaaaactataatccccatggggtttaaaagctctcccagtatctccaacatcattttccgcaagatggatattcttattcagaaattctgcgacaagaataacatcacatatagtcgatacgcggatgatctgctcttcagcacgaaaaaagaaaataacattctgtcgtccaactttttcattaatgagataggctccatcttatcaatcaattcattcaagctcaacaagagtaaatacttgtacaaggaagagacaattagtctcgggggatacgtaatcgaaaacacactgaatgacggttcaaaaggtaatattaggctgagcagctcaaaacttaatatcctgcataaggccctccacgaaatcaacaagggctcatcagctaagcacatttgcaataaggtgttcaacctaaagataaaggagttcacctacaagaaaaataagaccgcctttgagaaaaagttctattcttctcagttggtcaataaactcttgggctatagatcctatcttctcagtttcgtgaaattccagaataagtacaaatgcatcaaccccgtttttctcgagaaatgttttcgtctgataaacgagatcgagaacataattaacaagaatagccacgcacagggaatgaatgctcctatgagcaactga

SEQ ID NO: 12261 - RNA, 1101 nt, synthetic construct
  source 1..1101: mol_type = other RNA
atgaaagagaaaatctctaagatcgacaagaatttctacaccgacatatttatcaagacatccttccaaaatgagtttgaagcaggtggggttattcctcctatcgccaaaaaccaggtgagcaccatctcaaataagaataagacattctactccctggcccattccagtccccactatagcatccagactcggattgaaaagttccttctgaaaaacatcccactcagtgcatctagttttgctttccgtaaagaaaggtcatatctccactatctggaacctcacacgcaaaacgtgaaatactgtcatttagatatcgtctcattctttcactccatcgatgtgaacatcgtacgagacacctttagtgtctacttttctgatgagtttctggtgaaagaaaagcagtccctcctggatgctttcatggcctctgttactctgactgcggagctggacggcgtggaaaaaacatttattcccatggggttcaagtctagtccgtcgataagcaatattatcttccgcaaaatcgacattttgattcagaagttctgcgataaaaacaagataacctacaccagatatgccgacgatctgctattttccacaaaaaaggagaacaatatcctatcgtctacgttcttcattaatgagatttccagcatactctcaatcaacaagtttaagctgaataagagcaagtacctttataaagaaggtactatctccttaggcggatatgttatcgaaaacatactgaaggacaacagtagcgggaacattagactgagctcttcaaaactcaaccccctttacaaagctttgtacgagattaaaaagggctcctcatccaagcatatatgtatcaaggtcttcaatttgaagctgaaacggttcatttacaagaagaacaaggagaaattcgaggacaaattttacagctctcagctgaaaaataagctgttaggatatcgcagctatctcctcagttttgtaattttccacaagaagtacaagtgcataaacccaatttttttggagaagtgcgtgtttcttatttcagagatcgagagcatcatgaataggaaattctga

SEQ ID NO: 12262 - RNA, 1113 nt, synthetic construct
  source 1..1113: mol_type = other RNA
atgaaacacaagatcacaaagatttccagtgacttctacaagaatttttacctgcgtgaaaccttctcagatgatgtcattatgcattgcggggttcccaatatcacaagcaacgactacaagtcgatatcattcaataacaggatgtttttcagcatcaagaataactcccctcataaaaagattcaggaacggttgatcaaaaattttcttcagaagattcccctgagttcacctgctatcgcatacagaaagaaactctcctatctgcactttctggagccacatgtacatggcgaaagcttttgtcgcatcgatctatgcaacttcttccacaatattaactacgactttgccaaagaatgttttcagtcatactttgaggacgagttcctcctggataagaaaatcaaggtgattgatgccttcctgaattccttatctatcgagatggaaatctccagtgggaaaaaaaagatcttccccatgggctttgccacttccccgtttattagcaacatcatattcaggaagttggacattcttataaagaacttctgcgataagaagagcattatctatactcggtatgccgacgatatgttgttttctggatcagggacggataaactgctgggtagtgagcacttcgataaagagatcgcttctattatatccatcgccggtctatccctcaacatgaacaagaaaatttacaagaggggaattatctcgctgaatgggtatgtgatcgaaaataacaacggcggaggcgaaagaggatctttacggataagcaatggcaaaacctatcttattagaaaagcgctcaagaaatacaagaatggtgacagtaaagagattatctgtaagaaggtgttcttggttaagaaaccatctatcaagtacaagaagaacatcgacctgttcgtcaataagttttacgactcacaatttagcaacaagctcgctggctatcgcagctactttatatctctcatcaaattcaacgacaagtatcgatgcttcaaagatgacgagatcgcaaaatatagcgcaattatagaggagataagttctgtgctgcttaaatcccagcacaaaattaaatga

SEQ ID NO: 12263 - RNA, 1098 nt, synthetic construct
  source 1..1098: mol_type = other RNA
atgaaacataagatcaacaagatcaacaacgatttctacaagaacttttaccttcgcgaaaccttttcagacgatattataatgactcatggagtgcctgaaatatccaatgacgactataagtccattagtctcaaaaataggctctgcttcacaatccggaaatcttcccctcataaaaagatccaggagcgcttaatcaaaaactttttggtcaaggttccccttagttccccagcaattgcttatcgcaaaaaactgaactacctgaactttctggagccacacatccacggagagaatttttgccggatagatttgtgtaacttcttccacaacattaactacaactttgccagagagtgttttaagagttatttcgaggacgaatacttggtgaataagaagattaaggtgattgacgcatttctaaattcactcagcatcgaaatcgtggtgaataacaagaagaagaagatctttccgatggggtttgctaccagccccttcatatctaatatcatcttccggaaactggacatactgattaaatctctgtgcgacaaaagaagcattatctatactcgatacgccgacgatatgctgttctcgtcaagtgggaaagataagttgcttggcagcgaacactttgataacgagatcagcacaattgtaaatacagccggcctgtcgctaaacaagcacaagaaaattttcaagaaggggatcataagcctgaatggatacgtcattgaaaataagaatggcggaggcgagcgaggttctattcgtatttccaatggtaagatgtatctgatcaggaaagccctcgacaaatttaaaaagggctacagcaaagagcacatttgcaagaaggttttttctgtaaagtcacccaccgttaagtataataacaatgcagatcagttcgtcacggatttctacaatagtcaattcagcaacaaactcgctgggtacagatcttatttaatctcactggtgaagttcaacgataaattcaggtgtttccatgagaatgaaatcaccaaatattccgtgatcatagacgagatctccaacgcgctccttaaaccttga

SEQ ID NO: 12264 - RNA, 1098 nt, synthetic construct
  source 1..1098: mol_type = other RNA
atgaagcataagattacgaagatcaactcggacttttataaaaacttctacttgcgggagacattcactgatgatatcattatgactcacggtgtccccaacataaccaatagcgaataccaaaacataagcttcaacaatcgtgtcttcttttcaatcaaacagagttcaccgcacaagaaaatccaggagcgcattatacggaatttcttacagaaagtccctttatcctcacctgcgatcgcctacaggaaaaaactttcatacctgcattttctggagccacacatctatggcgagaatttttgcagaatcgacttgtgtaactttttccacaacatcaactatgactacgcacgggaatgcttcaagtcttacttcgaggatgaatatcttgtcaataagaagatcaaggtggtagatgcctttcttaacagcctgagtgttgaagtggagctcaacgataagaagaaaagaattttcccaatggggttttcgaccagtcctttcatctccaatatcgtttttcgaaagctagatgtgctgattaagaacctgtgtgacaagaggagtatcatgtacaccagatacgccgatgacatgctctttagctctagtggcaaagacaatctcctggggagcgagcattttgacaaagagatcagctctattgtgaatatcgccggcctaaacctgaacgtgcacaaaaagatattcaagagggggatagtgagcttgaatggatacgtgatagaaaataaggacggaggcggtgagagaggatccttgcgcatttccaatggaaagacatatcttattcgcaaagcactcgacaaatacaagaaaggctatagcaagaagcatatttgccaaaaggttctgtccgtcaaacccccctctgtgaaatataagtccaatgctgatcagttcgtaatggaattttataactcccagttccataataagctggctggttatcgatcttacctgatttccctcgttaaattcaacgaaaagttcgggtgttttcacgagaaggagattacaaaatacagcgctatcatcgacgaaatttcatctgtgctcctgaaatcttga

SEQ ID NO: 12265 - RNA, 1098 nt, synthetic construct
  source 1..1098: mol_type = other RNA
atgaaacactccatcactaaaatcaattccgacttctacaagaacttttacctgagggaaacatttggggacgatattattatcacccgcggcgtcccaaatatcacaaatgacgactaccagaagattagttccaacaatcgaactttcttttccatcaagaattcttcacctcataagaagatccaggagcgcctgattaggaatttcttgcaaaaggtgcccttgagtagcccggccatcgcctatcgaaaaaaactcagctatcttcactttctagagccccatatttacggagaaaacttttgtcggatcgatctctgtaatttcttccacaacatcaactacaacttcacgagagattgttttaaatcgtacttcgaagacgagtatcttgtgaacaacaagattaagttgatcgatgcttttctcaactccctgagcattgagatagactttaacgacaagaaaaagaggatatttcctatggggtttcctaccagtccattcatcagcaatatcatcttccggaaactcgatattgttattaagaacctgtgcgataagcgtggaattacctacacaaggtatgctgatgatatgctgttctcttcttcaggcaaggataaactgctggggtcagagtacttcgacaatgaaatctccagtatcgtgaacatggcaggcttaagcctcaatactcacaagaagatcttcaaaaaaggcattgtctccctgaatggttatgttatcgagaacaaagacggtgggggcgaaagaggtaatcttagaataagcaactggaaaacctacctgataagaaaggcactggacaaatataagaagggatactctaaagagcatatatgcaagaaagtgttttccgtgaagaaaccctctgtacggtataagaaaaacgccgccgcgttcgtgcagagtttctactcatcgcagtttagcaataaacttgccggatatcgcagctatctgattagcttgattaagttcaatgacaagttcgagtgcttttcaaacgaagagatcgcaaagtactctgctataattgaggaaatatccgaagtcttactaaagtcttga

SEQ ID NO: 12266 - RNA, 1098 nt, synthetic construct
  source 1..1098: mol_type = other RNA
atgcgacaccagataaccaagatcaactcagacttctataaaaacttctacctccgggagacattttctgatgacataattatgaccgacggcgtgccaaacataaataaagacgactaccagcacatccttttcaaaaaccggatattcttttccatcaagattaatagtccccatcgcaagatccaggaacggctggtgcgcaatttcctccaaaaagttcctctgtctagtcctgccatagcatatagaaagaagctgtcctacctgcattttctcgagccccatatttatggggagaaattttgtcgtatcgatttgtgcaaattcttccacaatatcaactacgatttcgctaaagagtgttttaagtcctactttgaagatgagtatcttgttgacaagaagattaaagtcgtggatgcctttctgaattctgtgagcatcgaaatagatctcaacgggaagaagaaaaaaatattcccgatgggcttttccacttctccattcatttcaaacattatcttcaggaagctggacattctgatcaagactttctgcgataaaaggggcattatctacacccgctatgcagatgacatgctgtttagctcactggggaaagacaagttacttggaagcgagtattttgataaagaaatctcgtacatcgtcaatatggccggactgtctttgaatacgcacaaaaagatcttcaagaacagcatcatcagtctgaacggctatgtgattgaaaataaggacggttcaggcgaaaggggacgactgagactaagcaatcggaagacatatttgatcagaaaagcgttagacaagtataagaaaggtgaatccaaagagaacatctgtaagaaagtattcctcattaggacacccagcatcaagtacaaatccaatgcttctctatttgtctccaattactttaagagccagttcaataacaagctgagtgggtacagatcatacttgatcagccttatcaagttcaacgataagtttaactgctttgaggatgacgagattattaagtactcgaacattattgaggacatttcgaaagtgttactcaagccttga

SEQ ID NO: 12267 - RNA, 1098 nt, synthetic construct
  source 1..1098: mol_type = other RNA
atgaagcataagatcacgaagataaatagcgacttctacaagaacttctatctaagagagactttcagtgacgagatcgtcagcagtagaggtgtgcccaatatcactaatgacgactaccagagcatatcactgaacaaccgggtctttttttcaatcaagaaaaactctcctcacaaaaagattcaggatcggctcattaagaacttccttctgaaagttcccttaaatagttctgcaattgcctaccgcaaaaaattgtcatatctccatttcttggagccacacatctacggagaaaacttctgtaggatcgatttatgcaactttttccacaacatcaactacgattttacaagggagtgtttcaaatcgtattttgaagacgaatacctgatctccaagaagattaagctgatagatgcgttcctcaatagcctcagcatagaggtggagttgaacaataagaaaaagaggatctttccgatgggctttagcaccagccccttcataagtaatataatctttaggcggctcgacattcttatcaaaacattttgcgacaaacgttctatttcatatacacgttacgctgatgatatgttgtttagctcttctgggaaagataaaatccttggctccgaatatttcgacaaggaaatttcttccattgtctcgattgctggcctgagtctgaatacccgaaaaaagatcttcaagaagtccatcatttccctgaatggatatgtgattgagaataaaaacggggggggagaaagaggcaatctacgcatcagtaatcggaaaacctacctgatccgcaaagccctggacaaatataagaaggggtactctaaggaatatatttgcaagaaggtgtttagcgtgaagccacctgtaattaagtacagaaataatgccaccctgttcaaaaaggagttttataactcccagttttccaacaagtttgcaggttaccgatcctacctgatctctctgattaaattcaacaacaagttcggctgtttccaggataaagagatcactaagtattcagtgctgatcgaggaaatatcacaagttcttctcaaatcctga

SEQ ID NO: 12268 - RNA, 1131 nt, synthetic construct
  source 1..1131: mol_type = other RNA
atgttcaagaagctcaatagtaaggacttgcttaatattctcagcagcgactcccaaagcagactggtggttctgacacagtcatggccaatgttaaatgtggatgatgtgaagaccctgaagttcaacaacaaaaccttcttctctttagtttcccgagtggaacgggatggatacttgaaaaagctgaacttgagtttcctttccaagattaaaatcaacagcgcttctgtcgcatacaaaaacggaaaatcatacctggacttcttctctcctcatgtggagaattataatttcctgaggctcgacctaaagagctttttccactcaatctcctatgaaatcattaaggaaaccttcgagagttatttcctagacgaatattttgtcgacaatggaaaggagaagggaaaagagaaaatcatagacgtctttctgaacctggtaatgctgaatgtaccctccagttatggcgattcctttatctcgggtagacggatcctgccgatgggcttctctacatcccccctgattagcaatattgtgttcaggcgatttgacatcgtgatacacgagttttgcgaaaagcacaatattaagtactcaagatacgccgatgatatgttgttcagctcaaacatttcagacaagactctgtttagtaaccggtttcatgaagagattaaatacatcctgaaccgcggcgggtttaaactcaataacgctaaaacgattcagtcaaagggggttctaagcgtcaatggttacgtgatagacagctatttagagcgtaagggcctgagactcagttccagcaaactcaagaacattaacaaaatcatccacgcgttgaagaaagggtggagctatgagattatacttaagaagtatgccaagaaagactttgataagactaactactacaacaagggtatctctaagtataggagtgaatacgagaaatctcagatactcaatctgcttgtcggctaccggtcctacctcatttcttttcatgaattcgatcgcaaagacaggtccatcgataatgattttctggttgtgtctgggaaaatcatcaaatcgatagagaaagccatcaacaagatctataaggatcgcaaactttga

SEQ ID NO: 12269 - RNA, 1125 nt, synthetic construct
  source 1..1125: mol_type = other RNA
atgaaaagactgagtcgccctgagtttatcaacctgatagataatgacactttcattgagttcacagcagggaaaatttttaacattccatcctctggagttgtcgagtttcagctgtccaataagtttttctacaagttgcgaactgatattaagctctggtccttcttacgcgtaatccattctaaccttaacaagaacttcttgaagaagattagccttaatagttctgctatcgcttttagatcaggactgagctatattaactttttttccccacacatagagaattacttctttctgagactggacatcaaatccttctttcactcgattagtaagaatctgatcaacaacgtgttcagctcatatttcagggacgaatttatcgataagaattcccagattagcctcttagaatatttcatctttctgacaacgctatacatcgatgaaacttacaagaacaaccagtttaagtaccagtatatcctacccatggggttctctaccagcccgctcataagcaatatagtctttaggagtatcgacatccaaataagcaatatctgcctggagtatggtgtcacctacacacgatacgcagacgatatgttgttttctatgcctaaaaatgcgaatccccatatccaaaccgatgtgttctacgtgtctataaaatccatcttatccaaatacggcttcttcattaacaaacacaaagtgatttcgaagaagaacactatcagtatcaatggctatacacttcagaatacgccaaatatgtgtgaattccgggtgtcaaataagaagatcaagatcatccagaagattatctatgagtacaacaagaacaccgaaatatcagccattctgaagaagtgcttcaagtataacatcatcaaacggtttaccacccctgagaaagtgcccaataatctggttgaaaagtataacaagcaccagcttattaacaaaatcgccggctacagggccttcctgctctcattcatactctttaatcatcggtctaaactgatgagcattgagacaagcaacaaatatctcaacctgattaacgaattggagaaaattatgcgtaacatttacctcactttggactga

SEQ ID NO: 12270 - RNA, 1098 nt, synthetic construct
  source 1..1098: mol_type = other RNA
atgaagaagcttgataagaagctgtttttcgacatcctcaatatcgaagagcaggttcttaatcccttcgtcgaagaccaggtgtcatcgtttaaaattggccgcaaattcgtatacgccctgggagataggtctagggaaaaattgtaccagcaggaattaaatcaacggtttttgtacaagatcccactgaacaacgcagctaaggccttccggaagcatacgtcctattttgacttcctcgaacctcatagatataactacaatttcctgcgtctggatattaaaagctttttcccctccattactaagcccagtattgttgagacattttcacattacatcgaggacgaactggtggtggacgacaccggcgaaaaactactactgaattgctttgtggatttagtcaccttcactatcccgtcccactctgcaaatcgaaagttcgccggagagagcgtcttgccaatggggtttgtgacaagccctgcgatctctaacattatctaccgcaagcttgacataatcattcagaagcattgcagcattcacggcatagaatattcgcggtatgctgacgacatgttgtttagctcactcgcctcttctagttacatacactcaagatccttcctggatttcatcagccagctcctgctcaagcacggatttgagctgaacaagcgaaagagtatctacaaaaagcacgtgctgagcctgaacggttatgttatagagggggccaggagtgattttccttctggcgatatcagactttcccacaagaaactgaagcttctcgacaagctgatttatgagctgggtaacgggaaaagcaatagtgaggtcctcaaatcagtgttcagcttagagattgataaagtgaatttccccataccaaataccgaacaagagtttaaagacgcatactgtaaggatcagctgctcaacaagattggcggatacaggagctacttgatcgctttcatcaaattccttatgctgaacaacatttcctccagtgtatccatggaacgctattcagagctattgatcaaactcgagaaagagtattccaagctgcataaatcttga

SEQ ID NO: 12271 - RNA, 1107 nt, synthetic construct
  source 1..1107: mol_type = other RNA
atgcacattatcgacaaaaagttcttcaaaaccgcgattgcttcgaaagatttgttcgagaatgacattttccctccaattccgtcaaagtacgtgttcgagaagaagctgaaaaagagatacgtgtactcactcaaaaaagactcagccatcttcaatgcacagcagaacattattgacctgttcctccgaaagatcgatgttaataattgtgctgtgggatttcgaaaggacaagagttacttgaactttcttgagccccatagcggcaactactattttctgcggttagatatcagaaacttcttccacagcattgatgaaaagctgctgaaagattgctttagcccctattttaaggatgaatttatcgatgctgagaacaaacagaagttgatctccagttttctgaatcttgtgacattccacgtgggtaaaagttacggaaatatagactttgtagggaagaagatcgttcccgtgggctttcctagctccccatttataagcaacatttacttccggaacattgacgtgatacttcagaaactgtgcgccctacatgatatcacatatactagatacgcagatgacctgctcttctcttccagccgtgataataagttcgttcactccgactcatttgagaaagaggtaaaggtcatcttgtcctctcggaaactcaaggtcaatgaaaaaaaaatcgtgaaagccaagcacaggatttctctaaacggttatgtgatccaatctactgcactcgtcaataataaaaacgacaacaatgtctctggaatctttatctccaacaagaaaacgagcatcctgaaaaaggtcctgcatgaattcgaatcgaaacctgttaactataccaagataatggagcgcatctttaaggagaagattcgccaggaggactttttctaccccattaccttagacttcaaaaagaagtactacaagacacaagctaggaataagatctgcggctttagggcctatctcataagtttcatcaagttcaacgccatttatgggtgtattccagaatgtcgcatacaggcctataaaaagcttatctgccagatagatacctttctggtgtga

SEQ ID NO: 12272 - RNA, 1107 nt, synthetic construct
  source 1..1107: mol_type = other RNA
atgcacatcattgacaagaatctgttcaaaaccgagattgccccaaaggaccttttggaggacgatgtgattcctagcataccatactcatccgttctggaaaagaagatcaagaaacgctacatctactccttgaagaacaagtctcccgcactactcgcacagaggaacctgattgaggtacttttgagacgaattgacctcaatgactctgctgtcggctttcggaagggcgcctgttatttaaacttcctcgagcctcattctaataattatcatttcctgcgctttgacattaaaaacttcttccactctatcgatgagaagttattaagagattgctttagcagttacctgaaagacgagtgcattgatcccgggaacaagcaaaaacttatcagttcctttctgaacctgattctgtttcacgttggcagctcctttgggaatgatgatgataaaggaaagaggatcctgcctgtcggtttcccagcctcaccctttgtgtccaatattttcctgaggaaaatcgacatcataattcagcggacctgtgcgctgcacaatgtgacatatacacggtacgctgatgacatgctgtttagcagtagtcgtgctgataaatacattcattccgactcattcgaaaacgaaatcaaagtgatactgtctagccacaagctaaagattaacgaaaagaaaatcgtgaaggcaaaacaccgaatttcactgaatggctatgtaatccagtcctcgtcactcaccaacagaaaaaatgtcaatgacatatctggtgtcttcataagcaacaagaagataatcaagctcaagaagatcatccatgaatttaacaagaagcctgtggattacactaaaatcatggaagggatcttccgcgagaaaatcaaaccaagcaatttcacctttcccattactggaacatttaaacagaagttctacaaaacgcaagttcggaataaactctgtggatatagagcctatctcattagtttcgtgaacttcaaccttaggtatgactgcattccggacggcaagatcgagttgtactccaagcttatcaacgagatcgatgtgataatcaaatga

SEQ ID NO: 12273 - RNA, 1107 nt, synthetic construct
  source 1..1107: mol_type = other RNA
atgcatataattgaccggaaccacctgaaaatcagcatccttccaaaggatatttttgtagatggaatcgtgaatcccatcccttcttctgccgtcacagagaagaatgtgaaagggagatgtgtgtacatcctggaaaagaacagtgactacgccattgcacaacgcaatttagtcgagcagttcctgtcaaaaatcgaggttaataattcggctaaaggcttcaggaagaatctgtcttacctaaattttttggagccccatgcctcgaactactacttcctcaggctcgacgtgaaaaatttcttccatagcatagatgagcggttgctgaagaagtgtttcttcatctacttcaaggatgaattcattgacagcaacaacaaacagaaacttcttgacgcttttatgaatctcatcaccttttatgtcccttctagttccaaaaacataaactgcaaggaaaagcggatcattccagtgggcttttcctcaagcccgctgatatcaaacattttttttcgctctatcgacattcttcttcagaagctgtgcattgcgtttaatataacctacactagatacgccgatgatctcctcttctccgcagttagaggttgtgaatacattcacagcgattctttcgagaaagaagtgcgtatcattttaggcactatgtccctgaagattaacaacaacaaaatcatccgcgccaagcaccgaatttccttaaatggttatgttattcaggcacgaagtttgagcaaaaaaaaaagcgctaacgattacaatggggtattcatatccaataagaagacagagacaataggaaaagtgctgtatgagctgagtctcaactcagtggactacaagaagatcatggaaaaaatcatcgggaacaagatcaagatctccgattttaactatcccctgacctacggcttcattatcaagtattataagacgcaaaccaggaattatttgtcaggatacagaagttatctcatcagctttctgaagttcaatgagatatataggtgcgtccctgacattaaaatcaacgtctataaagacctactggacaagattgacaagtttctggtgtga

SEQ ID NO: 12274 - RNA, 1125 nt, synthetic construct
  source 1..1125: mol_type = other RNA
atgcttaataagatcgacaagaactacttcgttaacaatatcctgaacagaaagattgacatcatcaaagacggcgaaattaaaagcattacctcagataacgtgattgaatttacagtgaaagacaaactgctctactctctggggaatggaaatttatactctttcccccaaaaacggatcaatgatttcctattcaagttcataccattcaacaatgctagcaccgctttcaagaaggacttctgctattttgatttctttaagcctcacattggaaacagtctttttcttcggttagatatcaagagctttttccatagcattaacattgataagctcaaagacgtgttgaataagtacgtcgaggacgactttattgacgagaaaaaaaaccagaagatcattgattccgttattaacatcatctccttggacattactttgaactccaagaacaagtactacattaacaagaagatcatccctatcggattttcaagtagtccattgatatcagatctgtactttaggagaatcgatattctcatacagaaaatctgcctaaagaactccattacttacacaaggtacgccgacgatctcctgtttagcgcagcccatgaaaataattacgtccgcaaaaattggataggttttacagaggagatacgcaaactcctgtattacttcaacttcaatctcaacgataagaagactatccagaaaaaggggctgctttctctgaatgggtatgtgatcgagactagactctcaacaggtaacaataagctcattttttccgagctgcgattttccaatgagaaactctctaaactgatcagggcaatttatcacctggaagtattaggcaccagtcccaccgtgataatgatcagcatattcaaagagaagatcaaagacttgaagttcaaatatcacatcacgccggcgttcgccgcccgacattatcggtatagcctgctgaataaactaaggggctatcgttcttttatcatctcgatactgaagtacaacatcaagcacaatattcttaacaagaagaccaaggagaaatataaactgctgaccgaaaaacttgaacgcgaaattttgaagctgtga

SEQ ID NO: 12275 - RNA, 1119 nt, synthetic construct
  source 1..1119: mol_type = other RNA
atgttgaaaaaaatagatcgcaactacttcaacgacatcatacttaacggtaaaaaagacatcatctccgatggtgaggtaaaaactatcccctctgactcaattaaggagttcagtgtgaaaaacaagttcttctatcagctgtccgataagagcatctacaaaaagccccagcagatcattgcagagttcctgagtaaacacgctacatcaaacaatagctcaattgcgtttaaggcaggcctgtgttattttgattttctgaagccacacctcaataattcgagattcctcagactagacattaaatctttcttccacagcattgacatagaaatgctgaaaaaaaccctgtcacattacatagaagacgattacatagacgacatgaagaaacagaagattatagatgccctgatcaatattgtgacaatcgagaattcagaagacctgaatatcaagattaagaaaggctccaagtttttaccaatcgggtttaccagctctcctctccttagcgatgtcttttttcgcaagattgacataatcattcagaaattgtgcgttaaacactctatccagtacaccaggtatgccgatgacttgctattttctgtgtcgcataaaaacactttcatcaataagaactgggaagggtttaccaatgaaatcgagaagattgtgaattacttcagactgaacattaaccggaaaaagacaacgatccgaaagggcttaattagccttaacggctacactattgagacaaagatgcttaacggagccatcttgaacagtgaggtccggctgtccaatgataaactctctaagctcacaaggactatatatcatctggatacgctgggaagcagccctaagaagatcattaacattgtgttcaaggaaaagatcgagaatatcgagttcaagtataaagctacccaatcctttattgaacgtcactacaaatttgtgctcatgaataagctgtgcggataccggtccttcatcatcagtattctcaaatataactccgggaagaagatcctgaatgagaagtccaagcaaaaatatgagaacatagttagtaccctggaaaggcttatcttagtcttgtga

SEQ ID NO: 12276 - RNA, 1158 nt, synthetic construct
  source 1..1158: mol_type = other RNA
atgatcaagcttaatagagagttctttacttccgacattatcgtgctgaagaattccgagtctggactctctgagttcataaactcaaacactatcccttgggacaatgtaaccgagatcaaactcaaaggcaagtactattatagtttcagcaaacggatagtccataatattgactacgtgaaatctcaacggaacatctatgactactttagcaacgtaatccccttaaataacaactcctttgcgtataagaaggaaacctgttatctggattacttaaggccacatataggcaactactttttcctcaaaatcgatattgcaagcttctttcactctattaaggaatcatacgtgcgcaagctattctacaactatatcaatgacgaattcctcgacaatgataaaaaatgtagcttgatcgatgctcttattaaacttacctccatcgatattcctagcgagtcgaagaatatatcctatgttaacaaacgggtctttccaattgggttttccagttctcccattatctcagaaatttatttccgtccgattgacgtgttgctcatgaaactgtgcagtgatttcgaactgacttatacacgatacgctgatgacatattaattagcggtggcatcaataataagtacatagccaacaattgggactttatctacaatcggattttcgaaatcttctcatactataagctgaagatcaacacgagaaagacgataaataagaagaaatgcctgagcatcaacggatatgtgctggaatcaatgtactatgataacaggctcttgttttctgagctacgcatttccaacttcaagcttaagaagatcaataaagccttgttctacctggaggagaacacatacatcaagaacgaaaccattaagtatgtcatggagaaagtgtttaacagtaaattcaagaaggacaagttcaagtacaccattacacagagctttatcgatcgacactatgttttttcgctgacaaataagatgagggggtttagagcctatctgctcagtttcataatctacgatcgcaaatacatgatcctgcagaaagagactaaagacaaatacctgaagatcattggtagaatcgagcttattattgacaggctgctgaagaaatga

SEQ ID NO: 12277 - RNA, 1149 nt, synthetic construct
  source 1..1149: mol_type = other RNA
atgaataagattactaagaagatcctgatcgaaaaaatcttgttactaagcaaggatgagattgatgagttttaccaagctgaaattcctgattcgaatgttgtcgagaagaagcacaaaaacaaattcatgtacagcctgagttatagctcaacctttcgcaaaatccagtctaatattaacagtgctctgaatccccttctcgacctgaacaattctgctatagcgtacagaaccggtttgagttatttcgatttcctcgaaccccatgccaaaaattatcactttctcaggatggacattagcctgttttttcactcactgaacatagacgacgtgaaggaagccatttcacagtacatcgacgatgatatcattaacacaaagcacaaccagaagttgatcgacgtcataatcaagtgcatctcttataagattcccaagaagttcaaaaacaccaaccttcacgataaaaccattctgcctatgggattcagcacctctcctatcatttctaacataacctttcgcaagatcgacatcctgatccagaaactgtgtgccaaattagatatcacatacacgcggtatgcagatgacatgctattttctacgccgcgggacaagaagataatccattccgaatttttcctcaaagagatcaaaattctcgtatccctgctgggcttaaagatcaacgcaaagaagactatcgtgaaatcacatacaattagccttaatggctacatcatacagaatcagatccgactaactggattcgcagggctgttctcaccaatatcgccagccgagattagactgagcaataagaaaacagccattatcgataagctgttgcaccatattctggttaaaaaatccgattccgatgtgatactgaataagctttttaaagaggacgtgagggacctgatgcatcacggtaacaaagagaaatacgtcaaggaatatagtttggaccaaatcctcaacaaacttacaggctatcgttctttcctcctttccattatttcccacaataagaagttcaatagcacttccgtggggactatcaaaaagtacagttccaagatcaccaagattgagaaatgcataaacatcctcgacaaaaagaagatttacacatga

SEQ ID NO: 12278 - RNA, 1149 nt, synthetic construct
  source 1..1149: mol_type = other RNA
atgaacaagattaccaaaaagatcctgatcgagaagattttacttctgtcgaaagatgagattgacgaattttatcaggcagaaattcctgacagcaatgtcgtggagaagaaacacaagaataagttcatgtactccctctcgtactcttccacatttcgtaagatacagtccaacataaattcagcgctgaatcctctgctcgaccttaacaatagcgccattgcatacagaacaggactgagctattttgattttctcgaaccccatgccaaaaattatcacttcttacggatggatatcagtctgtttttccacagcctgaatattgacgacgtgaaggaagccatttcacagtatatcgatgacgatataatcaacacgaaacacaaccagaagctaatcgacgtgattatcaagtgtatctcttacaaaatcccaaagaagttcaaaaacactaacttgcacgacaaaaccattcttccaatgggcttctctactagtccgatcataagcaacataaccttccgaaagattgatattcttatccagaaactctgcgctaaactagatatcacctacacaaggtacgcagatgacatgctgtttagcacaccccgcgataagaagattatccattccgaattcttcctgaaagagataaagatccttgtctctttgctgggtctgaagattaacgccaaaaaaaccattgtgaagtctcacacaatatccctgaacggctatatcatccagaatcaaattcggttaactggttttgctgggctgttttctcccatcagtcctgctgaaatcagattgtccaataagaaaactgccattattgataagctcttgcatcacatactagttaagaaatcagacagtgatgtaattctgaataagctcttcaaagaggatgtgcgcgacctcatgcatcacggcaataaggagaaatatgtcaaagagtactccctggaccaaatcttgaataagctgacaggatataggtcatttctgctctcaatcatttcccataacaagaagttcaactctaccagtgttgggactatcaagaaatacagcagcaaaatcaccaaaatcgagaaatgcattaacataatcgacaagaagaagatctacacgtga

SEQ ID NO: 12279 - RNA, 1149 nt, synthetic construct
  source 1..1149: mol_type = other RNA
atgaacaagatcaccaagaagattttgatagaaaagatcctggtcctgaacaaggatgagattgacgaatatttccaagcagagattcttgattctgacgtcattgagaaaaagcacaagaacaagtttatgtactctctgagctatggtaataaatttcgcaagatccagagcaatatcaatagtgaactcaatcagatactggaactgaacaactccgctatcgcctataggaccggacttagctatttcgactttttggagcctcattcaaaaaactaccatttcttgcgaatggacatttcctccttcttccactctcttaatccagaggatgtaaagagttctctgtcccaatacattgataacgacgttgtaaacgaaaaacacaaccaaaatctgattgatgtgattctcaagtgtattacttacaagatccccacaaaatgtcagaataaaaaaatccacgaggccatcatcctccccatgggcttctccacaagcccgctaatttcaaacatcgtgtttaggaagattgatatcctcattcagaaactgtgcacaaagcttgacgttacttatactcggtatgccgacgatatgctgttcagtacccccagagataagaagattattcacacagacttcttcctgaaagagataagtatcttagtgtctctacttggcttgaaactgaatacaagaaagacgatcatcaaaagtcatactatcagcctcaatgggtacatcatacagaatcaggtgagactcattggttttgcgggactcttttcgccaatatctcctgcagaaataaggctgtcgaataaaaaaaccgctgtgatagacaccctccttcatcagatcctggttaagaagaatagcaataaccagatcctgaaacacttgtttaaagaggatgtccgcaaactgatgcgtcatggcaataaggaaaaatatgtggaggaatacagccaggatcaaattttaaataagctgaccgggtaccggtcatttctgctctccattatctcccacaacaacaagttcaactcaacttcattagacaccatcaacaagtacaagagcaaaattacgaaaatcgagaagtgcataaacatcctagacaagaagaaaatctacacatga

SEQ ID NO: 12280 - RNA, 1149 nt, synthetic construct
  source 1..1149: mol_type = other RNA
atgaagaaaatcactaagaagatcttgctggagaaaatcctcctgctaaataaggacgagtttgacacgtttattcaagtggaaatccctgattcagaggtgatcgagaaaaagcataagaacaagttcatgtactcactgtcatacgcttccaaattccgtaaaattcagtcaaacatcaacagcattcttaacagtaccattcagctgaacaacgcggcaacagcctatagggccgggcttagttatttcgatttccttgaaccccatgtgggtaactaccattttactaggctggatatttctagcttcttccatagtcttaaggtagaggatattaagacagctttggagcagtacgttgaaaatgacactctcaacgaagaacacaatcagaaactgatagatgtcatcttaaagtgcgttacctacaaagtgacgaaagaaagtaacaataaccgcattcacgacaaggtgattatacctatgggattttctacctcccccgtgatttccaatctggtctttcgaaaaatagacatcatcattcagaagctctgtaccaagttagatatcacctatacaagatatgctgatgacatgctctttagcgccgctaagaacaaaaaggcaatccatagcgactacttcataaaagagatcaagatactggtatctctgctcggcctgaaactgaatgaacggaagacaatcaaaaagagccacacaatatccctgaatggctacatcatccagaatcaagtgaagttgtctgggttcaaaggactttttagtccaatatccccagcagagattaggctctccaacaaaaagactgtgattattgacaaactcctacaccacattatggttaagaagaacaatcacaatgacatcctgaagaagttgtttaaagaggacgtccgccatattatgcggtattcaaataaggccccgtatatcgataaatatgccaaggaccagatcatgaacaagttaaccggctacagatctttcctgctgagcatcatctctcacaacaaaaagtgcagcagctcctcgaatgagacaattgaaaagtacaaagccaaagtcgtcaaaatcgagaaatgtatcaagactttggataccaataagatacacacctga

SEQ ID NO: 12281 - RNA, 1146 nt, synthetic construct
  source 1..1146: mol_type = other RNA
atgaaaaagattacgaagaagattctgttggaacagatcctcgacgtcaaaaaagaagatatcgatgcattcctccagaataatatcaacgatagtgacgtgtctgagaagaagattaagtccaaatacacttacaccattaacgacaataagctcaaaaagatccaatcaaacatcaatgagttcctgacccaaattatagatcttaacaatgccgccatcgcgtaccgaaaaggcttgtcttattttgacttcatagagccccatgccaaaaattaccactttattaggatggacatcagtagctttttccacagcctggatgttaaagacattcaggaagccctgtaccaatatgtggacaatgatgtggtgaacgatacacacaatcagaaactgatcgatgtaataatgaactgcataacctatacgattccaatcactgctaacaacgaaaagtaccataatattaccgttcttcccatggggttttccacctcaccactcattagcaatctgatcttcagaaaaatcgacatactgattcagaagttatgtaccaaactgggagtcatttatactcggtatgcagacgacatgctgttctctgctccttttgacaaaaaaatcgtgcacagtgagtttttcatcaaggagataaagatactgatctcccttatcaaattgaagctgaacaagaacaagaccattattaagtcacatacgatttccttgaacggctacatcattcagaacaagatcaaggttaatggaataagaggtctattcatcgagcctacaccgagtgaaattcgcttaagcaacaagaagacaatcatcatcgataagttattgcactacatcgaggtcaaaaaaagcaagaataacatcatcctcaagaaactgtttaacgaagatgtacgggaccttatggtgttctctaacaagaagaagtatatcgatgactattctcttgatcagatactaaacaaactgactgggtatcgttcatttctgctcagcattatcaagtacaatgagaaaacgaacatcacctccaatacgactattcagaagtaccagaataagataaagaggattgagaagtgcattaattcgctcgacaaaaacaataagtacacatga

SEQ ID NO: 12282 - RNA, 1173 nt, synthetic construct
  source 1..1173: mol_type = other RNA
atgtataagatcaataagaagtacttcctgacttacctgcagcccataattgaaaaggggatagtcacaaccatcaaaaaagagaaggtgaaagagtataagttggggaaacactatttttacgagattaccgacgagaaaatcaggtatattcacgagtggctaaataagtcttttcagaagaacatagaccttaacaattcaagcatcgcctatcgaaagggatacagctatcttaatttattcgagccacaccgccataattattactttctcagactggacatcaagagttttttccattctatccaaatgtctgacatcatcgctgtctttgaaccttatttcgataatgaacacatcgatgagaaaaagaagcaaaaactcattgatggctttattaaccttgtgactttcaaaatccctgtgtcctttaagaacaaagaattcaagtctagccggattctgcccataggttttataacttcccctgtcatctctaacatcattttccgtaaaattgacctcctgattcagaaattctgctccgaaaagaacataatttacacacgctattctgatgacatgctgttctcaagttccaacaattcaaaatacttgcatagtgaggatttctacaaggaaattagcattttcctgaacatcatgaactttaagctcaatcagaacaaaaccctatacgccacgcatacactgtcattgaacggctataccttgcaatattccaatcagccgaatagcaagaatgaacagttaatcaatgagttcagactgagtaacaagaagcttctgatcattaagaagatgatatacctcatcaacaagcaggaaaaatccccaaaattcatcctgaacaagctctttaacttcggaatcaataaactcagcactaaatatcccatagagagcaagaatgtgaaggaaaaatattactacgaccagctgctgaataaacttaccggctacaggtcctacgttttatcgattgtggtatttgataagaagcacgattgttgccaggacaaaacgattgataaatacaccgatatcgttgaagacctgaacaagattatcaaacggtacatcaagaaaatcgagacaatttcaaagaagatcgaggacgagattaaagagagtgagagcgcaaaatga

SEQ ID NO: 12283 - RNA, 1077 nt, synthetic construct
  source 1..1077: mol_type = other RNA
atggggaaaatcagtaaagacggatttaagaagttcttacagaccacgactcaaaccaacattaacgagttcaaaatcgggaagagttatttttatgagctgaaagacaacgacaatctcttggcatttcacagagtcctcaatcgggagttccagaaagtaattcccctgaacaatgctgcagtggcctttaggaaaaacaaaagttaccttgacttgttcgaaccccaccgtaagaattactactttctgcggctggacattaaagccttctttcattcgatacagatcgacgacataaagaagaccttttcaacatacttcgaggatgagtatatcgataacgataagacccagacactcattgatgcgtttatcaatctggtcacttataaagtgcccgataacagctccaataaagacttcagaggtaaacagatcctacctatgggcttcgtgactagccctgtgattagcaatatcatatttcgcaagatcgacattcagatacaaaagttttgtagcaagcgggatattacctataccaggtacgccgatgatatgctgttctccagcgacaagaattccaattatgttcactcagatggcttcatcaatgagatatccatctttgttgcccagctcaaattcaagctgaaccatcataaaactctaaaagcaacacacacattgtcactgaatgggtacacaatccagtattctaacatcaagaaggatattctgggagctagggacgaggaagttatttctgaatttcgcctctccaacaagaagatcaacataatcaagaagatgatccacctgattgaagtggaacatcaaacgccgcagtatgtcttgaagaaacttttcaactatcgacttccaaatgatgtgccagctgagaagaaagaagaatactacaagcaccaaattaccaataaactgactggctacagatcttacatcttatctttcatcacattcgacaagaaataccattgcatgcagaaaaacaccgtagagaagtacatcaagcttattaagctgattaaccagaacccttatctccagtga

SEQ ID NO: 12284 - RNA, 1110 nt, synthetic construct
  source 1..1110: mol_type = other RNA
atgaaaaagattattcacaagtccttcttcaagaactacatcatcgagggtgaggtgcctagtactaaaatcccctccgtaaatgagttccaactgggaaagaatttcttttacgaggtggtcaacaataagaaactgctatccttgcataaacagctgaatgatgtgctgctcaataagatagaccttaataatgccgcagtcgcctttcgtaaagactacagctatctgcacttatttgagcctcatcgaaccaactattatttcttgaggctcgatataagatcgttcttccattctatcagggttgatgacattaaggaaatcttcaaggcttacatttcagaggacgaatacattgacgacaagaagaaacaatctattctggaagggtttattaacctggtcacatacactatccccgccgactcaaaaaacgataagtttaaggagaagcaagttttaccaatgggctttactaccagtccagtgataagcaacattattttccggaaactcgatattcagatccagaagttttgcagcaagaacaacattatatacaccagatatgcggatgatatgctctttagtagctccctggctagctcttttgtgcacagcgaatccttcataaaagaaatccggatcacaattagccagatgaagttccagctaaatgaaaacaaaacaatcaggacgaaacacaccatatctcttaatggctacactatccagtacagttacttcgagaactttcttaagttgcataagcaggagtacaaaattaatgaggtgcgcctgtcaaacaaaaagaccaacatcataaaggagatgatctacttgatcgaagttaaaaagatgtcatcccagaaaatcctgtggaagttatttcactacaaactccgcttcaaatttgtgattacagaaagtgacgtccgaaaaaagtattatgatgatcagctcctgaataaagtatctgggtatcggtcctatctgcttagcatcattaagttcaacaagaagtactcatgtacaagagacaccacgatcaagaaatattctgagctgatcaataacctcgacaaaatcatcgactataagtattga

SEQ ID NO: 12285 - RNA, 1377 nt, synthetic construct
  source 1..1377: mol_type = other RNA
atgaacaaattaatcactatcgactacttcaagcgtataattctgaagaataaggtgccgaatatcagcaaagataacattcgcgaattcactgtaggaaagaattacttttacgagctgacagacaagcagcaactgttggtccaattccaaatcttcaataagctgagcaacaacatcgagctgaataatgccgctatcgcatttagaaaagacctctcctatctgcatctatttgaacctcacagaaagaactacaactttatccggcttgatattcgaagcttttttcactctattcagatcgacgatatccgcgaggtacttaaggtgtatattcccaaagatgagtacatcgataagaaagaaaagcagtccgtcctggatgcgttcattaacctagttacgtataaaattccctctacaagcaagaatgagaagtttaaagggaagcgcgtgctacctatgggctttcaaacatccccaataatcagcaacattgtttttaggcaacttgacattctgattcagaagctgtgtagttcacacgaaatagtctatacccgttacgccgatgacatgttattcagctcctccaagaataggacctatgtgcataccgatgactttattaaggagatcaggatcatcctgtcgaccatggacttcaaacttaacgagcacaaaacgctgaaagccaggcacaccttgtcactcaatggatatacgattcagtactcagacatatctactatgaagagcaagaagaagattatcatacacaatgagagtgagctccatgaattacgactgagtcacaaaaaaaccgacatcgtgaagaaaattatccacatgatagtgacagaaaagaaagagccagaggtgatcttgaaaaaactcttccagtacaagataaacctcaagttcatcccttccgaaaccctcaaaaataaatacagccatgaacagcttttgaacaaaattctcgggtatagaagttacttgattagtatcatccagttcaacaaactgtactattgcactcaggacaaaaccatcgataagtatatcaagatcatcaatgacctggagaagatcgctacacagtatcggatgaagatagagaagctggaacggaagattgataaagaaaagaaacggatcaagtcaatactgatgcagcccattgacaaactgcagttcactatttgggagaaagatgcactctctgaagtgggatacaccactctcaactccttgaagggcgtcacagagaaacatctgtacggtaatataaagggcatcggtgaagtgaaggccaagaacattgtttctattgtcaacaaagagctttcaaagacgaaatctagaatttga

SEQ ID NO: 12286 - RNA, 1071 nt, synthetic construct
  source 1..1071: mol_type = other RNA
atgaagatcaacaaaaagcagctttttcagcaaatcaaactgctgctgaattccaataataggattaataacctggaggtagaagagtttaagattggcaaaaacttcttctacaagatcgacaacatcgagattattaagtttcacgactggctgaataattacctgctggacaaaatcgaaatcaataattcctcgaaagcctttatcaccgacaaatcttaccttgatttcttcgaaccacacattaaaaactacaacttcatccgattagacatcaaaagcttcttccactccataaacattaaagacattgcaaacgctgcgaaagcctactttgataaagacacaatagagctggataagaaatatcccctgctcagcttcttcctgttttttacaacgtacaagattcctgatatctccgagaacaaaaagttcattaacaaacgtgtgcttcccatgggctttaagacgtctccaaaaatatctaacatcgtgtttcgcagcttagacatccaaatacagaagctttgcattaaaaacgggataacctatacaagatacgtggatgacatgctgttttctagcaagaaggatctaacatatatccacactgatagtttcatagagcaaatcagcttcattttgaatcagatgaacttccagttgaattcaaagaaaaccatcaaggctaaacataccatcagtctgaatggttatactattgactctagcaaaaaggagtttaggataagtaacaagaagctcctcaagattaagaagctaatctacatgaagaacatccagaagaaatccgccaaggatatcttgaagaagttgtttcctaaggatttccggaaatataaacttcgctattgcagctcacagttggaaaataagattaagggatatcggtcatacctgctgagtttcattgttttcgacaacaagtataagtgtctctccgaaaataccaagaattcatacatcgacctcataaacaagttagaaaaactcatcctcctggacactaaagtctacaatgacgagattgatgaggatttttga

SEQ ID NO: 12287 - RNA, 954 nt, synthetic construct
  source 1..954: mol_type = other RNA
atgctgagtcagattgaaattaacaactccgcctttgcttttgtacctaaaaggagctatctcgattttttcactatccatatcggcaattacaactttgttaggctggatatcaaaaacttctttcactctattgacctgaagaaattggaaaaaatgctgagcgtgtactttgagaatgaatttatcgacaccgacaaggaccagctgatcataaagagtttcatgaatctggtcacctacaagattccactggccagcaaaaatacaaccgagaaaggcaacaccattctgcctattggattccctacctctcccataatcagtaatatctatatgcgcgacttcgacataaagattcaggagttctgtgcaagacacaacatccagtattcacgttacgctgatgatatgcttttctcttccaaaaaagactcggacttcgttttctcagaaacatttatgaaggaagtggcaatcttgctatcattgaaagggctccatttaaatacgaagaaaacgatcaagcggaaacacaccatttctctgaatggatacacactctctaatagcaaccccactattaaggaaacttccccacattttgagttccgaatctccaacaagaagattagcaccctcaagaaattcatattcttgacaaagaacgtcaacatcagttccagagagatcatggaaaaggtgttcagcttcaacatcaaaaagcaaaagtttcggtatccccccaaaaagaagtttatcgagtcttactgcaagacattactggtgaataagataattggttaccgctcctacattattgccatactcaaacactcagagaagcaccaagcgtgcaacgattcgactatcgagaaatataaactccttctttccgagcttgacttttatctagataagaatccgccagaggatttcagcaagactctgtga

SEQ ID NO: 12288 - RNA, 1143 nt, synthetic construct
  source 1..1143: mol_type = other RNA
atgctgaagatccatgccggtcaattcaaacagctactgaccggacagagtattttcaaaaatgggaccattcccaccatagaagacaaatttatacgggagattcaactcaaagggaagtttttttacgcaatccagaatagtccagagctgtcttcaactcaggccaacctgataaacgagctgtttatccagattgagatcaacaattcagcctatgcttttgtcagcaaaaaaagttacctcgactttttcaccaatcacatcggaaattacaacttcgtgaggtttgatatcaagaattttttccactccatcgacgtaatcaaattagagaaaatgctttccgcatatttcgaaaacgactacatcgataacgagaagcaacagcctacgatcaagagcttgatgaatctcatcacatataaggtgcctttgtcctcaaagaatattgcgaaacgcggcaacacaatcctgcccataggattcacgacaagcccgattatctcaaacatatacatgagggacttcgatatcaagattcaagaacactgtatccggcataatatcaattacagcagatatgctgacgacatgctgttttccagcgataagtcttcggagtatatattctctgattcctttatgaaggaggtcagtattcttcttggcttgaaaggcctacagctgaatgctaagaagactgtgaaacggaaacacactatcagcctgaatgggtacacaatttctaacaaccatattagccagattcttgagaagcctgcctttgaattccgattatctaacaagaagttgtgcatcctgaaaaagtttattcacttgagcaagaaggatggcgtgacttccaggctcattatggaaaagctcttctctttcaacattaagcgccagaaattccgttacagacccaaaaaggaattcatagagtcctattgcaataccctcctgaccaataaaatcacaggttacagaagctacctgatttccatcatcaagcatgcccttaaatataacatcagttcagattgttcgctggagaactataacaagattctgaaggaactggaactctacttagacaaaaacccagttccagatcactcaaaatctgacaagatatga

SEQ ID NO: 12289 - RNA, 1143 nt, synthetic construct
  source 1..1143: mol_type = other RNA
atgctacgaatcgacgcaaccacactcaagaaaatgatcatatccgagaatctgctgatcgagggcattattcctcccatcgagagcaagtttgtgactgagtttagggtgaaaaacaaattctactacagtgtccagaataatccagaattactgctggcgcaaaacaagattatcagtgacattctaagcaaagtggagttgaataactccgctttcgcatttatcaagaataagagttacctggacttcttcgaaccacacatgggaaattataacttcgtccgcattgacattcagaatttcttccattctatccataccccccagctgaaggaaatattgtcccactatttcaaagacgaatttatcgaccccaataagaaacagaaaatcatctcttccttcatgaacctgatcaccctcaatataccactgagttctaaaaaccagaactcaaagaacaacaacatccttccaattgggtttactacaagtcccattatttctaacatctacatgagagacttcgatataaaaatgcaggacttttgtatccgtcacaatattacgtattctaggtatgccgatgatatgcttttttcctcaactgaacaaagctcatttgtgttatcggatgctttcatgaaagaagtgagcatacttctcaacctcaagaaattgaagatcaacacatccaaaaccatcaagaaaaagcatacaatcagcttaaacggttacacaattagcagctccctgattgttgatggcaaagtcatttctccggccgagtttagaatttcgaataagaaaactgccatcatccggaaattcattctcttgtcaaagaaggaaaagatcacgtcacgctacattatggaaaagctgttccactttgataagaataaggttcactttctcttccctcctaaagacaagtttatagagtcttactgcaacactctgctggtaaacaagattaaggggtatcggtcctacataattagcctcatcaagaacgccaagaaatataacaataccaatgagaacaccatcaagaagtatcaggagataatacttgagttgaatatctacctggataaaaatcctctgaaaaatttcagcgagaacaagaaaacctga

SEQ ID NO: 12290 - RNA, 1101 nt, synthetic construct
  source 1..1101: mol_type = other RNA
atgattaagaacaagatttccgatgatttcttcaaaaaggctattctcaaggggaacgaaggcctgctgaacgacttttcgcccagcgtgcgagagtttaaggtgggctgcgacaacttttttgagatttcacgggacagtgagcataagaggattaatgacaggataactaagttcgtgcttgataagagcccaataaattcttcagcgtgtggatttgtgcagggcaaatcttactacgattttttacggcctcatatccaaggatactatttcctcagacttgacatcaagaaatttttccacagcattcctagtcacgaagtgaagagtctcctcgctcagcactttaacaacgaaaaaaacgggaagaagtattctgccttggatatagcctacatgagcatcacccacagggtatccgataactatatcgataaagacttcaggggcaaagagatactgccaatcggtttcagtagttcaccggtgatcagcaatattattttcagacgggtcgacatcctgattcagaagctctgtgaagataagggaatcatatactcacgctatgcagatgacatgttattttcctgcgacaattctaagtatttgcactccgaacaatttgagaaagacatttccatcttcgtcagcacgctttcgctgaaactaaagaagagaaaacgccgagccacagagaataccatctccctgaatggttatgtcgtgcagaaccgcaagcgcaagaaggggtttctccatgtctacaaagagaaacctgtggggaatatccgtttgtccgacaaaaaactgaagccactgaaaaagctaagcgccttgttaaagaaacagaaagaccccatctacattatggagaacatcttttacctgaatcccaaaaatttcatcagacgttatggcggaaacttcgcattctattcaaaatacgctgatgatcagctgcagaataagctgaaggggtaccggtcttatcttgtctctctgatcaaatacaatgacaagtacggctgtgttaacattgactgcatgaagaaagtaaaaggtctggttgaggttttcgaaagcaacataaagtga

SEQ ID NO: 12291 - RNA, 1101 nt, synthetic construct
  source 1..1101: mol_type = other RNA
atgattaagaacaagatttccgatgacttctttaggaaagcgattcttaaggggaatgaagatctgcttaataatttcagtcccgcagttcgagagttccagataggatgtgataatctcttcgaaatcactcgggagacagagcataagcagataaatgaccgcatcaccaaatttgtgctggagaagacccctatcaattcatccgcttgcgggttcgtacaggggaaaagctattatgattttctaaggccccacatttctggctactacttcctgaggttggacatcaagaaattctttcactctatcccatcctatgaggtgaaggccctgctcagccaattctttaataacgaaaagaacgggaacaaatacagcgcactggatatcgcctacatgagcgtcattcacaaagtgagcgatacgcatattgataaggactttaggtccaaggagatactgcctatgggctttagtagtagccctgtgatatcaaacattatctttcggaaggtggatattctgattcagaagctgtgtgaggataaaggcattgtctacagccgctatgccgacgacatgttgttctcctgcgacaactccaattacctgcactgtgaccaattcgaaagagacatctccatcttcatttctaccctctctctcagattaaagaagcgcaaacgtagggctactgaaaacacaatcagcctgaatggctacgtggttcagaacaaaaaaagagaaaagggctttcttcatgtctacaaggagaaaccagtcggttcgatacggctgtctgacaaaaagttgaaaccgcttaagaaattagcttctttactgcagaagcagaaaagtcccgttgttatcatggaatcattgttcagtctcgagcggagaaagtttatcaatcgctacggaaacaattggaacttttattgcaagtatgcagacgaacaactccagaacaaactgaagggatatcgttcatacttggtgtcactcatcaaatacaacgataagtatggatgtgtaaacgtcgagtgcatggagaaactgcgagccctagtgggtgtgttcgagcttaatatcaagtga

SEQ ID NO: 12292 - RNA, 930 nt, synthetic construct
  source 1..930: mol_type = other RNA
atgatgaagaacaacatatctgacgactttttcaaaaaggccatccttaaaggtaatgaagacctgttgaatgactttagccccgccgttagggagtttaaggttggctgtgataacttcttcgagattagtaaagattctgaacacaagagaatcaatgaccgcattactaaatttgtgctggcaaagatcccgattaattcttcagcgtgtggcttcgtgcagggaaaaagctactatgacttcttacgtccccacattcagggatactattttctccggctcgacatcaaaaatttctttcactcaatctccgcacacaaggtgaaaaatctgttggcccagcatttcaataatgaaaagggcgggaacaaatacagcgcactggatatcgcttacatggctgtcacccacaaggtatcggatacttatttggataaagactttcgcggtaaagaagtcctcccaattggatttagcagtagccctgtgatatcaaacattatcttcaggaaggttgatatcctaattcagaaactctgcgaggacaaggggatcatctatagccgctatgctgatgatatgttcttctccagtggaaatagtaaatacctccatagcgaacaattcgagaaggatatttccattttcgtatccacattatcactgaagctgaagaagtctaaacggaaggccacggagaacacaatatccctgaacgggtatgtggtgcaaaaccggaaaagaaagaaggacttttttcatgtgtacaaagagaagccagtcggcaacatccgactttctgacaaaaaactgaaacccctgaagaagaacttccgaatcgcccagaagaccaagatttccaatatatacaacggcgagaggcttccttttaaaccaaagaaggtctgccctaagatcagagagtga

SEQ ID NO: 12293 - RNA, 1107 nt, synthetic construct
  source 1..1107: mol_type = other RNA
atgataaagaataagaagaagatcagcgacgattttttcaaaaaggcaatcctcaatggcaataaagcccttctttctgactttagcccttctgtatcagaatttaaagttggaggcgatcggtttttcgagatctctcgcggatccgaacacaaatccatcaataacaggatcaccaaaatcgtgctcgacaaaattcccatcaattcctccgcttgcggatttgttcagtgtaagagttactacgactttcttcgcccgcacgtgcatgggtactactttctgagattggatattaaggagttcttccattcgataccatcgattgaggtgaagaaactattaagccagtacttcaacaacgagaagaacggcgccaagtacagtgccttagacattgcgtatatgtccgtcactcatagggttagcgatacatatattgaggaagacttcagggggaaggatatcctcccaattggctttagcagctctccagtcatctcaaatataatattccggagaatcgacatccttatccagaagatgtgtgaggaaaaaggcatcgtgtatactcgatacgcagacgacatgctgttcagttgcgaaagtagtaagtacctccacagtgaacagttcgagagagacatttcaattttcgtctccacgttgagcctgaaactgaatcgcaagaagcgtaaagctgctgagaacacaatttcactgaacgggtatgtggtccagaataccaaaatcaacaaagggttttttcacgagtatattgaaaagcccgtgggaaacataaggctgtccgataagaagctgaaacccttgaagaaactgtccgtgttgctcaaaaaagaaaaggatcctatctacatcatggataaagttttcaacctgaaccctagcaagttcattcgaaagtacggtaagaattacgagttctattctaagtatgcagacgatcagctacaaaataaaataaagggttaccggtcatatctgctgtctctcatgagctataacgataaatatggttgtgtcaatgccaaatgcatgcaaaaagtaaagggcctggtggaggtgtttgagtctaacattaagtga

SEQ ID NO: 12294 - RNA, 1122 nt, synthetic construct
  source 1..1122: mol_type = other RNA
atgtaccaagtggaagcgtctatgatcaacactaaaatcagcgatgagttcttcaagaaggcaattcttaagggccagagcgagatattcaatgaattttcaccttccgttcgggaatctaaggtgggccccgactcctttttcgagatcgcccagaactccctccataaggacatcaatgacaggattacaaaattcgtgctcaataagaacccaatcaattccagtgcgtgtggctttgtcgccggtaagtcatattatgactttctgcgccctcatattaccggttacttctttctcaggctggatatcaagaagttttttcacagcattcccgttagcgaagtaagggaacttttgtcgcaacacttcaatgataccaaaaatggagccaagtactctgccctggatatagcatacatgtccgtcacacacaaggtcagtaatgaccacgtggatcaggatctcaaggctagggagattcttccaattgggttctcatcttctcccattatctccaacataatatttcgccgagttgacatactgatccagaagctgtgcgaagagaagggaatcacatacacacggtatgcagatgacatgttgttttcaagctacaagtcccgttacctgcacagtgaacaattcgaacgcgacatttcaatcttcatcagtacgttgagcttgaaactcaagaaaagaaagagaaaagaggcagagaataccatttctctcaatggctatgtcatccagaacaaaaagattgagaagagcctgtttaacgttctgaaagagaaaccggtagggaagatcagactgagcaacaagaaacttaaaactctgaaaaagctggctgctttactacgaaaaaagcagagtcctacctacatcatggagaaccagttcaaattgaatcccaacaaattcaaagctaagtttgggaagaacctgaatttctataacaaatttgccgacgaccagctacagaacaaaatcaagggatatcggtcgtacctggtggccttattaaaatataacgaactccatggctgcgtgaatattgattgtgtgaaaactgtcgagaaactgattaaggtgttcgagcttaacgtgaagtga

SEQ ID NO: 12295 - RNA, 1101 nt, synthetic construct
  source 1..1101: mol_type = other RNA
atgaataagaaggtgagcgatgaattctttaacaacgcaattctcaaagggaacgtggcgctcttggatgatttttccacctcagtcatcgaaagaaagagcggcgctgatatatttttcgaaatcctgaaggatagcgaccataaaattgttaacgatcggattacgagatttgtgctatctaaaatccccgtgaattcaagtgcctgtggattcgtaccaggcaaaagttattacgatttcttgcgccctcatatctcagggtactattttctgcggctggacattaagaaatttttccactccatatccgtccttgaggtgaaaaatctgctctcccaatacttctctgacgacaaaaagggagcaaagtatagcgccttagacattgcatacatgtctatcacacacaaagtgaacaataatttcgatgacgatgacattaagaagaaggaaatcctgcccataggttttagcagttctccagtagtgagcaacataattttcaggagaatcgacatcctcatccagaaattatgcgaagataaagggatagtctattccagatacgctgacgacatgctgtttagtagttcaaaatctcgataccttcatagcgagcagtttgagagggatattagcatcttcgtttccaccctgtctttaaagttgaagaagcggaaacgcaaggccgttgagaacactatctccctaaacggctacgtgatccaaaatacaaagctgaagaagaatctcttcttcaatgtctataagcaggatcctatcggctcaattcgtctttcagacaagaaactgaaacacttgaaaaagctgtctgctcttctccgcaagaatagggactccgtgtacatcatggagtccatctttcagctgaactataacaagttcaaacggacttatggtgagaacataaacttctacatccagtacagtgacgaccagctgcagaacaagattaaaggatatcgaagctacctggtatcgctgattaaatacaatgagaagtatggctgtgttgccaataactgcattgtgaaggtgaaggagctcgtcagggtctttgaatcgaatattaaatga

SEQ ID NO: 12296 - RNA, 1104 nt, synthetic construct
  source 1..1104: mol_type = other RNA
atgaacaacaagattatcaagaacgacttctttgagcaggcagtgctgaaagggaaaacgcagctcctaaataagttcacaccgagcgctgtggagaggacagtgggaaatgatatctttttcgagatccccaaagatagcgatcactttttgatcaatagacgaattgagcagctgattttatcaagcatccccgtcaactcttcttgctgtggcttcgttaagggtaaaagctacctggactttcttaagccacacataaaaggatactatttccttagactggatatcaaagacttctttcactccattcagctatccgacattaaggccttgctcggggactattttgaagatgacaagaagtctttcaagtattcccctctggacattgccctcatgtctttgactcatagcgtgagttccacacatcctgctaaagatatgaggggcaagaccatcctgccaatcggattcccctcgtcacctgtgatcagtaacattctttttcgtaaggtggatataaccatccagaagttttgcgaagacaagaaaatcacatattcaaggtacgcggatgatctgctgttttctagcactagttcccgcttcttacacagcgagcagttcgagaaggaaattagtatcttcataagcatgctgaccttacggttgaaacggaagaagcggatcgcaggtgaaaataccatttcgctgaatggctatacgatccagaacaagaaaaaatccaatgtcagtttcctgcgggactaccaacaagaccccattggctctattagactgtcaaacaagaaactcaaaactctcaagaagttggcagccagccttatcaagaagcattccgctgtatctataatggaaaacctcttcgggctgtcatttcagaagtttaaacgcaatcactttccagataaaaacttctaccgaaagtacgcccgcgaccaactacagaataaactcaaaggctataggagttaccttatatcctgggtcattttcgacgataaacattcctgtgttgcttcagattttctgctcaccgccagatgcctgatagacatttacgagaagaacatcgagtga

SEQ ID NO: 12297 - RNA, 1104 nt, synthetic construct
  source 1..1104: mol_type = other RNA
atgaataaaaacaaagtgagtgatgacttcttcaagaatgcaatcctcaaaggtaacctcggactgtttgacaagtttgatctgtccgtgattgaacgtaatatcgggaataacgcatttttcgaaatatccaaagactcggagcagtacaagattaacgaacgaatcacaaagtttgtcctgtctcgacagcccattaattcagccgcgtacgggtttattaagggcaagagttactacgattttctcaaaccgcacataaccggttactactttttacggctggatattaagaatttcttccactctattccagtgagggaggttaatagtttgctggagggattgtttaactcctcaaaggaaggcaaactctattctgccctggacctggccaaaatgacgcttctgcatactgtgtctaaagacttcagcgacagcagcctgagaggggattatgttttaccaataggcttcccctccagtcctgctatatccaatattattttccggagggttgacatcctaatccaaaagtattgcgatgacaagaatatcatctattccagatacgccgatgacctgttattttctagcgcgaactccaatttcattcattcagagcagtttgagaaggagatctctatattcatctcgaccttggctttgaccctcaagaagagcaaaaggaaggcttgtgagaatactatctcacttaatgggtatgtaatccaaaacacccgccctaagaaaacactttttagtaacatcttccgggaaaactctaccggagcaattcgcctatcaaacaagaagctacagacattgaaaaaggtactgcggtcactcttcaagggcaaaagtgccatttacatcatggagacattttttggactgaactacagcaagttcaaaaacaagttcaattccgactatcgcttctataacaaatatgctacggaccagctgcagaataaacttaggggctacagaagctacctggtcagccttatcaaatataacgaaagctacgattgcgtggatcagaactgtctcaaaactgtgaagtccctggccaaggatctcgagaaatatatcgtctga

SEQ ID NO: 12298 - RNA, 1104 nt, synthetic construct
  source 1..1104: mol_type = other RNA
atgaacaaaaaccgggtatctgatgacttctttaagaatgccattctcaaggggaatactgacttgttcgatagttttgacgtgtcagtaatagaaaagaagataggcaacgactgctttttcgaaatcccccgagattctgagcagaacaaaatcaacgagaggatcactaaatttatcctgtcaaggcaacctgtcaactccgcggcttgtggctttataaaaggaaagtcgtactttgacttcctcaaaccccataccaccgggtattacttcctgaggctggacattaagaatttcttccactccattcctgttcgtgaggtgaataatctgctcgagtcccttttttcaagctcaaagaatggcaagagctattctgctctggatctcgcaaagtcaacagtccttcacacagtgtctaaagattttcccgatctatccctcagaggtgaatatatcctgccaattggttttccctcctcaccagccattagtaacatcattttccgcaaggtggacatcctcgtgcagaagtactgtgatgacaagaatataatctactccagatatgctgacgatttgttattcagtagcattaacagcaactttatccatagcgaacagtttgagaaggagataagtatctttatctctactctgtccctgaatctgaaaaagagtaaacgcaaggcctgcaaaaataccattagcctgaatgggtatgttattcagaacaccaaaccaaagaagatcatctttagcatgttctattctgacaaccctgtcggaacgattcggctgagcaataaaaagcttcagatcctcaagaaagtcgtggcagccctattcaaaaagaagtctgccatctacattatggagaacattttcgacctgtctccgtccaagttcaaaaaaagcttcaactcatcctactatttctacaacaaatacgcagaagatcagcttcaaaacaaattaagaggatatcggagttacatcgtgtcgctgattaagtacaatgaaaagcacgagtgtgttgataaaaattgcttgatcacagtgaagagcttagccaaagctctggaagagttcatattgtga

SEQ ID NO: 12299 - RNA, 1095 nt, synthetic construct
  source 1..1095: mol_type = other RNA
atgatcaacaacaagattcacgacgatttttttaagaacgcaattctgaagggcgacacatccctctatgacgactttagccaaagcgttattgaaaaacaggtggggccagatgtcttttttgaaatcaagaaagactctgatcactacaggatcaacgaacgcataactaaaatcgtcttgtctcaggtacctattaattcttctgcttgcggctttgtgcctaacaagagttattatgacttcctcaaaccccatatcaaaggttattactttctccgactcgatattaagaacttcttccattctatcccgaagaagtacgtggaggagcttttcaaacagtatttcagcgataagaagaatgagcagaaatattcatcccttgagttagctctcatggccgtgctgtacaaaaccaacatctttgatgacgaaaaggacaaaatagtgttgcccatagggtttcccagctcaccagtaatctccaacattctattccgtaagatagacattttgatccagaagttttgtgaggagaagaatatcatctattcaaggtatgccgatgacatgttattctcttccagcaaaagtaattacctgcacagtgaatatttcgagcgggaaattagtttctttctgtccacactggccctgaaacttaaaagacgcaaaaggaaagcgacggagaatacaatttccctgaatggatacgtgatacagaatgagaagccaaagaagcgctttctattcaatgtttacaaggaagagagagttggcaccattcggttgtcaaacaagaagatcaagattatcaagaagctgagcgcccatctcatcaaagggtcgtcccccgtggtcatcatggaaaatctgttcaacttaaacccttacaagttcaagaaaaagtacaactcgaacattcaattctacaacaaatacagccgggatcagctgcaaaacaaaataaagggataccgatcatatctcgtgagcctgattagattcaacgaaaaacacggttgtatcgataaaaagtgccttgagactgcaatcaaactggtcagtatcctggaggacaatattacctga

SEQ ID NO: 12300 - RNA, 1104 nt, synthetic construct
  source 1..1104: mol_type = other RNA
atgaaaaacaagatactgtcagacgactttttcaaaaacgccatcttaaaaggcaattcagctctcttcaatgaattcacccccagtgtcactgagagagaggttggtccagatgttttcttcgagatagaaaagaactccgagcacaggaagatcaatgaacgtatcaccaaattcatcctgagtcagattcccataaactcatcagcttgcggttttgtacaaggaaagtcctactttgatttcctgaatccccatattaaagggtatttttttctgaggctcgacatcaagaaattttttcactctatacctgcaagcgaggtcaagagcctctttaaggtgtacttttccaatacgaagaaagaggaaaagtattcggcccttgacatcgctttgatggcagtgctgcacaagactagcaagtctctgtccgactcagagctaagagacaaggaaattttacctataggatttagctcaagcccggttatttccaatataattttccgaaaggtggatatccttatccaaaagtattgtgaggacaaaaacatcgaatacagtcgctatgctgatgatctcctcttcagcagtgcgaaaagcaactttatccatggggaacagtttgagcgggaaatttctatttttatctccacactgtccctgagactgaaaaaaagtaagcggaccgcaagtgagaatacaatcagcctgaatgggtacgtcatccagaacaccaaacagaagaagcttttcaacatgttcttctacaaagatgccccaattggcactattcgggtgtctaataagaagaccaagatcatcaagaagatgacagccttgctgcgccagggcaaatctcctatctacatcatggagaatgtattcaatctcaaccgaaaatctttcaagcccaaatataccaacaattacacgttctacaaccgctatgccacagaccagttgcagaacaaaatcaaaggatataggtcctacttggtgtcgattattaagttcaacgaaaagtacaagtccattgatgagaagtttctaaagagcgccaaaaaactggtgaaagagcttgaagactctattccatga

SEQ ID NO: 12301 - RNA, 1098 nt, synthetic construct
  source 1..1098: mol_type = other RNA
atgaagaagatcaataacgagttcttcaaaggggccattcttaaaaataatgaggctctctttgacgaatttaaaccttcgatctcagagtttaggattgggggagataacttctttaagattagccctaatacacctcaccacgacatctctgaaagaattaccaaaatcgtcttctcccaggtggaaattaattcatctgcctgcggcttcgttcagggtaaatcatacttcgattttctgaaaccgcatatccacggctattacttcctgcgactcgacataaagaaattcttccactcaatcaagatcagcgatgtttctgcactgctggaagactgcttttccaatgagaagggaaagttcaaatacagtccctacgacattgccttaatgtccgtgacccataaagtttccagcaatttcagcgatataaagctgagggaaaaagacattttacccattggactgccatctagtccagtcatctcaaacattatttttaggagagtggacattctgattcaaaagtactgcgaaaacaagaaaatcacttactccagatatgcagacgatctgctattttctagcctcaacagtaactttatccattcggagaattttgagcgggagatttccttttttctaagctgtctgagtttgcgcctcaaccacaaaaaacgtaaggcgtgcgagaatacaatctcactgaacggttacgtgataaaaaattctaagcccaagaagttggacttcttcaatatccacaaagaagatcccgtaggcaagataagtctgagcaacaaaaagcttaagatcatcaagaagatcatccatcaccttaagaaggggagctctgccattacgatcatggaggagctcttttatctgaacttcaataagaaccggtccaaattttataactactatggcttctaccagaaatacgctgaggatcaactgcagaataaactcaagggctatcgaagctatttattgtccttggtaatattccatcagaaaaacaagtgtgtggatgaactctgtcttcgcactgtcaaaaagatgatcaaggacataaacaagaagatagtgtga

SEQ ID NO: 12302 - RNA, 1098 nt, synthetic construct
  source 1..1098: mol_type = other RNA
atgaagaaaatcagtaatgagtttttccagagtgctatactgaagggaaactccgccattctggacgacttctcgcctagcgtcgtggagcagaatgtggccaacaatacattcttcactatccggtcagatacagctcacaaaagcatcaatgagagaattacgaagatcgtatttagcaaaatcccaataaacacatcagcttgtgggtttgtttcaggcaaatcttattatgacttcctatccccgcacgtgtactcttactattatctccgcctggacataaaacaattctttcacagtatcccaatctctgaggtcaagaaactgttggaagataactttaccaaggataaagggacttttaaatactccccctatgaaattgcattcatggcccttacccatagggtgagcaagaacagctctaataaggagttgatcaataaggacctgctgcccattggattttcttcgtctcctgtgatatccaatattctctttcgcaagatcgatattctcattcaaaagtactgcgagaacaagaagattaaatatactcggtacgcagacgatttactgttcagtacccttaattcaaagtttgtacactctgagcagtttgaaaaagagatcagtatcttggtcagcaccctggggttaaaattgaacaacaagaagagaaaagcctgcgaaaatactattagcctgaatggctacgtgattcagaatacaaagcctaaagaaatgaccttcttctccgttcgaaaagatgacccagtcggtacgatacgtctctccaacaagaagctcaagatcattaagaaactcatcgcagcgatcggcaaaaatattccctccgtgaccataatggaagatctgtttggcatgaactttgacaagttcaggggcaagcatttcaacaacctcatgttcttcaacaaatatgtggaggatcagctgcagaataaactaaaaggatacaggtcataccttattagcctgattcagtacgacaagcgggttggtcatgttgacgtcgattgtcttgaatccgtgatcgagctgatcaacaagatcaacaagtacatcaagtga

SEQ ID NO: 12303 - RNA, 1104 nt, synthetic construct
  source 1..1104: mol_type = other RNA
atgaacgagatgaacaaggacttttttattaacgccatccttaacaaggatgaaaccttgctgaatactttcaaaccatcagtggtcgagcaccaagttggcgatgattttttctttgagatccaagatcgtactcctcataagaatatcaacaaacggattaccaacattatcctgtctcaaattcctctgaactcctccgcatgcgggttcatcagaagtaaaagttactacgacttcttacagccgcacgtgaccggctactactttctaagactcgacatcaagaattttttccacacgatagattcagatctcattgacgatctgctgctttcactgttttctgacgagaagaaagggtcggacacattgtccccttttgatattgcctcattagtcgttacacataaggttagcgaaagttgcagctgtgagctaataaatggaaaaaggattctccccattggctttcctagctctccagtaatatcgaacatcatattccgcaaaatcgacttgatcatacagaagttctgtgatgacaagcggataaaatatactcggtatgcagatgacttactgttctccagccccgacaataagttcattcactctgaacagttcgaaaaagagatttctatcttcgtcgcgatccttaacctgaagctcaacaagaagaaaaagatcgcttgtgaaaatacgatcagtctgaatggatacgtaattcagaatgagaaaggtaagaaaactcgacatctccatgtgtataaggaagagccaattggaaccatcagacttagcattaagaaaacaaagatcatccagaagatggtgtatctgctggacaaaaaaattgctcccgtgacaattgtgagcaagctcttcaagatcaattaccatacccacaaatttaagtacaggcgcaacctggaatttttcaagaaatatgccgacgatcagctccagaataagttgaaaggttataggtcttatctgttgtccatcatcaactataacaagattaagccctgcgtctccaccgagcacatcgataaatacctgtaccttgtggacaagataaatagctacatcaaagagtga

SEQ ID NO: 12304 - RNA, 1101 nt, synthetic construct
  source 1..1101: mol_type = other RNA
atgaaactaattacgaatgaggtgttctccaagacaattcttaaaggcaagagcgagctttttgatacatttacccccctgtcgactgaacgacagatcgggaaggaggtgtgctgtatcataccagacagtactgaccataaggtaattaacaacagtctgacgaagattgttttttcacggatacctctgaataattccgcatacgggtttgtcccgaatagatcatatctggactttctcaccccacacgtcaaaaactattatttcctgaggttggacatcaaaaagttcttctactcaatcgacattagccttatcaagaaactcgtgcaatctctctttagtcaggataaggaaggcaaaaaacactcaccttacgatgttgtgatggaggctattacccacaaaacatccagcgactttcccattgctgaaatacgcaataggcaagtactgcccatcggatatccctcttccccagtgatctctaacatcctcttccgtcctattgatatcttgattcagaagtactgtgagggcaagaagataacctatactcgctacgccgatgacatgctgttttctggaaataccaaacggattttgcacggggagaatttcgaaacagaaatcagcatactccttgcgacaatcggtctaaagataaacaataagaagactatcgcctgcgaaaacactatctctttgaacggctatgtcattcaaaatatcaaacctaccgttaacgagttcctgtctcagtattacgaaaccagtatcggtcatattcatatcagcaacaaaaagactcagttaatctgtaaagtgatccatagtctgcggaagaaagaaagcccagagaatatcatggccacacactttggaaaaacctacaacaagcacaaattcaagtacaccaaggattactccttctacataaagtatgccgacatgcagctgcagaataaattaaagggctatagatccttcctcatttccctgatcaagcacaacaaaaagaacaactgcattagcgataaaaacattgagaagtactcaaatctggcaagggagatcgagagacatattaagaattga

SEQ ID NO: 12305 - RNA, 1098 nt, synthetic construct
  source 1..1098: mol_type = other RNA
atgaagctgataaataacgagattttcatccgtacgatactgaagggcaacaccgatctttttaatacattcgttccaacttctgcagaatgccagatcggtaaagaattctgttgcgtcattagtgattctacaaaccataaggccatcaatcacgccctcactaagataatcttctctagaatcccccttaattcctctgcgtgtggctttgtgaagaataaatcctacttagacttcctgacaccccatatcaaaaattactatttcctgcgcctcgatataaagaagtttttttacagcatcgacgtatccttggttgaaaacttggctaaatcgctgttttcacaggacaaagagggaaacaaatttagcccatataacatcgtgatggatgcaattacccataaggcctcagccagttttcccattactgagctgaggaacaagcaagtgctgccaatagggtacccctcatcccctgtcataagcaatatcatcttccgccctatcgatattctgatccagaaatactgtgagggcaaaaacatcatttatacaaggtatgctgacgatatgctcttcagtgctaacacaaaacgggtgttacacgaccggagcttccagaccgaaattgctattctgctgtccactatcaacctaaagatcaataagactaagaccattgcctgcgaaaataccatttccctcaatggttatgtgattcagaatgaacggcctattttcagaaagagccctcaccaaaactacgagcaaccaaccggacacattagaatcagcaacaaaaaaacggagatcattcataagatcttgcactcgttgcgagagaaggagtccccgagcaccatcatgaaaaagcactttgggaagtcatacgacaaccacaaatttatctacaagaaggactatgccttcttcatcaagtatatagagacacagctccagaataaacttaagggataccgatcttttcttataagtctaatccagcacgataagaagaacttttgcattgcagacgaacatattgagaaatactctaaactgaccaaagaaatcgagaggtatattatttga

SEQ ID NO: 12306 - RNA, 1050 nt, synthetic construct
  source 1..1050: mol_type = other RNA
atgtttgatgactccatctttaatcgcatcatactccaaaatcacctttcacttaggaaggattttcaccccaaagtgatcgggatcaagatcaacaagaatctgtacttctctattaacagcgatatccatagggacatcaataagcgcattgtgaactatattttgtcagacatccctgtgaatagttcggcatgtgcgtacataaaaggaaagtcctacttagatttcctcagtccccactgcaaaaattgctactttcttcgtctggatattaaaaacttcttccatagcttcccagagcgaattctcgatgaattcctgttgtcactctttaataacgaaaagcccaagggttctgatgaattatcctcttacgagcttgctagactggtgctgctctataaatgtgacgatgagtatagtgacgattccatcaaggggcgaagtattctgcctattggctttccatcctcaccgataatctctaatatactgttccggaaaatcgacattttgattgagaagtattgctatacacgcggcatcacttataccagatatgccgacgacatgctgttctcctccaaaagctccgggtttttgctaaaatccgagtttgaacgtgaaatgagcttccttataagcctcctgggatttcgcctgaataacaacaagaccataagaagttcaaacgagctgtctctaaacggctacgtcatctacaactacatggaaaataatcggtctggcatccggctgagcaataaaaagctgtcaattattcggaaggtcatctactacaagaaaaacaagatgagcaacgacttcataatgagaaggttattcaacatccacatcaacaacttcaagttcaagtatggaaaacacgagagttttttcgaaaaatactgcgaggaccagattcagcataaaattaggggctttaggtctttcctcctgagcttttcgaactatagcaaggagaattacggtgtttgtgaggagtatatcgaactggtaaatgaattggagaagtacattatctga

SEQ ID NO: 12307 - RNA, 1095 nt, synthetic construct
  source 1..1095: mol_type = other RNA
atgaagaagatcagtcgtgatgatttcgttaaagacattctgggcctcagcgtctccacctctttggatagccctacactttctgtaaagtaccacaagatcaaatcacaagatacatacagcatcgtggaacagacccttcattattatgcaaataaagccatcaacgacaacatcctgtcaaaaatatccgtgaactccagtgcgaagggattcgtcaaaggcaagagttatctcgacttcctgagcgagcacaaggacggttactactttctcagactggatattaagaagttctttccaagcatctcacagacggatatcaggaacgttctaagtcagtatctttcgtacaagattaacaagaaagacaagatttcgactctggactacgcaatgaatgtgattactcaccgcgttgaccctaaatctgctccgtttctgcctgtcgggttctccagtagccccaccctcagcaatatcattttcaggaagatcgatattctgatagaaaagttatgcttggacaaaaatgtcaagtacacacgatacgccgatgacctactgttttcatcttcaaataatcccgagatcctggatgacaagtttataaacgagatttccaagctggtcagcattctgtccctaaaattgaacgtgaagaaaacaaaacggaaaaaagggctgatatctctcaatggatatgtaatctgcaacaaaagccccgaccagccatggttatttagcaaaaagaagaggtacttcactggaaatctttgggtgtcaaacaaaaagaccaagaacttctctaagttgatctatttgatggaaaagggctattcctctgattacatcgccaataaagtgctgaaaattactcccaacaataaccatgtgttttatggtgtgaatgtggatttctataccaagtactgtaacgaccaagtgctcaataaagctagagggtatcggtcttttctgttatcccttataatctacgacaccaagaataaatgtgttgaggagaactacatcaacaaatattccaagctcgtaaatcgcctggatctcgtgattgacaagtacacgagttga

SEQ ID NO: 12308 - RNA, 1128 nt, synthetic construct
  source 1..1128: mol_type = other RNA
atgtcaatgtgttctatgtgtcatacagtgaacttttgcttctgtataaaagacaaagcctattacatgagcaaatacattgagcggaagatcggccctagccttaccagtaaactgttgagtaacatcgatcggaacgtagtgagcgagcttaaagtagggaaagattatacctattccatgctgactgattcacacctagaagtcattaataaggaactggtggagaacctgttttcccacattcccttgaataattcatgtgtaggcttcgtgaagaagaaaagttatcttgatctgctggaaccccataggtactcgaaaaagtttacccgattggatatttcaagcttttttcactccatcagtatctctgacgttaaagctagcctgaccccatacgtgaatccgctgtttctggacaaagagaagaaaatctccaccctggagaagattattgagtgtatcacatatgacgtccctctgacctcctccaatacaattttccgcggaaagaaaatcctccccatggggttcagctccagcccagtgatttcgaacgttgtgttcagaaagattgacatacagatccagaagtactgcatcgaaaacaagatcatatatacgcggtatgccgacgacatgctcttctcctctaacaaagaactagtttctcaagtggaattcatcaacaagatccagtctctcgtgtctcagttgtcattacgcataaatgaacgcaaaactatcactacaagcggacatatcagcctgaatggttacgtcattgatggttcttccggcactattaggctctctaacaagaagctgtctcgaatcaataagatcacccaccagctcctggttagaagtaaaagtccttccagcgtcgctaagaaattatatgggtactcaattagccagtataacttcaagtactcatactccaaggagtttttcgagcagttctgcaaagaccaacttcacaataagatagcgggaaatcgtgcatacctcatcagcgtgttaaagtttaatgacaggtacgagtgcatatgcccagattacctgaagaagagtaaggtcatgcttgataggctcaacgagattttggacaactggagatga

SEQ ID NO: 12309 - RNA, 1062 nt, synthetic construct
  source 1..1062: mol_type = other RNA
atgtccaaatacaacgagagaaaaataggtccttccctgatctcaaaactgctggcagacgtggaccataacgtgatatcagaagctaaggtgggcaaggatttcacatacagtatgctcacaaattcggacctggaggtcctgaataaagagcttgtgagcgactttttcagcaagattccactttctaactcctgtgttggatttgtcaagaataagtcttacctggatctcttagagccccacaggttttcaaatcatttcaccagacttgatatctcctcgttcttccatagcatcagtattgacgatgtgaaatctagcctgtctccttacgttaaaccggaattccttgatgaggacaagtctataagcagtattgagaaggtgatcgactgcatcacttatagcgtgcctaccacatcagaaaatgtcaaaagcaggggtaagaaaattctgccaatggggttttcaagcagtcccgtagtctccaacattgtgtttcgccggatcgatatccagatccagaagtactgcattgagaataacatcatctataccagatacgccgatgatatgttgttttccagtaccaatgaactggtgataaaggttgagttcgtgaataagattaagagtttggtcgctcagctgtcactcaagattaacgaaatgaaaactatcaccacttctgggcacgtgtcattaaacgggtatgtaattgacggcgttaatggaacaattcggctatccaacaataagctcagcaggataaacaagattacgcaccaactgctggtacgtcgcaaaccacccgagtatgtcgccaagaaattgtatggctactccatcagcaaattcaaatttcgctacggattttctaaggatttctttgaccagtactgcaaggaccaactccacaacaagattgcgggcaaccgatcttacttgatctccctaatcaagtataatgaacgacaccagtgtatgtgtcccatctatttctccaagagtaaactcatgttagaccggctcaacaacatactggataattggaaatga

SEQ ID NO: 12310 - RNA, 1062 nt, synthetic construct
  source 1..1062: mol_type = other RNA
atgagcaaatattccgacattaaaatctcccctagtcttaactctaaactgttggcaaacgtggacaggaatgtagtgtctgagattaaagtgggaaaggactatacgtattctattatggccggctcgaatctagatgtgctgaacagggaattagcatccgatttcttttctaagatcccgctcaacaacagctgtgtcggatttgttaagaataagtcatacctggatcttctcgagccacatcggttcagtacaaaatttaccagactggacattagttccttcttccattcaatcagcatagaggacgttaagctttcaattgaaccttacgtgaagcccaagttcctggataatgacaaaaccttgctgagcatagacaagatcatcgagtacattacttacgatgtccctcagaaatctaagaatgtcaagttcagaggcaaaacaatattacccatggggttttcctcctcacccattatcagtaatatagtgtttcgcaagatcgatatccagatacacaaatactgcaacgacaataacatcatctataccagatatgctgatgacatgttgttctcatcaaataatgagattgtggggcaacgtatttttatcaacaagattcggagcctggtgtctcagatcagtctaaagatcaacgagcggaaaacaattactactagcgatcacatctctctcaatggatatgttatcgatggtgcttccggcacaatacgcctcagtaacaagaagctcaacaaaatcaacaagattacccaccagctgctggtccgagacaggagcccagccgtggttgcgaagaagctgtatgggtattccatatccaagtacgactttaaattcggttactcgcaggaatttttcgaacaatactgcaaagaccagctccacaataaaatcgccggcaataggagctacttgattagcgtcctgaaattcaacgagcagcatgattgcatctgtccagaatacgtagtgaaatctaagattatgctggaccgattaaacaagatccttgataattggcgctga

SEQ ID NO: 12311 - RNA, 1071 nt, synthetic construct
  source 1..1071: mol_type = other RNA
atgaataaaaccaaagtgatcacgttacagtcggaacacaaagtgcttctttgtgaggatgccaatccggatgacatttcaagtatattctatttggggaagctggcgttcaagattaaagccaactgctttagagagcaaatcgctatttacattagcaactctatccaggatgtgatcccaataaattctgcagcaactggctttatcaagagaaagagctacctggacttcctcagtcctcaccggcgctcaagtttctttataaggcttgacgtcaaggatttcttccactccatcaaagaagaggatatcaagaaaagtctgtcgaactatattgttccgtcccatattatgattgaggacaagaagactccaacaatcgaccagcttataaagtacatcatgcatgagatccctgatgactttcctgacaagaacctgaaaggaaagaagatactccctattgggttcccatcatctccctctatctccaacctggtatttcgtaagattgacattttgatcagcaagtattgccagcatgaaaacattatgtatactcgatatgctgatgatctcttattctcttccaaaaagaagctgccccccgagctcgagaataagatttcagagtatctgagcatcctctctctaaaacaaaacaacaaaaagaccctgtgtacaaaaagccacatatccatcaatggctatgtgatcgacggagaaacaaattccattaggctcagtaatcataagttgcagcgcattaacaaactgacccacgccatcattaatcggaaagatagccccaaagaaataatgaaggtcatgtacggtaagactttctcccagtatccctttaattacccaaaaggcaagaggaacttttacatcaagtactgtattgaccagatcaataacaaactgaaaggttacagaagctacttgctgtccatcattaaatacaacaagagcgagattatcatcacctcaacctataaggaaaagctaatgacagttataacgcggatagaaaagtgcatcgacatctacaataaactgaaatga

SEQ ID NO: 12312 - RNA, 1143 nt, synthetic construct
  source 1..1143: mol_type = other RNA
atgctcactgctagtaaacttccctctcatataaccagggtcagctgcggcctgcaagtgacatgcgaaagcttgttctgtatcggctcagacatgaaaaccaacaaaatcaagctgccagcaagtttgggggcttttctgaatgaaaactctgacaccgcagtgaaagagcggaagattaaaggtaactatttttacagcgtggatgattccgtgctggataagcaccagacgctggctaagattctgtccgaggcaatcccaaagaatagtgccagcaagggcttctccgccgattgctcatatctcgatttcctgaaaccccacacccctagccgctttttcctgcgcatggatatctcgtcttttttccactctatccccgtagaacagatcgccaataagctgaaaccttactttgacaacaatgcggacaacgaatctcacgccgtgtccgtcgactccattctcaaaaaagtgacatataaggtgccagaaaccagctctaacaagaaaattctaggagagacgattttaccgatgggatttccatgcagtcctactctgagcaatcttttttttagacccctcgacatcgtcattcagtcatactgtcttgaacacgatgttatctacactagatatgccgatgacatgttgtttagcagcaaatataatcagaccatcggctcaggggacgtggagactttcattaaacgtctcatgaataagaactccctcttgatcaatacaaaaaagacactgtacaccgaagggcatatatcactaaacgggtacgttatcgactctaatggtggctgtatacggttatccaattcgaagctgctgacaattaacaagttaaccaagatgctcattgttcagaaggtcagcctgcggcatgttgcggagtccctgttcgggatgaacataagaaaccttccttatgagaacgccaacactaatgctttcttcgaaaagaaatgtaggaagatcgtcctagacaaagtgcgaggtttccgctctcatattatcggagtgaagaagcacggaatcgcaacaagttcaatatccgccgagagtgtaaagaagtacgagaagattatcgagaggttggagaaaattatacttcaacatggctga

SEQ ID NO: 12313 - RNA, 1056 nt, synthetic construct
  source 1..1056: mol_type = other RNA
atgaaaattacaaagattgccctgtccgatgaccttagagcattcctgacaaatgatgacgtgcaactggtacgcgaaatgaagatcaaaaaggatttcttctaccacctggaaagcgaggaaacggctaggtaccacaagaagattgagatcctcataagtaagtacattcctgtgagccgatcaagctatggatttgtcaaaggtaagtcatactttgacttcttatctccgcatttggatagcaaatacttttcccgtctagacataaaaaagttcttccactccataagcgcggacgatttgtcaaaaaagttgaaaccctacttcgttgataaacttgataaagactccaatgttcgacttatcgatttaattctcaagaagctgacttatgaagtgccagcaaacagtaagaaccagtactttatcggtaaaaagattctgcctatagggtttccatgcagccccattatttctaatctggtactgaggcccattgacattcagatcgaaaaaatctgtaaggaacataacgtcatctataccaggtatgctgacgacatgctcttctctagtaaatacatgctttcactgtttaacggggagattaaaaactccgtgaatcgcattatctcacacattgggctaaccctgaacgaatccaagaccgttattaccagcggccatatatccttaaacggatatgtgatcgatggcactaccaatactctgcgcgtgtctaatgagaagacaatgaagctgaagaagactatccggctgatcatccttaaaaaagagcggtttagtgctatcgcctgtaaatactacggattgaatatcaagaacctcagataccacaatgccaatacagacaaatatttcgagacgtattgcaagaacatagtcctgaataagctcagtggctatagagcctatttcatctcgattctcaagtttgattctgagcataatgtgttggatgagaagagcataatcaaatataacctcatcatctctgacctggacaagatcctaaacgagtaccggaactga

SEQ ID NO: 12314 - RNA, 1035 nt, synthetic construct
  source 1..1035: mol_type = other RNA
atgaaactatcacagaaagaggtattaaacgcactcaaggtgcaaagcatcgatgacatcaagaagatatccaacgaattttcctttaaggacggcttctatattcccgagtcgatggaatataagatcctgtctaagaacctgtcagtgatctttagcaagcttcctctgtcttctgctgccaaggcctacaggaaaaagcactcatactatgatttctttaggccccatctcgaaggagagcactttcttcggttggatataaaagccttcttcaacagcattactagtgagcatctcgaggggtttctcatatctcacctgaaaggaaagaatgcgtatgagataaaaatgctcgcaagagctatcagttttttccttaccgtgaaagttgacaaaaagcaaatcctgccaatcgggttcccagccagcccttccattgcaaacttgatttttcgtcccctggacatcacaatagaaaagctgtgtcataacaagaagattatctactccagatactccgatgaccttctgttctccagcgctagcgggagtgtcattcactccagctggttcgagagtcagatctcttacattatttccaaattggacatgcgcctgaatacctcaaagcgaatcgctacgagcaaagaaatatcgctgaatggatatgttctctatggtgaggaaaataacaagaaaatccggttcagcaatcagagactgagaattctgaaaaagctcatccactacaagaaagtccgcaatcttccggaccgagtgattgccaagaaactcttccaggacgaagtgaggatcttggatagttcactgaggttcaacaagaagtctgaattcctagatacattttgccgcgaccaggtgattaataaattgcggggctaccgttcatacttaatctctctgctgaaatacgacaatctatatagttgtgtcgatcgggagtacaagatttacatctgcgatttaattggcgagctgaactctatcatcttttcctatgatcgcggttga

SEQ ID NO: 12315 - RNA, 1029 nt, synthetic construct
  source 1..1029: mol_type = other RNA
atgaaactttctcagaaagagattttcaaggctctagaagtgaagagtatagaggatattaagaagatcagttctgactttgccttcaagaatgggttttacattccacgctcccccgaatataaaacatcaagtgaaaacctgaacgttctgtttagcaaattgcctctgagctcagtcgcaaaggcataccgaaaaaaacacagctactttgatttcttccgtccccatctcgacggggaacatttcctgcgtctggatgtgaaggcatttttcaactcgataaagcgggagcaaatcgagatttttctgatttctcatttgcggggcaaaaatgcctatgaagtgaaagtcctcgcgaaggcaatcagtttctttcttactgtggaggttgacaagcagagggtactacctatcgggtttccagccagtcccgccatcgcgaacctagtgtttcgaccgctggacattgctattgagaagttatgtcacgagaaaaagatcatctattccaggtatagcgacgattttctgttctccagcgctagcaatagcatcatacactctaactggttcgagtctcaaatctcctacataattagcaagttggatatgcggttgaataatggcaagagaattaccacctcaggcgctatctcccttaacggatacgtgatctcaggtgaggaaaataacaagaagttaagcttctctaacctcagactgaaaacgctgaaaaaattaatccacttcaagaagatccgcaagctttctgacaaaatgatagccaaaaagctgttccaggacaatctgaagaacctcaatttgaaatactccgatgaaaagtcattcatcgataaattttgccgcgatcaggtcattaacaaactgagaggttacaggtcctatctgatatcacttctcaattacgacaacctctattcctgtgtagattccgcccatcggagacacatttgcatcctgatcgaggacctcaattcgattattctcagttatgacaggggatga

SEQ ID NO: 12316 - RNA, 1035 nt, synthetic construct
  source 1..1035: mol_type = other RNA
atgaaactctcacagaaagaaatcttcaaggccttgcaagtcgagagcatcgacgacattaagaacatatcaagcgatttcagcttcaaggggggattttacattcctaacgacctcaaatacaagaccagttcccagaacctctcgaaattattcagcaagttgcctttgagctcagcagccaaagcctaccggaaaaaccattcatatttcgacttctttaggccacatctcggcgggaagtactttctgagattagacattaaggccttctttaactctattaagcgagaacagattgaggatttcctaatctctcacctgaaaggtaaaaatgcgtatgagatcaagtttctcgccaaaaggatcagtttttttctgactgtggaggctgataaagatcagattctacctattggtttccccgcttcaccagctatcgcaaatcttgtgtttcggcccctggatatcgctattgagaagctgtgtcaggagaagaaaatcatttactctcgatactcagatgacctcatgttcagttcggagaacagttccacgattcattccaactggtttgaatcccagatctcctatataatctctaagcttgacatgcggctaaataccaggaagcgtattgcaaccacagataccatatccctgaatggctatgtgatttctggcgaatctcccaataaaaagatcagcttcagcaaccagcgcctcagaatactgaagaaactgatccactacaagaaagttagaaagttgccggacaaggtcatagccaagaagctgtttcaggacaatctgaaatcccttgattcctccctcaagttcgcgaagaaagagagttttcttgatacattttgccgggatcaagtgatcaataaattacgcggattcaggtcttatctgatatcactgctgaattacgacgacctgtatagctgcgtacaaagcgaacaccgcgaacacatcagtagcttgacagaagagcttaacactatcatcctgtcttatgacagagggtga

SEQ ID NO: 12317 - RNA, 1026 nt, synthetic construct
  source 1..1026: mol_type = other RNA
atgaagaagatttcagtggcagagattttgacaagcctgggagtaaaaagcatagctgaaattgaccagatcccaaaggatcacagactcgttagtagctatcatgtggccggatcctctgcatacctggcagcctcaaaaagtatcgggcagctgatttcaagattaccgctaaatagcagctcggtggcctacaggaaagggctgtcttattttgatttctttcggccccatcttaaggggaaatacttccttcgtctggacatcaagtctttctttcacagcataacaatcgactccattatcagaacatttgattcccacatcaagggtagtaaacgacgggagaagagtgaactgaccaggaaactcactgactttttgaccattgaattcgagggcaaaaagattctccctatcggctttccagcttcaccccaggtggcgaatctcgttttcaggcccctggatatccaaatcgagaaactgtgtctcgaaaagggtgtctcctatacacgctacgccgacgaccttctgttctcctcccagtctgaaaaggtcatccattctacgtggtttgagtccaccattagcagtattatttcacagcaggagttgaagctaaacaacagtaagaagataaagactaagggcaaaatcagcctgaacggatacttaatctctggctcagactacaagaaaatcagcttctcgaataaaaggcttactgtagttcggaagctactctatttcaagaacaagaaaaactacgatgacctgagcatcatgcggcgcctctttcctaccgatcttaaaaatctgcatcttgtgcaccctaacaaaaatgaatttctgaaagtgttcgctcaatctcaaatactgcagaagttgaagggattccgctcatatttgctgtccatagtgaattacggcgaaaaatataattgcattgagcagtctcaccgaatcgtcctgctcgagctcatatccaatctgaacgatgtcattttaaagtatgagaactga

SEQ ID NO: 12318 - RNA, 1029 nt, synthetic construct
  source 1..1029: mol_type = other RNA
atgagtaagatcagtatactggaagtgctgagctctctgaatgtggagtccattcaggatatcgacaaaatccccaagaacagtaaacttaagagcggctatcatattccagataatggtgcctatagcgaggccagtagcgctttgggtgagttgctgtcaaagctcccgctgaataactcatcagtggcgtacaggaagggatactcctactttgacttctttcgccctcacatcaaaagcaattacttcttgagactagacatcaaaagttttttccactccatcagcaaatccgtgattgagcaaactatagagtctcatttgcggagctcaaaagaactggataaatccctcctagcaaggaaggtcagcgaattcctcacgattaaatatgacaaagtcgacattttgcccattgggtttcccgcatcaccaagggtggccaatctcatattccggcctctggatattcagatcgagaaaatctgtcttgagtctggcattatttattctagatactccgacgatctgcttttttcctctatcaacgacaaaaccattaagagtaattggttcgaaagtcagatctcgtatgtaatctcccaactcaacatgaagcttaacaacaaaaagaccataaagaccaagaatcagatctcgctgaatgggtatgttatctcaggctccgaaaataacaagtacatgtccttcagcaacgaacgtctcaaactgatccggaaactcatttacttaaagaaggtgaagaagatctctgacttctcaataatgcgcaagctgttttttaccgaaatcagcaacctcaaactgatctatcataacaaggctgagtttacacaggtatacgccaaatctcaagtcgagaataagcttaagggcttccgatcttacctactgagcctggttaattatggagatagatacgattgcgttcagttagagcacaagaagatgctgattaacttaattgaagagctgaacctgcttatattccagtacaataactga

SEQ ID NO: 12319 - RNA, 1071 nt, synthetic construct
  source 1..1071: mol_type = other RNA
atgaaaaccattaccaaaaagtacttcatggagaacattctaaactctaacccccctggggatatccctgacaattcaattcaggaagttaggattggcaaagactttgcatattcgattgacaagaaattcgagtcctacagtatcaataaacgcctgacaagtctggtatttaacaaagtcccactgaatgattccgctgtggccttcaggcaagggatgagctactatgactttatgtttccccacaagaataattacaagttcctccgattggatgtcaaaagctatttccattcactgagaatacgggcaataaggaactgccttaaacattacttcatgggatctaggctgaccaataatacgacgatggtggaccaggcgctgaaatattgtacatacactatccccaccgatagcaaaaacgtgaagttctccgaaaaagttgttttacctataggtttcccatcctctccggtaatctcaaatatcatttttcgtcagctggacatagagattcagaaaatctgctacaaacacgagatcatatatacacgctacgccgatgatatgttgtttagcgctaagaagagcaatatttacatccacaacgccctttttgaggaggaaatctctagattactccagcggctatccctcaaactcaacaataagaagactctgaagaagaatcatacactgagccttaatgggaatgtcatagcctttggcaaagctggaggttcgttaagattgtccaacaagaaagtgaagttgattaacaaggtgacttatctggccctggtgaaggaagagagtgccgtgttcatcatgaataaactcttcaacgtgaacattaacaactacaactttcagttccagcaggacgaaattttcttcaagaaggtctgtatggaccaactttttaacaaagcagtcggctatcgctcatacctgctcagcatcatccaatttgacaagaagaacaattgcctggagactagataccgaaagaagtatagtaagatcattacccggctcgataagctgatcgatatctattcttga

SEQ ID NO: 12320 - RNA, 1029 nt, synthetic construct
  source 1..1029: mol_type = other RNA
atgaggatcaatagtaagttatacgatgatctggagaactacttcagcatgtctgtgaacgagttaacaattacgacctctttggaggcaaaagatcgggttgagatcttttctatcgaaaagaagaacaaggagaaaagagagatacacagtgtcgatacaaaaaccacgatgtggaaagtgcaaaatttcctgaacaataagtacttctaccagaataacttccctgagtatgtgtttggattcttgaaagggaagtcatactttggctttctccagtaccatgtctccaagaaaaacaccaataattttctgaagctcgacatcaagaatttttttggctccatcgacactgaggtgttgattgaagacattgtgaacgacttcgaagaggacacctataagaaggaagagctgaagatgctgttcaaagtggtcctgacatataaagatcaactcccacagggattccagacctcgccctatctgagcaactattatttcctgagggcagatctccggatcaagaagtactgcgacaagctcgattttaaatattcacgctatgccgatgacattattatctccaccctctcaaaaggggaaaaactgttcagtaagggcactgtttccatgatagaccggatcatagcggattttgacctgaagcttaataggagtaaaactcgagtggccaagcgtgaactggtcctgaatggtttcgtgatatcttccgaagtgaggctgagtcagagcaagctgaaagaacttcgcagagttttgttcatcatagagcacaaccagtgtaaaaattcagaccagcttttagacctaatcaattccgacaaaaagattaacagcaagaacaaaaagcgatactacagcactgaatatttgctaaagtacctctctggtattcgcgcctttcttatctcctcactaaagaacattagcacaaaaagcgattggtacaagacagcttctaaactgatcgtaagagtcgaggctgtaattcttaaaatgtactga

SEQ ID NO: 12321 - RNA, 1005 nt, synthetic construct
  source 1..1005: mol_type = other RNA
atgtataacttaagtgaccacatcgaacacgtttacaaaaagaacattagcgagctgattgaccagttagaactcgataagaagaacaatgtcgaggaattcaatataaacaagaacaacgggacgaaaagaaatatcaccatggttgtgggggattgcatcttgggccgactgcagtctttcctgtcagataattacttcaataaggttgagttccctatcaattccttcggatttagggagaactgctcttactttgatttcctcgatatccattgttcgagcgaggaaaaagacttccttaaattggaccttaaagacttcttctctagtattgacgctaagctcgtgtgcgaaaacctggccaaagattttgaacgcaatgtgaagaagcgggtgaaactggaggagttatttttcacagtgattaccttcaagggtaagataccacagggttttaagacaagcccctttatatcaaactactttttcgtgagggcagatctgcgttttcaaaaatactgtgacaagctcaactaccagtattcacggtatgcagacgacattatcatctctagcaatacaggcaaagacttttttgtagggaacactatcgccatcgctaaaaaaatcttggctgatttcaacctgaaactaaactccagcaagactaaatatgcgaagaatgagctcgtcctaaacggatatgtcattagtaatgagactagactgtctcagtccaagctgcgagaaattagaagggtactgtttattatggagtcatccgtgaatctggatgtcgcaaccgaccgcttgaatagtaagaagtacttcagctctaagattagcaaccggatcttcgatctcgagtatctgtttaattacctgtccggctatagatcctttcttatatcaagcatccagaagaaggagacaggaaaatggaaagacaccgcctccaagctcatcaaaaggattgaagcccagcttctgcgccaagaatga

SEQ ID NO: 12322 - RNA, 1029 nt, synthetic construct
  source 1..1029: mol_type = other RNA
atgttaagtatccatgagcatatcaaggataggttagaaattagcattgaggacttggtaaaggttatcaagtccgagaaacttaataacgtgtgcacctataatcttagcaagaaaggcaaggagagacaggtggtcgaggtcgataaggacactacactttactatgttcagaccatattgctcaagtttttttcctctatcaaccattttcccgagtacgtatttggcttccagaaacacaaatcctattacaaattcctggacatgcatactactggtaacgacgaaacgtatttcctcaaactggatatccagaattttttcaccagccttgacgctgaaaaactgcttaccaatctggtggcacaatttgagcaggtgacagccaaccagcctatagtcaaagagttactctatgccgcactcacatataataataagatcccgcaagggttcaagacttctccattcctgtccaattactacttttttatagccgatttgcgaatcaagaagtactgcgataaacttaacatcaagtactcaaggtatgcggatgacatgatcttttcatcccactttaagaaaaacatctactctaaccgtaccattaaagctttcgaaatcattctgttcgatttcaatctcaagctgaataagagcaagacgaagctgtctaagaaagaactgtgtctgaatggatacgtggtgtcgaacgaagtgaaactgagtatgaacaaattgaaggagttgaagagaatactattcattatcgagcaaaacaagcaaaaacagaccaaggacctgctgatttcaataaacaatcacacttatctccacagtagcaggaagaagaacacacgctactttagtgaagagtacctgaaaaattacctgtctgggtatcggtcattcctgctcagcttcattaaggaaaacacacaccagaaaaaatggcgggaaatctccaaaaagattattctccgcatcgagaaagccctactgattctctatgacctacagtga

SEQ ID NO: 12323 - RNA, 990 nt, synthetic construct
  source 1..990: mol_type = other RNA
atggacattttttctaagaagcagtttgaacacctgttgaatattgatattgagaatgacacacagaagatcattgaagagaagaacaacatcaagaacatcgagatcgtggtgaacaacaagactaggaatattctgcgtctacccacatcaagtcttatacgcagcactcagaagaagatccagcataccatattgtccgacgaatattatccggattgcgtgtgtggatacgtgaagaaaaagagctactttgactttctgaaacctcattgtgataaaaagtacttcctgaggatcgacatcaaagatttcttcgacagtatttccagcgagaaactcactattctcttggccgagaaaatcaggatcaacgacccaaaagagcgaaaggagatcatggacttcctactcaatatcctgttcgttaacaaaaagttacctcaaggcttctctacgtcgcccgctctttctaatctgttttttaagcgggccgacctgcgcattgagaaatactgtatgacacagaagattacctatacccggtatgtcgatgatttgctgttttcctctaatcaaaacaatctgatcgggaccaaaatactgacgacaattaagtacatctgcaaggattttggcctggagatcaactacaaaaagataaagcgcggtatcgataccttctctttaaatgggttcgtcattgataactcagaaattagactttcccggaaaaagttggcgtacctcaaagaagtattattcttcctggaccacaattgccacaaagacaaccttgacatactaatttccaaagaattcggatccaagttttactatactgagaacattctcagctttctgtcaggctatcgagcattcctgatcagcagcctgagtagtaatccatcaacatggaatgataagtgcagacttctgatcaacagaatagaaaaactcaccatcatactcagcaaaaagatcctctga

SEQ ID NO: 12324 - RNA, 1005 nt, synthetic construct
  source 1..1005: mol_type = other RNA
atgcaaatttttatctacaaggaggagtacttctatgataaaattttgtcgagcagcaaggcattaatcgaagaaaccattaaggacaaagacaaattctacagggagaagaaaatccctaaaaaaaacggtgacaggacactgttctgtcttaagaaagactgccccctatctaaagttcagcagaacattcggatgaacttcttgaacaaaattagtattcccgactatgtgtacggatttgtaccgaatcactcctataaagatttcttactgccccatactaataagaagtactacatccgactcgacatcaagaatttcttcgattctatcaactcggaaatactctctgagatcttttcctactactttcaagtgaaagacgtggtaaatgatgttctgctgcgacagttcatcgaactcgtgacactgaatgatagagtgcctcagggggccattaccagcccaattatttccaatatcatatttcgccagctggatctcaggatacggaaatattgcgcgaagtttaacatcacctatacaagatatgccgacgacttgctgttttcctcagataacccatatctgcacaaggacttcttcatcaagaagataaagtatatcgtcagtacgaaaggctttcaattaaataaggggaaggttagatacgacaaagatttcatcagcctgaacggctttgtcgtggaaaaaaatatccgtctgtcccggaaaaagttgaagaacatttcaaacactctgtttatccttgaacgctacaagaataagttcaacctgaacattgtcctcgccgagatcaataagatgcagttgaagaaggagatcagctcaattagtgagcttatcaattaccttgctggataccggagctttctcatacagctactggataaagagaatcttgagaatttcgaaaacgagaaattcctcaagtatattaaccgcatacagaccgctattatatttctggattctcagtga

SEQ ID NO: 12325 - RNA, 1005 nt, synthetic construct
  source 1..1005: mol_type = other RNA
atgcagatttttttataccgcgaggatttcttctacaacaaagttctctcaagcagtaaaaaagcggtggacgagataatcaaaaacaaggacaagttctatcaggagaagatcatccccaagaaaaatgggtatagaactctgtcatgcctgaagaaagatagctctctcagcaaaattcagcagagtattcgctccaattttcttaacaagatttccattccagactatgtgtatggattcgtccctaaacatagttacaaagacttcctcagtccacacaccaaaagaaaatactacattcggctggacatagaaaacttcttccaatcaattgatcctgatacactaaaagaagtcttcgcatactattttcagatcaaccacgtgaccaacgaagaattgctcaaacagtttatcgagctggtgacactggataacaaggttccgcagggggccataacaagccccattgtatccaatatcgtcttccggcagctggacctgaggataaggaattactgtaagaagttcaacatcacctacactaggtatgctgatgacctgttatttagctctgacaatccttacatccataaggatttcttcatcaagaagatcaagtacatcatttctacgaagggctttaaactgaataagaacaagattcggtacgataaggaatttatttcgttgaacggatttgtagtggaaaataatatccgcctttcccggaagaaactgaaaaatttgtctagcagcctgtttatacttgaccgatataagaacaagttcaaccttaatgaggtgctgatggagatcaacaagatccccttcaaaaaagagattaattccatcggctccctcataaattatctgtctggctatcgtgcctttctcatccaattgctgaacagagagaatctagaaggtgacgagaataagaagtttttaaggtacattgagcgaattcagaacgctatcatctttctcgattcacaatga

SEQ ID NO: 12326 - RNA, 1002 nt, synthetic construct
  source 1..1002: mol_type = other RNA
atgcagattttcttgtataaggaggacttcttctacaagaaaattcttctggactctaaggagtccatccaggagattattaaggacaagaacaacttctaccgaaagaaaaagatcccaaaaaagaagggctaccgtactctgtgttgcttagaaagggacagctctttgtacaaagtgcagcagtccatacggaaaaactttttgaacaagataagcatcccagattacgtttatggctttgtgcccaagagctcttacaaagattttctcgtccctcatacaggtaagaaatattacctaagactcgacatccagaactttttccagagcatagataccaaagtgctgaaggaagtattcctttattactttcgactgaaggacaataacgaggaaactctgaataattttgtcgagctcgtgacactggaagataaggtgccccaaggggccgtgacatcacctgttatcagtaacgtcatttttaggaaactcgatctgcggatttataactactgcaagaagtttaacgtgacctacacaaggtatgcagatgacctgctgttttcctcagataatatctacattcaccaagagttcttcatcaaaaagatcaagtacattgtctcgacgatgggttttgaaatcaataaatccaaatcccgctacgacaaagacttcattagtttaaacggattcgttatcgatgaggacatacgcctgagcaggaaaaagatgaagaatctctcttctatcttgttcgtcgtagagaagcatcggaatagatttaatttaggagatgtgctgactgaaattcagtcacttatccacaacaaacaaattgattccaaacatagtctgatccactatctagctggctatagagccttcctcatccagttcatatcaaaagaacagaagaccgacctcgggaataaaaagatttttcgctatatcgagcggatcgagaataccatacttttcctgtatagcctgtga

SEQ ID NO: 12327 - RNA, 1005 nt, synthetic construct
  source 1..1005: mol_type = other RNA
atgcagatatacatttacaaggaggacttcttttacaacaaaatcctctcaacctctaaaacacaggttgaggagattctcaacgacaagaatagatattacacaaaacgcaagatcccgaaaaaaaatggatttcgaaccattaactgcctagaaaaaaatagtgcgttatccaagattcagcagtctatcagactcaattttctgaacaaagtctcaatccccaattacgtgtatgggtttgtgtccgggcagtcttatagcgactacctgaaacctcatgttaggcagaaatacttccttcggttggatatcaagaattttttcgagaacatcacgtcacagaccatcgagagcgtgttttcttattacttcaggctgaacacaaatactaacaatgacgaggagttgcaattttttattgacttagtcaccctgaacggtaaactgccacaaggcgctataaccagtcccacaatttctaacatagtattccgtcagcttgacattagaattaacaagtactgcaagaagttcaacatcaactacagcaggtatgctgatgatctcctgtttagttccgataacgatttcctccacaaggaattcttcataaagaagatcaagtacatcctgtcctccagaggctttgagattaataagcacaagatacgctatgagcaggattcaatctccctgaatggatttgtgatagaagaaaatatccgcttaagtcgatcgaaactgaaaggcctgagcaaagtgctattcattattgacaagcataagaacaacctggatactactaaagtgattagcgaaatcaatgacggtgggttcaacaaagaaatcaagaataagtacagcctgcttaattatctcgcaggataccgggccttcttgttgcaattccttgatcgcgagaacctggaagactataacaacaagaagatcaataggtatgtcatccggatccagaatgccattgaactgctctatcaatga

SEQ ID NO: 12328 - RNA, 1002 nt, synthetic construct
  source 1..1002: mol_type = other RNA
atgcagatatacatctacagggaagactttttctacaacaaaatccttgccaccagtaaatcattggtagaggagattctgaaggataagagcaagtactatacaaaacgtaagattccgaagaagaatgggtttcggaccattaattgtctagagaaaaacagtgccctctctaagatccagcagagcataaggataaatttcctgaacactatttccattccaaattacgtgtacggttttgtttctggccagagctatagtgattatctgaaacctcatgtgcgccgcaaatattacctgagactggacatcaagaatttcttcgagaacataactaacgacaccctggaatcagtgttctcctattacttccgcctcaacgataacaagaataatgaggaattgctcctgttaattgatctgatcacgctggacggcaaactgccccaaggtgctattacatcccctactatctccaatattgttttccgtcagttagatatcagaatcaacaagtactgcaagaagtttaacatcaattactcccgatatgctgacgatctcttgtttagcaccgataataagtttcttcacaacgacttcttcatcaagaaaataaagtacatcctgtctacccgggggtttgagcttaataaacacaagattcggtatgaccaagactcaatatcgctgaatggcttcgtgattgaggacaacattaggatctctcggtctaaactcaaaggacttagtagcacactatttatcattgacaaacatcgctccaatttcgacatcacaaaactactgtctgatattaacaactcaggattgaatcgagagatcaagaacaagtatagcctcctcaattatctggcagggtatagagcgtttcttttacagtttctcgatagggaaaaccccgaagagtactataacaagaaagtctcgaattacgtcatccggatccagaacagcatcgaattgctgagaggatga

SEQ ID NO: 12329 - RNA, 1017 nt, synthetic construct
  source 1..1017: mol_type = other RNA
atgttagggtacatctataccgaggactttttctacaaaaagctgctctcctctgagaaaaagatcgtcaaaaacactctgctcattaaagagagtttctataaagagcgagatctgtctaaaaaaggcggaactagaaccctgtcatgtatcgagaagaatagctccctgtataacttacagaacaatcttaggagcaatttcctgaataacattcccattcctgacaatgtgaaaggatttgttcccggtcactcctatcgggacttcgtgattcctcatctaaacaacaagtattatctgcggcttgacatcaaaaacttctttgacaacatcactttcgagacggtcaaagaagtatttggcgaatactttaagttggacaacgcatccaataacaataaattgctggaaacctttgccgaaattatcacacttagagggtccttgcctcaaggcgctgtgacaagcccaacagtgtccaatatcattttcaggaggatagatatccgcatcgcccgctactgcaagaagtttaacatcaattacacccgctacgccgatgatctactgttctcgtcaaatcagtctaatctccataaagggttcttcatcaaaaagattgcattcatactccgggatctgaatttgaagataaacagcagcaaaatcaagaagaccaagaactacattagtttaaacggctttgtcgtagataaggatatttctctctctagaaagcgtaagagtgacctcaccaaaatactgttcattatcgacaagaacaaggcggtgtgcagtacagatgccctcctgtttattctgaataccgagagctacattcacaagtcatactttttcaaagacaagtggtcacttgttaactatctaagcggatatcgagctttgctgatcgattggcttccaatcaataaggagacgatgaattacgaaaagtcgaaaaagctcataactaggatcgaaaaggtgatagactttctgctgggtgagaactga

SEQ ID NO: 12330 - RNA, 996 nt, synthetic construct
  source 1..996: mol_type = other RNA
atgatcattatcttcatctacaaggaagactttttctacgattacgtgttacgaaatagcctagaagaaatcaacaaacagatcattgacaaacagaactactattacactgtgaagattccgaaaaagggcggcattagagtgttgaactgcattaagcagaaaacccctttatttgagttgcaaaatctgctgaaggttaacttcttggacaaaatacctatagccgaaaatgtttttgggtttgtgaaggagcaatcttataaggattttctggtgccccatacctgggagaattccagggagagatattatttacgggtggatatcaaagacttctttggttccataacaaatgataccatactggaggtttttgactattacttcaagacaaacgagaaaagttcaaaggagatgaatgaattgcttatgcagatcattagtctcaatggttgcctcccacagggggctgttacgagcccagtagtgtccaatgtcgtgtttagacagctggacattaggattcaaaaatactgtgagaagttcgatgtgacttattctcgttacgcagatgacctactttttagttcagaaaaactgaaactgcacgataagttcttcataaagaagatcaactccattctcatgtcctcaaacttcaaagtcaatgacaagaagatcattaagaccgaatcggaaatttctctgaacggatttgtcgtcggaaaaaacgtccgcatctctcgatcaaagaaaagggatctgaaccggatcctgttcatctatgaggacaagaaacccaagaatatcaaagactttcttgatctgctcaacagcaacaagttcaaaaatcgcgtgaaagtaaataacaagtacttcaacgacaagaacaacctcctcaactacctgaatggctaccggagcttcctgatcaattggcttaataataacagcagcagtatcgagtataaaaagcagaagaaggtatattga

SEQ ID NO: 12331 - RNA, 1068 nt, synthetic construct
  source 1..1068: mol_type = other RNA
atgcgaaaatactctttcaacttcgaggtgatcatcatctacatctacaaggaggactttttttatgaatacgtgcttcggaatcccttagaagaggtttctaaacagataaagaacaagcaagactgctattataccgtcaaaatcccaaaaaaaggtggagtaagggtgctcaattgtatcaaacaggacacatccttatttgaactgcagacctcactgaaagtgaatttcttggataagatccctatagctgaaaatgtgtatggttttgtgaaggagcagagttataaagagtttttgtttccgcacgtttgggataatggcaaaaaacggtactacttaagggtggacattaaagactttttcggaagcataacttccgagacactgatcaagacgttcaagtattactttaagacttcggataaggtgagtaaagaactaaacgaactcctgatgcaaattatttctctcaatggggtgctacctcagggcgcagtgacaagccccgtcgtcagcaatatagttttcaggcagctcgatattcgtatcaagaagtactgcgacaaattcgatattatttacagcagatacgccgacgatcttctgttttcttccagcagcatgcgcctgcatgacaagttctttatcaagaagataaaccacatgctgaagagtctcaatttcaacatcaacactaagaagatcaagaaaaccgagtcagagatttccctgaacggcttcgtcgtcgggaaaaatgtacggatttcaaggtcaaaaaagcgggatcttaaccgagtactgtttatttacaaagatcagaagccaaagaacatcaatgatttcctgaacctgttgaacaacaacaagttcaaatcccgcattaagaacaacaacaacaagtacttcgaagacaagatcaatctccttaattatctgaacggatatagaagtttcctgattgggtggttgcataataataccctgtctgttgactatgagcaccagaaacaatatatcgagagattggaggaatttattctcaatgtgaatcgcatgaactga

SEQ ID NO: 12332 - RNA, 1068 nt, synthetic construct
  source 1..1068: mol_type = other RNA
atgcggaaatattcctttaaggtcgaagtggtcataatctttatctacaaagaggacttcttctacaattacgtgctgcggaataactccctagaggagattaataaccagatcaaaaacaagcaagactcttattacactgtgaagattccgaaaaaaggtggaattcgagagctgaattgcatcagacagcatacacccttgattgagttacagaggtctataaaagagaattttctggacaagatcccaattgccgaaaatgtgtatggctttgtgaaaggccagtcgtataaggattttctgactcctcatatttgggagaacggaaagaaaaggtactacttgcgcgtagacatcaagaactttttcgactcaatttcagaagatacactcattaagaccttttcctactatttcaaggccaccgtcaaggctagtaataccatgaacaagatattgatgcagatcatcagcctcaatgggaatctgccccagggagcagtcacttcgcctgttgtgagcaacatcgtatttcggaaactggatatcagaattcagaagtactgtgataagttcaactttacatacacccgctatgcggatgatcttctatttagtagcacatccacccggctccacgacgattttttccttaagaagatcaagtacatcctcaaaagctcagatttcaaggtgaataacaagaagatcaagaaaaccgagaatgaaataagtttgaacggcttcgttgttggggaaaacgtcagaatttcccgttcaaaaaaaagggacctcaatcgagtgctgttcatatatgagacgtataaaccaaaacgcatggaggacttcctcgtgcttctgaattccagcaagttttctagccgcgtggagttcaacgacaagtacttcaacaacaaaatcaacctgctgaactacctcaatgggtatagatccttcttaattagttggctgcacaactctacttctagcaaaggtaacaacaagcaagttgaatatatcgaacgtttagagaatctgattctggaacttaataggatgtcttga

SEQ ID NO: 12333 - RNA, 1038 nt, synthetic construct
  source 1..1038: mol_type = other RNA
atgatcatcatattcatctacaaagaggacttcttttacgattacattctccaggactcccttgaggagattaagaaggtaatcgaaaataaggagaacaactactacatcatcaagatcccgaaaaaagatggactgcggaagcttaattgcatcaagaaagagacgaaactttatcagtatcagaccctgattaagaataagtttctgaaccgaatcccaattgcagaaaacgtatacgggtttgtcaaaggccaatcctataaagactttttagtgccccatacctgggaaaacaacaagaaacgtttctatctcaggatagatattaaggacttcttcggtagcataaatacagacaccctccgccaggtgttcaggtactatttcaaaacagacgaaaatgcctcaaatgagatgattgacctgctattggatatagtgtcactagacggctttctgccacaaggcgctgtgaccagtcccgtgattagcaatatcgtgtttagacagttagatctgagaattcagaagtactgtaataagctgaactttacctatacaaggtatgccgatgatctgctcttctcaagtattaacaagcgaatctatgatcccttcttcattaagatgatatcaactatcctcaagagcagaaacttcaagatcaaccactctaaagttaagacatccgacgaagagataagccttaacggatttgtcgttggtaaaaatatccggctgtcccgctctaaaaaacgggatctgaataggatcttattcatattccaagaccagaagcctaaaaacattactgactttcttagcctgttgaattcgaagaagtttaaatcccggattaatgtcaataacgagtacttcagcaataaaactaacttgctcaattacctcagtgggtacagatcttttctgatttcctggctgcctgaaaacaaaagttctcctgatttcaagagctctaagatctatatcaagcgcattgaagagttgatcctgaacatcaacaatatgaactga

SEQ ID NO: 12334 - RNA, 972 nt, synthetic construct
  source 1..972: mol_type = other RNA
atgaaggagaaaataaaggacaaacagcaaaactactacctaaaagacatacccaaaaaagggggacgccgctatttaaactgtattgaaaaagagacaccgttatatgtgtatcagacctccctcaaaaacaagttcctgaacaatataccgatttcagagaacgcctacggctttgttaaggggcggtcatattacgactttttggtgccccacacacgtggtaataatgagaatggaagatactttctcagaatcgatatcaaggatttcttcgattcaatcaccaccgatatcttagaagagacgtttaagtactacttcaaaacagacgaaaagtcaagtaatgaaatggtggggctgataatagacattattagcctgaatgacgttctacctcagggcgcagtgacttcccccgttgtgagtaatattgtctttaggcagctggacattcgaattcagaaatattgcaacaaactgaaggtggtctatacccgatacgctgatgatctcctgtttagtagcgtaaataaccggacacatgaacctttcttcatcaaaatgatcagcaatatcctgaagacattgaacttcaacatcaacttctctaagatcaagaagtccgaggaagaaatctccttgaacggatttgtagtcggtcaaaatattcgtatttcccggaaaaagaagagagatatcaacagggtgattttcatctataaggacaagaaaccgaaaacgactagcgagtttctgaccctccttaatagccagattttcaccactaggactcgcaaaaacaatgaatacttctcttctgagatcagcctgcttaattacctcagtggctatcggtcctttttgatttcgcttctcccaagatctaagcagtctatctactacaagaacatgaagaggtatatcaacaatcttgaggagctgatcctgaacattataaatctggagtga

SEQ ID NO: 12335 - RNA, 1038 nt, synthetic construct
  source 1..1038: mol_type = other RNA
atgaggatcgatagcttgaacaagttcgagaagaaagttttgcgcggctcaatcaccgagtataatgaaagtctgacagacgattccattaaccaggcataccacactaaaatcattaagaagaacgacaactctgaaagaaccttgcagtgcatcgatagcaatcacgacatttataagattcagaagaagctcaagaacaatttcttcgactttattcctctgagtaatcatgcgtatggctacgtcaaagggaagagctactatgactacctgacccctcacattaagaaaaagttttatctgcgactggacatcaaggactttttcaatagcattaaggagaaaaagctgcgggaagtgatcgagtacgacatcgataacatcaaaataaacgaagacacgactcttgtggattttctgatcaaaacggtaacttttaacgggagcctcccacaaggtgccgtaacatctcccgttctgtccaatatggtgtttcgagttctggacattcgcatatctaggtactgtcggaagttcggtatagaatatagtagatacgtcgatgatcttctcttttcatccaatgacctgctaattcataagaaagtgttcacaaacggaatcaccaaaatcttaaaatcccaaggcttctatctaaaccacaataagttacggaaaagtaaggatgagatttcactgaatggcttcgtggtgggaagcgaaatccgtctctcgcgcaagaaaaccgccctcctgtctgctctgatattttgctaccagaacactcagaagaagacattcgataacctttcaacagagttcaaaaaacacttcgggattgacaacgagaaaataattaatgccgacagactccataattacttggctggctataggtcctttctgctcgggctcttaccatttgattctgtcggagtgcttcccgataatatgaccaaaatcaaccagaagtacctaatcaagatcaacgagatagaaaagcttttgaaactgaccagcaaagagatgaattga

SEQ ID NO: 12336 - RNA, 1023 nt, synthetic construct
  source 1..1023: mol_type = other RNA
atgagaatagaatccctgtccaaattcgaaaaaaaagtgctgagggactctgtcagccactacgtagatcttcttacagaagagcagctcctgactgcgtactataccaagatcatcaagaagaaagacaaatctgatagggtaattcactgcatagataacgagcatctcatttacaagatccagaaacagctgaagaacaactttcttgatttcatccctctgagtaactgtgcatatgggtacgtgaaaggtaaatcgtattacgactatttgaagccccatgtgaaacatggatattacatgaagctcgatattaaggacttcttccacagtattaaggaaaaggagctgcgtgaggttctgaagtattacgtcgatgacgtgagcatcaatgagtctctgaccatactggattttataactaaggtggtgaccgttaatgaattcttaccccaaggtgccgtaacgagtcccgtcttgagcaatatttactttcgcttcctagatatccgcatatcacggtattgtcgcaaattcggcattaattacacccggtatgtcgacgaccttctgttttcaagcgacaatctgttcattcacaagagggttttcatcaacggcattacaaaaatcctgaaatcacagggatttcagctcaaccctaaaaaagtgagaaaaacgaagtccgagatcagccttaacgggtttgttgtgggcgaaaacatccgactcagtagaaaaaagactgctatcatttctagcctcatatattactaccaatgctctccaaataagaccctagaggaattgctaaccgaggtggagaagaatctcgagattaagatcaagatctccaacctccacaattttctggctgggtaccggtcatttttgttaggactgctgccgttcgattccgtcggcgtgttgccagaagtgattacaaggacagacaagaagattctgtataaaatcaacgagatcgagaagatcttagacctgactgccgccaatatttga

SEQ ID NO: 12337 - RNA, 1029 nt, synthetic construct
  source 1..1029: mol_type = other RNA
atgcacatcgaggacctgaacacttttgaaactaaaattctacgggaaagcaccaaaacatgtgtcgagattctgaaagtggagaagatatccaaagcctactacacaaaaaccatttcaaagaagaacgggatgaaacgaactctccattgcatcaacaacgaacatatcctctataagttacagggaaacctgaagcggaacttttttgattacatccctctgtccagccatgcttatggatatgtgaagggcaaaagttactacaattacttggaaccacacgtgggcaatgatatcttcctaaaactcgatatcaaggacttctttggcagcattaaggaaaacaaacttcgcgaggttctgggctactatgtcgacgacattaacgttagcgataactttaccctcattgatttcatcgtgaaagttgtgacagtagatggtaagcttccccagggagccgtgacgagtcctgtcctctcaaatatactgtttcggcacttggatatccgtatttccaggtactgcaagaagtttggaatcacctataccaggtacgttgacgacattctgctctcgagtgcatctttctatcttcacaaaaaagtcttcgtgaacggcataaaaaagatcttgaaaagctacgacctgtatctcaacacaaacaagatcataaagactaagaacgagatctcactgaatggtttcgtaattgggaaggaaatcagattatctaggaagaaaacagctttcatttctgccatcatctattgttatcaacagaccaacaagaaaaacgtggacaacttcattaaagagatcaaggagcacttcaaacttacggactcaaccgagattaatctgctttggctgcataattatctggcggggtaccgctccttcctgctcggtctactgccctttgattctgtgggggtcttaccagaacacttgagcaagtccaacagaaagcttttgtacaagataaatgagatcgagaagatactggacctgctcattctgtga

SEQ ID NO: 12338 - RNA, 1020 nt, synthetic construct
  source 1..1020: mol_type = other RNA
atgaagatattctccctggattattttgaaaaccgggtgcttaaggaaaagattgaaacgctcattatcgaccctgtcgaaaaagattcctgttacacccagatcgcagttaagaagcgggcggggggaataagaacccttagttgcatccatctatactcaagagtatatcactctcaaaagcgcttgaaagagaattactttgacaaaattcccacttcagacttctgctacggctataagaaagggttgtcctacaaagatttcctggcccctcatgtcgactctaaatacttcttaaggatcgatctgaaggacttctttggaagcatcacatgcaatctgttaagcgaggtcctgaccagttatatatcttgtcttccggttaataacacaacactgctggatctaatcattgacatcgtgacccttgatgggaagctcccacagggtgctatcacatcccctaccctttccaatattgccttccggcaactggatatccgcatatataaatactgtgagaagtaccaggtgatctattctaggtacgctgatgatctcctgttcagcagcaacaacatggttatccacaagctcttttttctgaaaaggatcagtaacatcttgaactcaaaagggttttcgattaatcgggacaagatagtgaaagcaactgagcagatcagcttgaatggctttattgtaggatccgagctgaggattagcagaaaaaaacgtagactgctctcggtgatcctctattgttttgacaagtacaaaccacgaacctataacattctgctgaatcacgtgaacgctgagctgggtgccaagcccattaagactactgaatacctcaataacttcctatcaggctatcgcagcttccttattggctggctcccatatgactctttgggctgcttaccctctgaagcctttctcagtgagttcgacaagaagaatctgcgactgatcaaccagattgagtacatattgaagaaattcaacccctga

SEQ ID NO: 12339 - RNA, 1047 nt, synthetic construct
  source 1..1047: mol_type = other RNA
atgaaaatctacaaagtagactacttcgaaaggcaaattatgaacaatgaatacagcaccgaagacctacttgacgtgttcctaaaaaaagaggagcattacaacctttacgtcataccgaaaaagaagaatagaggaacacggaagctgtattgtctgtcgaaaaacaaggagttatacaggtgccagcaattgctgaaggttaatttctttgataggattcctgtctcagactattgctatggctacagaactggaaaatgctacaaaaactacctagaaccacatattggaaagaagtactttctgcggctggatatcaaggacttttttgactgtatcggcaaggatatcatcagagacttcctgcttacttatgtatccgaggatatcgagaataccattctggggaaagaaattagctttgggctgttggatcttatcactgaacttgtgaccattaatggccacctgccacagggcgctatcacaagtcctgtgataagtaatctgatctttcgctcactggacattaggatctatagatattgctgtcggtacgggattacatattctcgatatgccgatgacctgctcttctcatccgagaactctgtcttgcacaaaaacttctttaccaacaagatacagcacattttaaagtctggccagtataatttcgatataaactaccgtaaggtcaaaaagtgtaggggagaaatctccctgaacggtttcgttgttggtgagaacgtccggctctcccgcacaaagatcaaaaagatgaacacgatcatacatgtgttcaaaaaggaaaaggatctggacaagtataacatactcatcgagttgaaaaagaactacaatctcgtgttcgagaacgtggtggacttaaataattttttgagcgggtatcgatctttcctcattggtatcctcccctttaatagcctgggcgagctccccaataatattaaccgctacgataccaagaacctccgcattattagtgagatcgaggggatcctggaaaaggtgaataaatga

SEQ ID NO: 12340 - RNA, 978 nt, synthetic construct
  source 1..978: mol_type = other RNA
atgaagaaaaacgccgagattagcaagatcacaaaccggaagatacagtgttattttcgggtcagcattcccaagaaaggaggcgagaggattatctattgcataaacccttcgtgtaaccttcggactctccagcagaacctgcaaaggaactttctgaatcgtattccgatccccaataacgtatttgggtttaagaagggatacagctataaagacttcctggaaccccatgttaacaaaaattactacctgagagtggacatcaaggatttcttcaattccatcagtaaggaacttatttacgatgtactcaccaattacttgaaaatggatgaagctgacaataaagaggtgctcgatactgtctttgatatcgtgagcctccacggaaagataccacagggcgcgattacatcaccatctattgcaaacgtgatattccgtcagattgacatgcgcatcaaaaagtactgcaaggtttttaacgtcgagtatacgaggtatgcagacgacatgctgttcagttcagacaatgagtatttgcttaagccttacttcataaagaagattgccaaaatcctgttctccaaagggtttcggatcaattctagcaaaatcaagaagtccaataacgggcagattgtgctaaacggcttcgtgatcagtgactccctgtctatctccagaaagcgattatcagatatccaaagagtgctcttcctgtaccaaaaagggggcgctcctgtttcaattagtatctttctagatcgcatcaattctgaacagtatttataccgcaaaaagatgaacggtaaatactttcccacccgaggttccctgattgattacctctctggctatagggccttcttgatccagtggctgccagaggacaaaaatagcaatgtctatgagaagctgaccacccttataaacagaattcagtacttgctgatcaatattgaggaaatctga

SEQ ID NO: 12341 - RNA, 1017 nt, synthetic construct
  source 1..1017: mol_type = other RNA
atgtttatctataacgaggatttcttctacggcaagattctgaattgcagaaaggatgccttagaagatatactgtctaataagtccgacgaataccaggaaaggattatttcaaaaaagggtggaaagaggtatttgtcttgcctgagtgatacatctagcatcgctacccttcaaagaggattatccaataaatttctcgatcacattcccgtaccagactatgtgtacggttttattaagggcaagtcttacaaagactatcttgtgcctcataaaaatcgggagttttaccttagagtggacatcaaggactttttcagctccataaataaagacctcgtaaaagaagtgctggactactatattagaacagataatgacaccctgaacaagaatttgattgacatcatctacgatatcgtctctctcaatgatagcataccgcagggcgcgatcacttcacccagcatttctaatatcgtttttcgatccctagatatccgaatcaataaatactgtaggcgcttcgggataacctacacgcgctatgcagatgacttgctgttctccagtaacaacagttttctccataacaagtactttctgaagaaaatcagccacatcctgcagagtaagcgcttcaacattaactccaacaaggttatcaaaagcaacaagattatctcgctaaatgggttcgttgtcggcgagaaaatctggctcagtcggaagaggctgcacgatattaacaaagtgctgtatctctacaagacaaatactttctcaaacatcaactccctgttgtatgtccttaattcaagcgactacatttatcggaagaccaacaataactcattcactagcaaaatggagatcgtgaattatctggccggataccgttcgttcttactgcagtggtatgagtttcaaaatggggacaacaagaacttcaagttgctcaacaaaatagacgaaatcgagcggatactgattgagattgagcagcttaaatga

SEQ ID NO: 12342 - RNA, 1140 nt, synthetic construct
  source 1..1140: mol_type = other RNA
atgaaatggattatcattatggccattcggaccatttacgacgaggagtttttctataagaatattttgcgcgaagagaaagagaacgtcatagagatcattaacaagaaaaaggagtactactacaacaagaccatcaacaaaaagaatggagtgcgcaatcttaaatgtataattgaggatagccccttatatttcctgcagaaaaatctcgtgaattactttctcaacaacattcccctgccgctgtatgtgtacggttttagaaaaggggtcagctataaaaagtatctggaagtgcacctgagagaagaggttgacaacaactatctcgaatccaatagtagaaaagatgtgtcaaaagactgtctacaacctcatctgaggaattacatcggaaagaagacctgctacatccgtattgacatcaaatcgttcttcgattcaatcaatctggacctcatcaagaagattttcagcaactactttactcctaaagattcctttcttaaggatgagctgcttgaaattttcagtcaaatcgttaccttggataacctactgcctcagggggcagtcacgagtccaacaataagcaatatcattttcatccgagaagatatcaggatttataactactgcaacaagctgaatatcaaatactccagatatgccgacgatatgttattttcctctaagcacaataaggtattcaaaacgtacttcatcaacatgatcacaaagatcctggatgagaatggcttcaagatcaactattctaaaaccaagaaggggttagacgagatatctctcaatggattcgtaataagtaactgcatcagcctctcacgaggcaggaagcatgacatctcaaagatcctgtatatctttgacacccttaaacccttctctacttctacttatttgaacatgttgaacgacaaggacaacaacttcaagtatataaagtacaaggctgactgttacttttcctcccggggcaaactgattaattacctctgcggttatcggagctttctgataaattggttgccacgggagaatgaggaactgacatacaataaggttaaaaggctaatcgatcgcattcaggaagtgattcttaaaatacaggaatga

SEQ ID NO: 12343 - RNA, 1035 nt, synthetic construct
  source 1..1035: mol_type = other RNA
atgattgtcatctacatatacaagaaacacttcttcatcaacaaggtgctgggcacaaagaccaaaaatatctatgacctggtggaggaaaaagataaacactacttcaacaagacgatccaaaagaaaaatggggttcgagagctgaagtgtctgaaagagggagactttaagcatatccagcaaaacctcaagaagaattttctagacgaactgcccattccagattacgtttacgggttcgtaaaatactcctcatataaggactttctgctgccacatattggaaaaatgtattatgtgcggttggacattaaagacttttttccgagcgtgaagaaagatcttctgtttcaggcctttaagtcctattttaagctcgatggctcagacaacgatgacgtactgaatttgtttgtggatattgtgactcttaacgaggaactgcctcagggcgcagtcacaagccccgtcatctccaatatagtcttcagaagcttggacatcagaataaagtactactgcgataaacttggtattacctatacccgctacgctgatgatttgctattttcttccactaacgagcagctgcatagccggtatttcatcaaaaaggtttcgaagattctgggcgataaaaagttcaagctcaacaccgacaaaattcttaagtacacagacgagatctctctgaacggatttgtggtgggtgagaaggtacgtctcagtcgcaagcgaaagagtgatattgctcaggtgataagactgtgcaggaatgttaagaaacctgtcgactttgatacgctgctcagtcaacttaatcagttggatctccggtatcgcaaaaagactgtgagcgacaatggcgaggaggtgtacttctcatccaaagaaaccctagcgaattatttactcgggttcaggtctttcttcatagactggttaaacactaacttaatctctgacaaaagggaaatcaaattcttcatcgaccagattgaaacattcatcgataagcactacgccatctga

SEQ ID NO: 12344 - RNA, 2307 nt, synthetic construct
  source 1..2307: mol_type = other RNA
atggtctttatcaaaatctacagtaaggacttcttctacaagtacattatcgaagacaaagaacaggatgaattggccgaaatcatcagcaataagatgtactcttatctcaggtttgagtacgagaaaaaaaatggataccgcttcatctacagtatgaaaaaggacactgggttatatgaagtacagaccaaactgaaggataactttctgaatgagattccaatcgccgaccatgtgtatgggtttgtctctggctattcctataaggactttcttgttaggcactgctacgaggataagaacaaaaccacctatttcttaaggctagatatacaggactttttcgaatccatcaagactaagatgattaaagagacactcgagtattacatcaagataaaagacgaggataaccctactgtgctcgatctgattaacgatctcgtcaccataaacgactttctcccgcagggagccattacatcccctgttctaagcaacatagtattccggcagttggacattaggttccaaaaatactgcaggaagatcaatatcaagtacagccgatacgcggacgacctcttatttagtagcaaggagagttatctgcacaagcgcaattttacgaataagattcggcatatcctgaaagacaaaggcttcaaactaaacttcaccaagacaatcaaatctcagaatgagatcagcctgaacggcttcgtggtcggcaataatatccggttgagcaggaagagaaaccatgacatatccatgatcctgtatctgtacgataaccaaagcgtggacgagttcataaacatccttaataaggagaacttcatctaccgtaataagaagtacgacatgaagacaaatgacgaaaagtactttatcaaccaggacgatctcattaattacctcgcaggctatcgttctttcttgattgattggatcccaataaaggatggcaaacacaaagagaagcacattaaactcatcaagaatcttgaagtgctacttgaagacctgagcgatattaacaatgaatacaactacaagggggataaaatgtcccagaaagaaaatatcccactgtcagtgccgaacctctcgaaagatattttgcccaatatagaagagactattgagtcgggttgggtttccacagggggaaagttcattgatcaatttgaggaaaagctggctgactacgtaggtgtggaccaagccgttagttgccagtctggaactgctggactgcacctggccatgcgggtattgggcattgggccaggtgatgaggtgattgccccgaccgtgacattcatcgcagcagtaaaccccattagatatatgggcgcggaacccgtgtttatcgattgtgattctgacgatggacctgctgggccctcagcagagcctactaacgcgtttaccaacgaggggtcagtcaacatggacttagataaactggaagagttcctcgaaaatgagtgtgaattgaccgatgggagggtgatcaacaaatcaagtggacgcgagattaaggcaattaacattgttcatgtcttcggcaatcctgtgaacatggagcgcctgatcgacattgctcgagagtatggtttgaaagtgatcgaagacgccactgaggctctggggtcttactacaccgaaggacggtacgccggaagatattgtggcaccatcggtgatatcggcgtctactcattcaatgccaacaagataatcactacgggtggaggcggcatgattgtggcaagagagtccgatctcctggaggaagccaaatttctctctacgcaggctaagtccgatagactgtattatagacacgacgaggtcggatataactataggatgaccaatatacaggccgcttttggcactgatcagatcgatagactggaaggctttattgccacaaagattgaaaactatcgacgatacaaagaggctattgcggagatagacggcctggagcttatggcatttaatgaagggtgtcgcccaaaccattggttctacagcgtgcttgtggaccctgacctgtatggtatcgaccgcgacgagctgctgcaggagttaaatgcagtggggatccagacacgtcccctttgggggcttatccaccagcagaagccatatctggactgccaggcttaccggattgaacaagccccctattaccaacaaaacctaataaatctgccctgctcctcaaatcttacagccgagcaggttaagaccgtcgttcggtatctgagagagttcaaaagctga

SEQ ID NO: 12345 - RNA, 1002 nt, synthetic construct
  source 1..1002: mol_type = other RNA
atggaaggcatcgataaagaaaatctcctggagataattgccaacaaggaaaaccattatggcaagaatgaaatcagtaaatccaacggtaaacgtataatctactctatcgacaacaactctcagttatataagatgcagaagcatctcgtgaacaattttttgtcccaaatacccatcgcagatcatgtgtacgggttcgttaaggattatagctacaaggattttctcttgagacacattcacgataagaacaataagacgtactattaccttcgactggatattaaagacttcttcggtagtatcaactcaaatctcatcgaggagactcttgactattacattaaagtgaacgaagcggagaacggaaactctattattgagattatcaacgggattgtgacacttgaaaatttcctcccacagggcgctgtcacctcaccggtagttagcaacattgtgtttcggcagttggacatcagactgcagcgctactgcaggaaactcgacatcaaatactcacgctatgctgatgatctgctattcagttccaccaattcgaatctgcataagaacaactttttcaagaaggtttcctacatattgaaggacaaggactttcggctgaactattctaaaacaataaaggacgagaacgaaatctccctaaatggctttgtagtcggcaataatatccgactgagtagaaagaggaagaaagacatttctaaggtcctgttcctgtacaacaataaacctgacaatcaatcattcgtgagctacttaaatgaacacgaattcctgtatcgcgataagattggaagctcctactttctgaataaagacgaccttattaactacctggccgggtatcggagctttctgatcgattggatccccgtgaaagagggaaggcacaaagagaaacacataaatctcattgagaacatcgaggacttactggagaatatcagcgatgtcaataatgagtataactga

SEQ ID NO: 12346 - RNA, 1020 nt, synthetic construct
  source 1..1020: mol_type = other RNA
atgtacattaagatctataacctgaactacttcttgaagaaaatcttggagatatcggaagaaaagttaaagaagaccctgacgaataaaaagaacgcctattccaagtataagattcccaaaaagaacgggtataggaaaatacatagccttaaaagcggcgatttaagtcacttgcaaagcaacttgaaaaagaacttcctcgataacattcctatcgcagacaatgtgtatggttttgtcgaggggtacggttacaaagatttcctaatcccacacacatacaaaaaatactacctgagattggacataaagaatttcttcgagtccattaagaccaataagcttgaaatcatcttcgattactacataacagccagcaacgacgaggagaaagacaaaattcttgactacctgattagcatcattagtctcaatgactatctgccacagggcgccattacttccccggcaacttccaatatcttttttcgagagctcgatatacggattcagaaatactgcaaaaagctgggatttgactactccaggtatgccgatgatatcctcatctcctctaataatgataaactgcccaaggattttgtcatcaaagcggtgaataaaatcgtttctgacagaaagctgaagctaaactacaagaagataatccgtgaaaagaacgaaatttcactgaatggatttgttgtgggcaaaggcatcagactgtcacggaataggcgctatgacatctcaaagatcaactttctcttcaagagtaacaaatctgtgagccagtacaagttcgtagaactgctcaataatgctaatggcgggtttaaatatcggtacaagaataacaacgggaaattcttctctgatatagacgacctgattaactatctggctggatatcgctcatttctgattaactggatccctgatgaggacaacaagtactataacaagcacatcaacttactgaatgacattgaggagattcttctctggcttaattga

SEQ ID NO: 12347 - RNA, 972 nt, synthetic construct
  source 1..972: mol_type = other RNA
atgagcaaaacgctagagaaaaaagaaaacttctacgaggtgattgaaatccccaaaaagaatgggatacgtgtgattcactgtattagcaagaattcaccgctgtactatctgcaggaccaactgaggaagaattttctggaaaaaataccctgctccacaagcgcctgtggcttcattaaaggatcttcatacaaggatttcctgattccacatcagaatatggaatactatctccgcatcgatatcaaggacttctttaactccatcaagaaagacaagattaaggaagtattgcgacagtatctgaagctaaataacgagaaaagcaacgagatcctcaattacatcagcgagttggttactatagacagttacgtcccccagggggcggttaccagtcctcagttgagtaatatcattttccggaagttagatgtccgcctgcaaaagtactgccagaatctcaacatcaactataccagatatgccgatgacctcctctttagctctaaattcggtaaagtgcatctcccattttttctaaacacgatccggaaaattctgctgtccgagaattttctgatcaacaagtccaagataatcaagactcgcaaggaaatttccttatccggattcacagtgggcagaaatattaggctctctagatcaaggaagggtgatcttaccaaagtcctgtttctcttcaaccaaggcggaaagcctaaatctatcaatcagttgttagagcgactgaacagtgaaacatatcgttaccgcatggtgagggaggagagaaacaataactatatctacttcacctccaaggaatcgattcttaactaccttgcagggtatcgggctcttctgatcgattggggcaaccacaataaatacaaatcacttaaggacgagagcaagctgatactgcggatcgagaagattataaaagacatctctcagttgtcttga

SEQ ID NO: 12348 - RNA, 1032 nt, synthetic construct
  source 1..1032: mol_type = other RNA
atgaaccacattaagatctatgatgagtccttcttctatagggctattctcgagatcgagcatgaaagtatgatttcaaaggtcgtggagaacaaaatcaacagctacaaagagatcacaatcagcaagcacagcgggagtcggacaattcactgcatcaataataacgaccagctgtatgggattcaacgcaatctggtggacaatctgtttagcaaggtggcgctccccgataacatctgtggctttgtcaagaagcggtcatatagagactttctggttcctcatctctggaacaacaatgagaaaagatactatcttaggctcgacatatctgacttctttggaagcataaactccgccaagattcatgatgccctagacggcctcattgatctcgatgaggaaaaaaaggtgaagatgttgaagctgatctctgagatctgcactctgaatgatattctaccacaaggtgccgttacatcaccagcaatttcaaacatagtgttcaagcggttagatgtccgtattcgaaactactgtcgaaagttaaacgtcacctacaccaggtacgcagatgatcttttgttctctaccacgaaagaaaaaactttagggggatatttcgtgaaaaagatcgtaggcatcctgaaatcctctggcttcatcttgaatcgcaagaaagttaaacgtggaaagttcgaaatcagcctgaatggattcattgtgggcgaaaatataagaatttcccgcaaaaagaagcgcgacattgctgcctttttttttctgtacatcagaggtgggaaacccaaaaacatagtggaaatcttggagaggctgaatgattatgactttagatttaggcagaagctgttcacttcgaaaaatgacatcatcaattaccttgctggttaccggtccttcatcattgactggctccctcaggaaacagagagtaacgtacacaaggacctgaagaaaatcattgacaagatacaggaaacccttgaagagatagaggagctggaatga

SEQ ID NO: 12349 - RNA, 1032 nt, synthetic construct
  source 1..1032: mol_type = other RNA
atgaccaagatcaaaattttcgacgagaacttcttctaccgcagcgttctcgggatagaggatgaacacatattcaataacctcgtgattacgaagttcactagttataaagagatcgctgtgcctaaaaatggcggaattagaaccatccagtgcattgacaaggaaaatcagttgtacaagatccaaagaaatcttgtcgataacttcctgagcaagatacatctgcccgacaacatttgcggatttgtgaaacgtaagtcctatcgagattttctgataccacatgcatgggaaaacaacaacaaaaggttttacttaaggcttgacatctctgatttcttcggttctattaacagtgccaaaatccacaattccctgaacgatctaattgacattgaggaggacaagaaaaacaagatcctgaacatgatttctgagatctgtactctcaatgacgtcttgccacagggcgctgtgacaagccccgtactcagtaatatagtttttaaacggctcgacatccggattagaaactattgtcgcaaactcgatgtcatatacactcgatacgcagacgatctccttttttcgaccacgaaagaaaggtctttgggcggatttttcgtaaagaagatcatcgggattcttaagacaagcgggtttatactgaatcggaaaaaggtgaagagaggaatctcagaaatctcactgaatgggttcattgttggtcagaatgtgagaatttccaggaagaagaagtcagatatcaccgcctttttctatttgtttatctatggtggccgcccgaaaacaatcaaagatctgatcgagcggctgaacagctataaatttcagtatcgtaggtcactgttcgtctccaaaaatgacatgattaattacctggcgggctaccgctcctttctgattgattggttacctgaggacaccgagacaaaggtgtacaaggagttagtgaagatcatcaataagatccaaaacactctggaagaaattgaagccctagagtga

SEQ ID NO: 12350 - RNA, 1044 nt, synthetic construct
  source 1..1044: mol_type = other RNA
atgtttgtaggcgacataatccttatctacaagaagaacttctactaccagacagttttaggcgtggatgattccagcatggtcaaggaggtcatagagaataaggaaaagcactacaaaccaatcgtgatttacaacagagggaaaaaacgggagattaattgcattgaggaaaaacgcgaactgtacaatttccagtcaaacctggccaagaactttctgaataaactccccctccccgacaatgtatgcggatttgttaagaataggtcttatcgcgactttctggtaccacatattaactcacacaattctgatcgtttctatcttcggctcgatattaaggatttcttcaatagcatctctgaatcacacctgagagaagtcctacaggaatatgttaccattatcgacaaggaggataatgaggaggtgattctgagtatggtgaatttagttacactgaacgggtccctaccgcaaggcggagtgacttcccccgtgttgagcaacttggtgttcagaagtattgacatcagaattcgcaattactgtcgaaaactcgacgtcacgtacacccgttatgcagacgacatgttattctcatgtgacaaagaaaaagtcatcaacggcttcttcattaagatgatcatctccatcttgaaaagcaagaagtttgtgctgaataggaggaaagtcaagaagggtgctagccagatctcccttaacggcttcgtggtgagccataacataaggattagtcgaaaaaaacgacaggatatcaatcggtttatatttctgtgggaaaagggtggaactcctaaaaccatagatgaactcatcctccggctgaactcttttgatttttcttatcggatcaaggactttaacagtaaatacagcgtgctgaactatcttgccgggtacagatccatgctgattaattggctgcctaacgagttcgatgacgagtggtatcaacagtcggagcgcctcattaggaagataaacatgatcatcatgaagatcgagcagttggagtga

SEQ ID NO: 12351 - RNA, 990 nt, synthetic construct
  source 1..990: mol_type = other RNA
atgctcgggatcgagaaagatgagaactttaagatcataatcgagaagaaagccaacaactacaaaaatctcctgatctcgcgcaaaggcaagcaacgagagataaaatgtatcaataaggagagccagttgtataggattcaagctaatctcgtacagaactttcttaacgagattccccttcctgacaatgtctgtggatttgtcaagaagaggagttacagagacttcctggtgccccacatcaataattcccctactgaccggtattacttgcggctggatatcaaggatttctttgacagtataaccgaagagaaaatcgagaagagcttacaggaatacgtgacgatcaatgacggagcagagaataaggaggtgctgaaggacattattgacatcgttaccctgaatggttgcttaccccagggcggcgtgacaagcccagttatctcaaacattatttttcggaggctggatataagaattagaaagtactgctccaaactcaacattacatactctagatatgcggatgacatgctgttttcctcccagcataatcgcctgtttgatggctttttcgtgaaaatgattgccaagatcctaaaggatagtaacttcgttctcaacaggaagaaaattaaaaagggggtgtcattcatcagcttgaacgggttcgtcgtaggaaagaatattcgaatctcacgtaaaaaacggcaggatatcaaccgcttcatattcttattcgaaaaaggcgggaacccaaaagatgtgaacgaacttctgagcagactgaataaggagaagttctattaccgtagcaggaactttgaatccaaatctagtgtgatcgactatctggccggttatcgctctatgctgatatcttggattccggaagactccgatgaagcttggaaagaaaatgtcaaaaacttgctagacaagatccagaagattattatgaagatcgagtacctcaagtga

SEQ ID NO: 12352 - RNA, 1050 nt, synthetic construct
  source 1..1050: mol_type = other RNA
atggccttttatatctatcataccgagcagttctttcagaatattatcagggacagcagtgccaatatccaagcgtccctcgaagagaaagaaggcagttatgagaaattctccatctcaaaaaacagtgggactcgaaccatatatagcattaagtctgagagcaaattgaagaaataccaaaagaatctgctgagcaacttcttcgaatacataaacataagcgatcagtcttatgggtttgttaaagaacggagttacaaagactacctgcagccgcacatcaataataacctctataaggatcgatactacctgcggttagacattaaggagttttttgagagcatcaagagggagacaattaaggaggaactatcgttctactttcgccttaaggatagcaagcagacagaggaaatccttaaattggtcactgacatagttaccctgaacgactcaattccacagggggcagtgacttctcccacgctgtccaatattatttttagagagctcgatgtgaagattaacgcatattgcaatcagcttggtgtggtgtatacaagatatgctgacgatatgctgttcagctcgtttcgggaacatgataagtttgcccaacccctgatcaaagtcatttacaagatcctcaagacaaaaggattcaagctgaactacaagaagaccatcaagggaaagaaccagatctccctgaatggattcatcgtaggtgataacattagattatctcggaaacgcaagaaagatatcaacaacatcattttccactactacaaatccggcaagaatatagaacaattcctgaactctttgtcagaggtggacctaatctaccgtcacaaaaacatcaattcactcggctctctggtaaactacttgaatggctatcgcgcttttctcattgactggatacctgtgaatgtgtccaatgacaaaatcagtaaacattccaagaacatagacaccattgaacagattgtcgagaggctggagaacttcaagaattcaatcaggaaacttaagtga

SEQ ID NO: 12353 - RNA, 1056 nt, synthetic construct
  source 1..1056: mol_type = other RNA
atgcggtatctgctgtttctgtttgcatgggaggatagcatgtacacgattgagtctttttgcaacgcaatttgggaaacaagttattccaaggtcagtcagggagtaaccaaagaggagtatggcgaatttgagattcccaaaaaagggggttccagagttattaactatctggggagggacacttccatgtggaatctccagcataagctcctgaagaacttcctggagaaacaggatctgccggtgtgtgtcaaaggatttcgccagggagaaagctatcatagcttcttggccgagcacataggatcaaaattcttccttcggatcgatatctccagcttcttcccatccataaccgagaagcaaatcaaaaacgagcttagccgcttgctagcttgtaactcaaacgaagaaaaggaaaaactgcttaagctgatctgtgacatcacaacattaaacgactgcctgccacagggcgcctgtaccagtcctgctatttccaatctcgtgatggctcgtatcgaccaacgtattaccaaatactgccaggtgtttgatatacgatatactcgctatgcggacgacctgctgttcagctctgagggcttcaatttcaagtcgaagaattggttccttaagaagatcaagtacattctctcatcacagaacctcaaattgaactacagtaagatcaagtacggtgagaatgaacttgtgctaaatggctacattataagcaataaggggatctgcctgtctagatctcggctgagcgacatcagacacgttgtctccttcgccaaaaagaacaggaatctgatcgaggagttcggcagtgagcgctttttgcaggaaattaacaaactccctctcaggcacagggatttaactgaatatcccttcaataccgtgtttcaatttattcagtacatgtgcgggtacagagcctttttaatatctctagtggatcggtcttacgaagaaacctcatttcagaagcaactgcagcatttgatccgaaagctcgagacacagatcacgcactacacttga

SEQ ID NO: 12354 - RNA, 1017 nt, synthetic construct
  source 1..1017: mol_type = other RNA
atgtttacgatcgagtccttttgcaatgccatttgggaaacttcttacgcaaaagtgtcacttaatatactcaaggatgattactccgaatttgaaattcccaaaaaagacgggaagaggaagataagttacctggacaaagacagtggcttgtggtctttacagcacaagctgctaatcaatttcctgaataagcaagacctgcccgtgtgcgtgaaagggtttaagaagggcgaaaattatagatcattcctggcggagcatattggtgccaaattttttttgcggatcgacatttcttcgttcttcccaagtatcaccgagaaacagatcaagtcagagttagcacgcctgatcatctgtaactcagacgaggataaagaaaaattgctcggacttctgtgtgatatcaccacactcaacggaagcctacctcagggagcctgcactagccctgctatttccaacctggtcatggcccgcatcgaccagagaattactaagtattgccaggtgttcgacgtgcgatatacacgatacgcagatgatatgctttttagctcccacgtctttgacttcgacaagaagaagtggttcctgaagaagataaaatacattctgtcctcccaggacttgaagctcaactactctaagatcaaattcagccaagaccagctcgtgcttaatggctacgtgatttctggcgatggtatcagactgagtcggaataggttatcagatatcaggcacgttgtttctttcgctagcaagaactatatgcttattcagaacagtgagtcccagaaattcctccaggaggtaaataagctacccctgcagtatcggaacctggtcgattatccatttaaaaccgtcttccagtttgttcagtacatgtgtgggtatagggccttcttgataagcctggtcgatcagaactacgctgagacaagctttcaaaaacaggtacaacgtctgatccgcaagctcgaaatacaaattgtgcattgtacctga

SEQ ID NO: 12355 - RNA, 1173 nt, synthetic construct
  source 1..1173: mol_type = other RNA
atggctatgcctgccgccggtgtgagaagggaccatagctccatgtgctgcgtcaaacacgcacttcgggacctgctcggaaagtatttgtacactgccctctgtttttttctgctcgagaaaaacgccatgttcacgacggaatctttttgtaatttggtttggggcacaagctatctgaaggttctgcgcaagatctcgaaagaggactataatgaattcgagatcccgaagaaaggcggaacacgcaccatcaattacgtggatcgacagtcatccctgtggaagttacagcgggagcttcttaacaagtacttagtgaaacaggatctaccaatttgcgtgaagggttttaagaagggggaaaattacaagtcttttcttagcgaacacatcggagctgagttcttcctgagaatagacattgcaaatttctttcccagtatcaagattagctctgtcaaacgtgagctggctctgataattaggtgtgacaatgatgcagaggaggagaaactcctggatctaataggagagattgtaaccctggacgggcgcttaccacaaggcgcgagtacctcccctgtgatttctaacctggtgatggctaggattgatcagagaatcaccaaatactgccaagtttttaacgtccaatacaccaggtatgccgatgacctcctcttttcgtcaaacactttcgactttgaaaacaaaaagtggttccttaagaagatcaaatacatcctgaagtctcaggaactctctctgaactatagtaagattcgatacggccacaaggaaatcatcctgaatggctacgtaatctccaataatgaaattcgactcagtagaaaccgcctctttgatatccgccagatagtgaagttcactaaagagaacgtgcctttaattagatcaatcgggcttgatgagttcctgagcaaagccaacaagcttccattgaaacatcggaatctaaaagaatatcccttcaagagcatatttcagttctcccagtacctgtgcgggtatcgtgcgtatttgatttccatggtcgacacaaactgtctgcaaacatcattccagaaagaattgcagaggctgattcggaagatcgaggcccagatactgctgctcgagcaggcattgcccatccggaatagcaactga

SEQ ID NO: 12356 - RNA, 990 nt, synthetic construct
  source 1..990: mol_type = other RNA
atgatttggaactactcgtacagtaccgtgcagagtaagatcgctcagaagaagtacaaaacaatttcgatcccaaaacgaaatggcttcagggagctgtcctttctcgaccccaaaactgatttgcatatgctgcaatccggactggtcaacttcttgaaaaagatagaactgcctgtttgtgcaaagggctttgtcaaaggtgaatcctatctgagctacttagaacatcacatcggctcaatccacttcttgagactggacatcaaagattttttcccgagcatcactcggaagctaatcgagcgcgagatctcatgctttatgtctttcgattccgaggaagagaagaaaaagattgtgaaactcgtaagtgatctcgtgacataccacaattgccttccccagggagcggtgtcttctcctgtgatcagcaacatcgtgatgattcggatagatcagagaattctgaaatactgtcaggttcttgggattaagtacacgcgctacgccgacgatctgctgttcagttccgaggagtttgacttcaatgacaaaaaatggtttctcaggaagattaagcatattgtaagcgacgggaactttaagataaactacggcaagcttaagagcagcacccgcgagatatctcttaatggatatgtcatctctcaggaaggtttgcgattgagccggcagagacttaacgacatcaagaaagtggtcagttttgcttcatctaaccgtcaaatgctgcagtctgatcccaattcatatgtccaggccctgaatcagctcaatctagaacacagagggctgtcagtttatccattcaaaagcgtgtatcagttctatcagttcctctgcggctataggtcctatctgatctccttcctcaagtacgacatagagtcccaatttaggaaaaagctgtgtaagctattagacaagctggaaaagatcattaaacaaattgccagcgtgttatga

SEQ ID NO: 12357 - RNA, 1005 nt, synthetic construct
  source 1..1005: mol_type = other RNA
atgactatcgagtcattctgtaaggttgcatggaatctctcctataaccaggtgagatcctccattacaaagaaggactacatccagtttgacatacctaaaaaaaacggcgtaaggacaattactctgttacccgagggctcttcattatacgtgttgcagaggaactttaacaagtactacttgaataagcagggactacccatttgtgtcaaaggctttgtccgcggcgagtcgtatatttcttacctcgaatctcatataggtgccaagtatttcgtaagaatggacataaaggactttttcccctccattaccagcgaaattatcaaagacacatttagtcacttgctgtccttcgatactgatgaagaaaaagaaaagatcctagagctcatctccgagatttgcacatatgagggtgtccttccacaaggggtgccgacctcacctgttatctctaacattgtgatgacaagaatcgaccagcgcattactaaatactgccaaatcctggggatcacctatactagatacgcggacgatatgctcttcagttccaatatgttcgatttcaaaaccaagaaatggttcatcaagaagatcaaattcatcctggctagcatgcactttaagataaactacagcaaactcaagttcagcgaaaatgaaatatcactgaacgggtatgttgtgtcagacaccggaatacggctgagtcggagcaggctgatggatatcaagaaggccattaccttttctaaaaacaatcatacgctgctgaaaaccgatcctaccgggtttcttcgacttgtgaatgagacgtctttggagtacaggaacctgaaggtgtacccatttaatagtgtcttccagttcactcagtttctgatcggctatcgaagctatcttatcagctttctgcgctatgacattgatagtacattccgtaagaaagctgagaagctcatccggaatattgagggagaactggagttttactga

SEQ ID NO: 12358 - RNA, 1017 nt, synthetic construct
  source 1..1017: mol_type = other RNA
atgttcgatctggaacagttctgtcagaacatatttggcaaaggattcgacgaaatcaaggagaagattaacaaagaggattatagttccttcgtgatccccaaaaagagggggatgagacagattattgcattaccaaagaactctgagttacgccgtatgcaaaagctcctccttgataagttctttgctaactactcattacctataccagccaaagggttcgcgaagcatgagagttataaaaactatctcatgccccacatgggagccaattatttcctccgcatcgatatctccaatttcttcaacagcattaagtttgaacacgtggaagagctgctgaaggatttgttcgtgtttatggataaagacgagaagagcaaggttatagaccttatttgggacatcgttagttataatgactccattcctcagggtggagtgacatcgccgattatctctaatttgatctttcgcaagctggatcagaggatactcaaatactgccagttgttcgacatcgaatacacccggtatgccgacgacctcctgtttagttcctacgagttcaattttatggacaaaaagtggttcctgaagaagattaaatacatccttggctccagaaagttccgaatcaactaccgtaagattaaatacggttacaaagagatcagcctgaatggctttattgtatcaaacagagacattcggctgtcaagatcaaggctatttgatataaggcatatcgtgagctacatacggaacaatgaagacgccaaaaggaaagacaaatgtctgctggggattaataaccttcgatttaagcactacgatatcgaaaaataccctttcaagagctactatcgcgtcattcagtttctatgcggctatagatcttttatcatctcttggatcgatgattgcatccccaacatcgcaaatcaaaagaagctgcggaaactggtcaatgaaattgagaaggctattaacatcttgagcgagtatatatga

SEQ ID NO: 12359 - RNA, 1032 nt, synthetic construct
  source 1..1032: mol_type = other RNA
atgaatgcaaaggagattttttgcctcaaaattataggagacagcaattttgagatccttacagtgctgtccaataagaaaaacgagtacgaaaagatcgagatacccaaaaaaaaaggttaccggaagatatattgcctcaagagcaattctaaaatcaagcgctaccagcaaaatctgatcaacaacttcttcagtcattatccgattcctgtggtggccaaagggttcgtagaaggcgagaattacttttcctatatgaaggagcacgttggcagcaattacttcttgcgaattgatatcaaagacttcttcgaatcgatcaaatacgagcactttgaaaacttcatgtacgaaatggaaacctttaaggacaagaacaatgaaggcattatcaaaatcatctggaacataatcagctataacgattacttagtgcagggtgccgttagctcaccaatgatttctaacctgattttcagaagaaccgatcagaggatattgaaatattgtcaggaactgggcattaaatacactaggtatgctgacgacctgctgttttcatcctctaactttgagttcaaaaagaagaagtggtttctgaagaagattaattacatcctcagacagaacaaattccaaatgaactgtagtaagctaaagtgttgtgactatcaaattagcctcaacgggtttgtgatttcttacgataatatccggcttagtaggaagaagtaccacgacatctcacaggtcgtatggtatgtcaacaagtccgacatctatgaaaagaattttttcgacgagctgcataaactagggttctacaataacaaacttcgcacgattaatacctattattccttgctccagtacctgtgcggataccggagctttttaattggatcctacaaagagtgcgagatgggcgatgatacaaagcgtaagatagagtatatcatcaagaagatcgatatgtccattataaaggtcatctcgaacaaatatcccacatactgggtgactaaatga

SEQ ID NO: 12360 - RNA, 1047 nt, synthetic construct
  source 1..1047: mol_type = other RNA
atgcgcatttacaaagaggagtacttttacaactcaattctgcagtgtaacaagcaaaaagtgctcaatggtctggaagccaaatctgaggcgtactttaagtatgaaattcccaaagctaacaacaagaagagaactattagtgctttagataaggattccctaatctacgagctccagtcaaacttatacaagaactttttcagcttccagccgattcccgtttgcgtaaaaggatttgttaagggcaattcctacttagactttttgaacgcccatatctacgacaattactctacttatttcgtcaggctcgacattcgagatttcttcgatagcatttcgaaagaaacaatgatctcaaccctgcaagagtttataaacatcgaggatgtgatcaatgtgatttatgacatttgcaccctagaagacaaactaccacagggagcagtcacatcacctctgcttagcaatcttgtgctgaggcgcattgaccagcgtgtcacactctattgtcagagtctgggggtggcctatacccggtatgcagatgacctgttgttcagtagtaacgaaatcgattttagccaacaaaagtggttcgtcaagaagataaaatacatactgggttccatagacctgaagatcaattacaacaagatcaaatacgggaaggacctcatcagtatcaatggatatgtggtgaactctaacgttaacctgagccggaagaaactgtataatttgactagcgtgctctactttttcaacaagaacaaaggcaagtacaaaaaagtatacaaggtggacaataagatcttcatgaatacaaactggcttcacgatctgaatacgtatttgaaaaacagcaccagcaccaatctggagtttgtctcagtgcataaactgcagaatttcctgattggctatagagcctatcttatatcctgcatctcttactcttccgagaacaaggttaatcagtattcttccaaaatcaagcacattgaatccatcatcaataagttgcttgagctcaatcagtga

SEQ ID NO: 12361 - RNA, 1044 nt, synthetic construct
  source 1..1044: mol_type = other RNA
atgaagatctacaaggaagagtacttttacaattcgatcttgaagcatagcaaggaaactgtcctcaagggcctcggagcgaaatcagaagcatatttcaaattcgacatgccaaaagccaataatgagaaaaggaccatttccgctcttgataaagacaatttaatccacgagctgcagagtaacctcaacaacaatttttttagccttcagcccttgccgatttgcgttaaagggttcgtgaaaggcaacagctacctggattacctgaacgcacacatctacgataattcctcaacatattttgtgcggctggatattaaggactttttcgactcaatctctaaagaagtgcttatctcaaccctcagggaattcgtgggcatcgaagacgtcattaacgtcatatatgacatatgcaccctggaggagaaactgccccagggtgccgtcacatcccctctgttgtccaatctcgttcttaggagaattgaccagcgtattacattgtattgccagagtttaggggtaacgtatactagatatgctgatgatctgctattctccagcaatgagatagatttccgcctgaagaagtggtttgtgaagaaaatcaagtacattctctgttctatcgacctgaagataaactacaagaaagtcaagtatggcaagggattgatttctataaatggttacgtggtagataacaatgtgaatttatctcggaagaaactgtacaatcttacctccgttctatacttcttcaataagaacaaggggaaatacaagaagatctataaggtggacaacaacatctttctgaaccgcacgtggctggaggatctcaataccttcttgactaacagcacatccagtaaactcatctttggctcaatccagaaactgcagaactttctaattggatatcgagcctatctgatttcttgtatagggtatagtagcgagaagaaaattgaccaatactcttcgaaaatcaaccatatcgagagcattcttaataagctcctgcaactgaactga

SEQ ID NO: 12362 - RNA, 1041 nt, synthetic construct
  source 1..1041: mol_type = other RNA
atgtttattttcgacgagaactacttctacaacatcgtcattaaatgcgacaggaaccagctgctgaatatcatcaaggaaaagaatctgcaatacgagagtttcgagattcccaaaaatgatgggatgagggtcattagtgcaatcaaaaaaaacagccaattggtcagattacaaaagaacctcaacagcaatcttttttctaagattcctctgccggtatgtgtgcgtgggtttgtatcaggcgagtcatataactcctatttagtggagcacatcggtaaaaaattctttcttcgggccgacataagcgccttctttgattccattaaaaaggataccatcatcagcatgcttaatgaatttatctccgtgataaacgtgatcgaacaaattagtgaagtggttactttggacgacaaactgccccagggagcgattacctccccatccgtgagcaatttgatatttagaaggatcgatcagagaataactaagtattgtcaggaactgaatgtcacgtacacccggtatgccgatgacatgctcttctctagcgataaactgaatttcaatgagtcaaccttcttttatgccatgattaagaagatcctcaaggagaatggttttgcttgcaacaataagaagaagaagattgagatcgatgagattagcttgggcggcttcgttatttcgaatgacgtgcatctctctcgcaaaaagcttgagaacatcaacaagctaatctacttttttcgaaaggacaagacattcgaaaaacagaaatacctggtcgactcactagtgttccaggataagcattggctgaatgaagttaacaacctgaaactgaaagaaaacatctccttcaaatgtttctcttctaataaccagctcatagattatctgtgcggataccgcgctttcattatttcgatagtgcaggcaaacgacaacaatacagaaaatatcaagcagctccggaaaaagatcaacaacatagagatgatcatcgaggctatcattaagcacagtacatga

SEQ ID NO: 12363 - RNA, 1095 nt, synthetic construct
  source 1..1095: mol_type = other RNA
atgattagcgtaaatcgctacctgaagctgtacagtaagaagtacttcctcactaggattcttgaatgtagtgaggaggagctcgctcaggctaaaggagagaaagggatagtgtgtattgaagaccggataccaaaaaaaggaggctttcgttctatcgtgtcagtgaagcccggatcatccctagcgaagcttcaaaagaagctgtacaagaattacctgtcccagatccctgtgtcaacggccgccaagggcttcgtaaagggttgttcttacgtcaatttcctggaggagcatgtgggacattcttattttctcagagttgatatccgagactttttcgacagcatcacaaaggagaaactggccgaatgcttagaacccttcgctgaaaaagagattgccgacgaaatcatggagttgtgtacttggaatgggaaagtcccacagggcttttccaccagtcctgccttgtctaatctcgttttcagacgcatcgatcagagggtcaggaaatactgtagaagctaccacaaggagatggatcgtcgaattttttatacacgctacgcggatgatatgctgttcagctctgctggtacacttgagttcgacttttgcaagaacaaaaatttcaagcggatgatagcacacattttacatcagaacggcttttcctgcaacgaaagcaagaccatctatgccaaaggagagataagcctctctggctatgtggtgtcaaacgacgtgcacttgagccggcaaaagttatgcaacatcaacgaagtgatttatcagttcgaccagagaaaatcctatgggtcgattagttactcccttgacaaggctacagtcaatattaagaacatcatgtgcaacctgaataagaggaaaatgaagaaagcagatggcactgttatccaatttgacagtctaagcgatctggtgtattacgccgcaggctgccggtcctacctgatgcagatcgcctcaaccgaacacggggacaccgggtatgataaacagattgcaaaaaagatccgcaaactggagatgatcctggattatctctcggaggaattgggtgaagtctga

SEQ ID NO: 12364 - RNA, 1008 nt, synthetic construct
  source 1..1008: mol_type = other RNA
atggtgttgtacagttacgagtacttccttgacaagatcctcgagtccacacaagaggaggtggagaaggccaaacgtgaaaagatattcgtctgttctgagatgaaactgccaaagcagtccggcttccgcaacatagtcagcgtggaaaaagacagcattatgaaaaaactgcagaagaacctgcagaaaaattttctagacaagttgccggtctgtccctcggctaaaggtttcgtaaaagggaattcctatatggattttctggaagaacatatcgggcacgaatactttctgcggatggacattcacaacttcttcgactctatcgccgaaggtcttttggatgaaaatctcaagaacttcgtgagagacgaggaagagatgtcacctgatttagaagagttagagtccggcgcgaagggcagtagaattcgagaagacatcatcgaattatgcacttggcaaggacgtgtacctcaggggtttctaaccagcccaagcatcagtaacctcgtgttccggagactcgatcagcggattagaaagtactgcagggcttatcaaaaagagcagaagagggaaattttctatacacggtacgcagatgatttgctgttcagtagccaagggttcgactttaagaggaataagaactttaagcgcatgatatgtcatatcctcgaggattacggattttcttgcaatgagaacaagacgatctatcagaacggtcagatttcactcactggatatgtgatcagaaaagatgttcacctttccaggaagaaactgcgaaacataaatgaggttctgtaccagtttcgcgagattatcgagtgcgacgagcgagtgcgctctgaaaaaattaaagccaatctgcagatgatcctgcagaatctgaatcagaagaagatgaaaaagagcaacggagatcccatctactttgccgacggcaaccggcttattcattatgttgcaggctataggtcatttttcaccctgtga

SEQ ID NO: 12365 - RNA, 1098 nt, synthetic construct
  source 1..1098: mol_type = other RNA
atgaagaagatctatggctgggactactactgtgagaggatactgcggaaatcacagctgtttattgagaatagtcttgccgaaaaggaaaactcctacatagttttcgacatccgagatagaggaaaggagcggaccatttgccaggtggataagacaagcgggctgtaccaactccaaaacaatcttaatcgcaacctgctggccaaaattccattgtcaaaagccgccgccggatttgtgcgcggtttatcctatcaagactacctgaggagccattgcgggaagaagtttcacatgcgattagacatccaccatttcttcgatcacgtcactgaagagcaagtgatcaaaagtctcgaggaatttgttcaggacgaaaaaatccgcgagaacataggcgaaatcactacctttaacgggaaactcccacagggcgctgtgacatcccccgcagtatcgaatattgtgtttagacgcattgatcagagaatcttaaaatattgccagtccgtccggaaagtccgggaaggaaagaaattctatcaggaggatctgatctacacgcgctatgcagatgatatgatgttctctagcgactacctcgacttccgtcgggacttgtttgtatacaggatgatcaagcacattttgaaggaaaacggatttagcctgaacgtcaagaagacatatatggctgagggggagattagcctctctggcttcgtcgtgggcggtgaggaaaatggctgctctgtgcgtcctagtaggaaacgtctgagagagatcaatagaatactcgcgtatttcgatgcgcgaagggagctggacgggtgtccttacgaggctgacattaaaaaactaagagatccgagggtgattgataatgttaacctgatgtttcccgacgggtcagtggccagattcagcaacaagaagtccctaattaattacctttgtggctatagggctttcctgatcaccttcctcaagggtgaaaacggccagggatcttcacagcgcgcacttcagggaaagatccggaatttggaaaagctgatagaccagtgtcagcgatggtggtttcatatcgagtga

SEQ ID NO: 12366 - RNA, 1098 nt, synthetic construct
  source 1..1098: mol_type = other RNA
atgaagaagatctatgggtgggattattactgtgagaaaatcctgtggaagaatgatgctttcattgcatcttccttggcggagaaagaggagtcatactcaacatttaccatcggcgatcggggtaaatctcgagttatacagcaggtggatcagactagcggactgtatcagctgcagaataaccttaacaagaacctgctttccaggattccactgtctaaggcagctgctgggttcgtgaaagggaagagttaccaagactacctgcggccccactgtggaaagcgtttccacctgcgcttggatatcagacacttctttgaccatgtgaccgaggagcaggtagttgagtcgttgaaggacttcgtgcaggatgaaagaatccggatcaatattgggcagatcactaccctcaatggctgtctaccccaaggcgcaatcacatcaccagccatgagcaatattgtcttccgccagattgatcaaaggatcctcaagtattgccaggccgtcaggaaagtgaaggagggaaagcaggtgctatatgaagacattgtttacactcgctacgccgacgacatgatgttttcctccgaatatttagacttccgaaaagagctgagcttttataagatgatcaagcacattctcatggataaggggttccgattgaatcatgacaaaacgtacatgacagaaggcgagataagcatgtctggatttgtcgtcggaggtgaagcgcacggctgcatggtgaggttaagtagaaaacggatgagagagatcaacagaattcttaactacttcgacaagagagctaaaatagacggcagcccttatgaagtagacgaagaaaaggtgaaagactttcgggttgtcgataaagtgaacgctctcttccctattggtaaaatcgcccgcttcagtaacaagaaggcccttatgaattacctctgcgggtaccgggcatttctgatcacctttctgaaaggagagaacggccaagccctgcatcagcgtgccttagagcgcaaaataaagaatctggaacagctcattgatcaatgccagtccaggtggtttggcatgacatga

SEQ ID NO: 12367 - RNA, 1119 nt, synthetic construct
  source 1..1119: mol_type = other RNA
atgaagcggctctatggctttgagtactacgctaagaacattttgaagattgatctgctgaatcaagatgaaaagaccaagttcttcaacaaactggaaacaaatatctctgagagctatgtgaaattccagattccaaagaaagatgggatgagagacatatgcgccatcgataaatcttccattctgtataccatccagaagaatctgaacaagaatttcctgtcgaagatccctctatcaagcgtggcaattggttttgtgaagggaaaatcctacaatgattttttggcgcatcacattgggaaaaaatactatatgcgtatggacatcaaggatttttttggcttcatcagtgagaaacatatcaaagagagtctcaaggagttcgttcaggagtccgagattattgaatccatcgtaaatatctgcatgagggagggtgaactcccccagggagccgtgacaagtccgacgataagcaatattattttcaggaggatagaccaacgcattataaaatactgtcagagcatacagaacattaggattgctaagaagaactacaacgaagacattatctatacccggtatgccgacgacatgctgttttctagtaatatcctggactttaaggagaacaagtactttaagaagatgatcaagaacatcctatcgaacaatgaattcaaagtcaactacaacaagatgtactactcatctgattcaatctctctgtcaggattcgttattgaaaaagatgtccaccttagccgcaaaaaaatgaaaaacatcaactccatcctctatttctttgataagcgcatcgaatacgataagacgaagtacaacataaacattgacaagatcgaagacactcagttgattaaacagctgaatgacctcaacttaaacacacttaatggccggaaaataaattttgagaacatcgcacagttcatcaattatttatgtgggtatcgaagctttcttatatccttcttgaaaatggacatcagaaaaaccgatagcattaaccttattgagaagaaggtgaaaaagatcgaggaactgatcaacaaaatcaacgagataaatgacttcagaactcaaaattga

SEQ ID NO: 12368 - RNA, 1125 nt, synthetic construct
  source 1..1125: mol_type = other RNA
atgaagatttatacagaggagtttctgcgggatggaatcctcgagatacaggagcaaccttttgagaagcttctggtcgagaagaataagtggtataagtgcttcgaaatcagtaaaaaggacggcaaaagagagatatgcgcgctgtcagacgaagagagcgggcagaaagtcaagcgcttgcagaaaaatttgcttcatcgcttcctgagaaagatcccaattgccgtgtgtgcaaaaggcttcgtaaaggaggagtcatatcagtcttttcttgagccacacatagggtctaaatactttatgcggttagacattcggaactttttttcgagcttttcagaagatttgatctggaagggactgcatgagttcgtggagaatgccgaagccttggatatgatttgtgagctgtgtacatgggagaataccctgccccagggtgctgtgacaagtcccgcactctccaatatcctgttccgcagggccgaccagcgcatcctgaaatactgtcagaccatcaccgaacgatgctctaagaaccgatacagacctgaggctgccggcaacgagaacactctatattatactcgctacgcagatgacatgttgtttagtagcgacttcttcgatttctccaaggaagagtactttatgaaaatgatctcccggattctgaaagactatggatttgagctgaacagggacaagacggtgattagcgaggatcaaatcgttctgaatgggtacgtggtaggtaacgccgtttggctgtctagaaggaaaatgcgtgatttaaaacgtatcctctacttcttcaggaacaaaaatcacgagctataccgtatcgataagcttaaggtgaaaaagacaatcgaaagcctcaaggaattaaattgcttcatggagaagaacaactcagaaagaaataatttcgcgaacagtctagaacttattaattatctggctgggtgtcgcagctggctgatagctattctgcaaatgaggaccgaagacaacaggactagacgaaacctcggcaaaaccaaagtcagaattgagatgctcctctccgaactctcccggtgcgaagaagaaaagcagcggtgggcagaaaggggctga

SEQ ID NO: 12369 - RNA, 1203 nt, synthetic construct
  source 1..1203: mol_type = other RNA
atgtatcgggtaaggttcttccactcactgagtagcccaggaatcaccccaattcggaagttttcggagagtgcttgcagcttccccaagaacattatgaagatctacacactggaatttctctttaagattctcgagttgcagcctgaggaattcagccagattctacttaagaaagaaacggcctacaatacatttgagatccccaagaaaaacggtcgcagattaatccacggtttggacgcaaaagacgggaagcctcttaaaaaactccagcagaatctctaccgtaaagtgctgtgtaaacagcccactgctatccccgccaagggctttctcaaaggagagtcttacttaagcttcctggaacctcatgcgggaaaccaattttttctcaggctggacatccacgacttcttcggatccttttctgagaagatgatcagagacaacctgaatagcttcatcgaggataaagaagccctagaattagtctttgagctgtgtacagtgagcaaaaaactgccacaaggggctgtgaccagtccagccctctccaacatcatgttcgcccggcttgaccagcgtattctgaaatattgccaggcactggaacagaataagcgggagcagttgcatagggaaaaagagtcatggtgcaatgcttcaatatcttacaccagatacgcagatgacatgctcttttctagcgatttcttcgatttccgagagaacttagcattcctgcacatgatatctcgaatcctgggcgagtatggcttccatcttaaccgccaaaagactatgatggccgaaaaggagttgtccatgaatggctatgttgtcggcgaaaacatccggctttccaaaaagaagacatcggagctgcgcagaattttgtattgtctgaaggatcaggaagccgagacttatcagctgaatcaggagctgatggatgatcctcagaagatcctgaaaaagattaaacagttctcctccgaaactcagaaggggagtcgaaccttttccgatattcacaagctgatatggtaccttggtggctgtcgctcttggattatatcagttctccaaacggaagccaagtttgggaaagaggaaaagaacatggtgaagctaattagaaggatcgagtgcgtgttggacgcgctgcaagctatgaccgaggacccgaatcgcaggtga

SEQ ID NO: 12370 - RNA, 1095 nt, synthetic construct
  source 1..1095: mol_type = other RNA
atgcagatttataactacaagtttctgctggagaaaattctgaagacttccgatgagaagctgcatgccgtgctcgagggaattgaatatgcctacgaagagacagagatccccaagaagaatggcatcagagtgattcacatgttgcgtaagacgcctgaggggaggaatcttaccaattttcaaagaaacctggttcggagattcttacaaaaaattccgattgctatccccgcgaaggggttcgtcaccggagagtcttatcagaattttctgatgcctcatgctggtaatcactacttcctgcgaatcgatattaaagacttctttgacagcttttctgaaaaactgatgaaatcaaacctgaaggagtttattcaagacagggaggcactggagactgtgtttgaactctgtacactcaatgctaagcttccccagggtgctgtgacctcgccaatcttgagcaacattttcttccggcgaatagaccagaggatactaaaatattgccagagtatcgaggagaggtatcgtaaagaaaatacccgttcagaaaaacagggcatcaggcgcatcagctacacaagatacgccgacgatatgctattctcatctgatttctttgactttggcgagcatatctatttcctgaggatgctttccaaaatcctaaaggagaacggctttgaaataaaccgctccaagactatgatgtgtaagggggaaatcgggttgaacggttacgtggtaggagatggccttaggctcagccgccgcaagctccagtctgttaaagaaacgctctatttcttccggaaacaagaccaggagctgtacgaagtcgatatgcggaaagcagaggacttgaaggaaagtctcaagaagcttaatgaaatgcgcagagagaacaacaaagaagcacgcgaattccgatcccggcaggactttatacactacctggccggctgcagagcctggatgatcagcgtcttacagacagagcagttactgaagaaggatagtaaacggctcgagaaaaccatacagagactggaagagctgttgaaggccgtggaaaaggaggagggatga

SEQ ID NO: 12371 - RNA, 1083 nt, synthetic construct
  source 1..1083: mol_type = other RNA
atgtttatcaacgaatacgactacttcattaacggcgtattgaaaacatcggagactacactgaagaatgtgcagaaggatatcaaagcaaactacaccactcataagatccctaagaaaaatggggaacggatcatacacgccattaagaaggactctgatctctataacttgcagaaaaacctctgtctgcacttcctggacacaatccccctgccaaaacccgtcatagggttcgttaaggatgagaattatgtccgcttcttgagtcagcatattggaaaacgatatttcctgaggctcgatatcaatagcttttttgacaccgtcaataggaagatgctgcagaagaccttcaaggagttttttccaggctctgacaacacttcactatccacctttatcgatctgtgcaccattgatggcaagctgccacagggagccgtgactagccctgtgatttctaatattgtgtttcgccggatcgaccaacgtatactaaagtattgtcagaacttcgacgatgtatacatcagtaaacgaagcaataaagagtctatcacctacactagatatgcagacgatttactgttcagcagcgacattatagacttctccaagaatgctttctttatgggcatgatcatatccattcttaaggacaacggattcacagtgaataaaaccaagacaaggtgtagcacaaatgagatttccttctcaggctttgtgcttggtcgcgatgttcatttaagtcggaagaaactgcatgagctcaacaaggttatctacttcttcaataaggccgacgaacactcatacaaaaagtacagacttaacaaagctgtgttcacgagtggtgattggctggcgaagattaattctcttgaactggaaggaccctttgggcagaaaaaatcatttaagaccccggaggaactgcttaactatttatgcggttttaggtcctttctcctactgattttgagagagaaccccaacgggtcccctcacatggaacaactggataaaaaaatccacaagctcgaggagatcattgacctcatcttgtgccacacgtga

SEQ ID NO: 12372 - RNA, 1119 nt, synthetic construct
  source 1..1119: mol_type = other RNA
atgctgatagatgtatatgccgccttcgcactaaggacaaggctgattttcagtgagggcacatatagcattttgacaatatattccgggggtaacaacattaatatctacgaagagtcctacttttacaagaaaatcctaggatacgaatccatctctctccccttatcgctaactaataaactggatgcgtacaattcttttgagctgagtattaacaacaaggtgagaaacataaacgcaataaattccaagagtgatctgttcgcttttcagaagaacctgttgaataacttcctgatttatatcccattgccaaattgcgtgtgtggcttcgtaaaaggaaaaaactacctcgatttcctgaaagagcacctcaaaaaggacttttatttacggcttgacatcaaagactttttccctagcttgaaaagcgaaaatatcaaagacgtgctggatgagtacattatcatcagcgacattaacgaaaagacccatgtgctggacaccatcattgacattgttactttgaatggctctctcccccagggggctgtcacgtctccacaggtgtccaatgtcgtgtttagacgccttgatatccgaatccgaaactactgccggaagttcaatatttcctatacaaggtacgccgatgacatgctcttttcgtcaaacgattcacgtctccacaaagacttctttgtcaaaatgatcagcaagattctgaaggataattgtctggagctgaatagatcaaagattaaaaagaccaaggagcaaatagtgctgaacggatatgtcgtgtcaaaccgcatttctttatccaggaataagttgaagaaggtcaacactctcatctacgcctatgagaaccttgacggtaaaaaaaagaagccgaagaacttcaatgagtatcttaatcggattactacgctcgaagacttctttccttctcttcctagcaatatcgaggggagacgtaacgttatcgttaattacctcgctggctaccggagttatctgcttagctttgataaagatacctaccgcgacatctgcgtgacctatcccaacaagataaaaaagatcgaattcatcctgaaggaactgatgtga

SEQ ID NO: 12373 - RNA, 1029 nt, synthetic construct
  source 1..1029: mol_type = other RNA
atgaatatatatgaggaatcgttcttctacaagaaaatactggaatatggactgacccccccgacagatattacttccaacaaggcagacgcctataacacatttgagctgattatcaatggtaagaagagagagataaacgccatttccccaaaatctgacctatataacatccagaagtccctgttggataattttctgacgcacatacctcttccaaattgtgtgtgcgggttcattaaaggcaagagttatctggattttctcgaggcccacttaaaaaaggaatattacctgcggatcgacatcaaaaatttcttccccagtctgaaggctgaaagggttaaagaaaccttgagcgaatacattaagatctcaaactacaccaagaagcaggaagtactcgataatatcgtggacattgtgaccttgaacggatctctcccacagggagcagtaacaagccctcagttatcgaacattcttttcaggagattagatatccgcatccgcaactattgtaggaaattcaacgttgactttactcgatatgccgatgacatgctgtttagttctaatgacgaccggctgcacaaagacttcttcgtcaagatgatctccaaaattctgaaggacaaccaactcgtcattaaccgtaaaaaactgaggagagggcaaaagaagatcgtgcttaatggctacgttattagcaatcatatctccctgagccgaaacaagttgaagaaagtcaattctatcctgtactccttcgagaacatcaaagggaaaaaactagagcctaagaatttcctcgagttttattcacgcctgtccagcaatagaagcatatttcccgattcaagccttacaatcgagaagaaatacgacattctctttaactacctagcgggctaccggtcttaccttctgagcttttctaaggagaagcataaggatacttgcgtggattacagtggtaaaatcaagaaactcgagtacgtgctctcaaagttgaataagtgggcttga

SEQ ID NO: 12374 - RNA, 963 nt, synthetic construct
  source 1..963: mol_type = other RNA
atgttagccatcatagataaaaatctggcgtacaaatcattcgaaatgacaaccaacggtaaggtacgcaatatcgatgctattgactctaaatcttccctgtacaagttacagaggaactttcttgataggttcctgatcgatatccctctgcccgactgtgtctgcggctttgtgaagggtaaatgctacctcgacttcctgattccccactgcggcaagaagtattacttgcgtctcgacattaaggattttttcaactccctgaaggttgacaaaatacggtcagtcctgggagagtatatccaggtgagcgatctaaacaaaaagaatctgatcctcgacgacataggggtgatggtcaccttgaatgatagccttcctcagggggctataactagtccacagattagcaatattctattccgcaggattgacattcggatcaggaattattgtcgcaagtttgatgtcgaatatacacgatacgctgatgatctgctcttcagctctaacaaatccaaactccatgacaagttcttcacaaagatgatcttcaagatcataaaggacttcgacttggtagtgaaccgaaaaaaaatcaagaagtcagaagagagactcgttctgaatggatacgtgattgacaaaaacattagtttgagtcgggccaaactgaaaaacattaatacccttctctactgcgtggagtataattccggcactaaagcatatccacgcacaatcatcgagttttttgacagactgaaaaacgttaagacctgtctgcggcttacttctgacatcaagaagaacaagagcattgtgatcaactattttgccggatacagagcctttctgattaatttttcgaaggtggggtataaggattactgtaaagattacaccacgaaaatcgacagaatagagaaggcattagagatcatccaagaaattaagtga

SEQ ID NO: 12375 - RNA, 1329 nt, synthetic construct
  source 1..1329: mol_type = other RNA
atgaagatctacagtgaggatttcttctataaggggctgttgggatttgatagcagaaccgtgatgaagaattccctcatcgctacaaactcttatcagagctttgagctggaggtgaatggtaaaaaacgcaagattgatgccataaagcctaacaccaagctctattacattcagaaaagactcctgaagaattttctggtgaatattccacttcccaattgtgtatgcggatttgtggaagggaaaaactatctggactttctcaaacctcactgcaacaaaaaatactacactcggctagacattaagagtttcttcaactcgattaagtctgagaatattaacggtatcctcgaagaatacatacaaattaacgacgaggaaaagaaacagcagatattgaatgacttctgcgagattgtgacgctcaacggcagcttaccacagggggccgttacatcaccacagttatcgaatatattcttccgtcgaattgatattaggatccgcaattactgtcggaaatttaatgtggaatacacccgctacgctgatgatatgctgtttagttccaacgaggagacgatgcataaagacttttttatcaagcggattagcaaaatcctgaaggactacaagctgaagctcaacaacaagaagattatccaatctgaaaactctatcgttttgaacggctatgtcgtctccaataagatatcactgtcaaggaaaaagctaaagaagatcaacacattcatcaacgccttcaacaatagtgacggcaaaaagaagaagtttatcggaactgaagactacacatatcggcttactaaatccaagaatctgtcctttactatgaccgatgacctttatatcaacaagctgaagatcatcaactaccttgccgggttccgctcatatttaatgaccttcagcaagcccaataatgaagactactgtgaggattatttcgacaagattaacaacatcgagaaaatgctggagaaactaacaaaggaaggtctgccttataacgacaaaaagagcaacattgcaattatcatcgaccacgttaagttcggccgtgtcaatggattcaacatagaggtgaggaaaatcaataaatcttcccacagcaatagaatgctgtacaaacatctcaaaatgaatctcaacgataggacccttttcgtaaaattttatccctttccgttgaaactggatgagttgataaatgacatcgataagaaagcactgaagaacagaatcctgcagaataatatcaacgagatacgatacgcgttgaagattaatgaaaaaggctga

SEQ ID NO: 12376 - RNA, 984 nt, synthetic construct
  source 1..984: mol_type = other RNA
atggacattctggatgaggttccaaccatcgaggatatcaacgagtactatgacacgttcaatattcaggtgaacaagaaacagagaacgatcaatgccgtgaagcaaggcagcctgctcaggaaactgcaggaaaaactcttggtcaatttcctggagaacatccctctatcggattgtgtatgtgggttcgttaagggcaagaattatttagactttctgatcccgcactgcgagaagaagtactttctccgcattgacatcaaggatttttttaacagtctgaaggtcaatttggtgcgcgacaccctgtcagagtacatagacattaagattcctgatgaaaaggaaaacgttattgacgagattatcactatcactacacttaatggatctctcccccaaggtgctgtcactagcccacagttaagtaacattttgatgcggaggatcgacatcaggatccgaaaatactgcgaaaagtttaaggtcgagtattctcgttacgccgatgacatgctgttctccagcgaaacatccgagatccataaaagcttcttcatagggaaacttaaggagatcctgaaagatatcaacctgcgcatcaattcaaaaaaggtgataaagaccaacgagaaaattattctcaacgggtacgtggtatccaacaacatctctctgaccagaaaaaagcttaagaaattgaacacactgctatacactttcgagtacaacggctcaatcaaaaaatatccccagacctttacagaatatattagaaggctccagagcgtgaatcccattctgatcgacttatcaaaaggtgacgattggtccaaagtgcagattataaattacctggcaggatatcgggctttcttgctgagcttcaatgcgctctctataaaggattatacctgcgacttttccaatcgaattaagagaacagaaaagatgcttgaacggcttagtgatataaagtga

SEQ ID NO: 12377 - RNA, 921 nt, synthetic construct
  source 1..921: mol_type = other RNA
atggtgaacaagaaagtacgtaagattaacgcaattaagacgaattcagtgttacataacctacaaaagaagatcagcaacaactttctggataatattccgctcgccgattgtgtctgtggatttgtcaagggtaaaaactatctcgatttccttctgcctcactgcggcagcaagttttatcttaaggtggatataaaggacttcttcaattcgctcaaagaatctttagtacgggacacattaagtgaatacgttgacatcaagaatcgagaagagaaagacagggtccttaaagaactgatctacatcacgacattgaacggcagcgtgcccctgggggctataacctctccacagttgtccaatctgttgctgcgcagaatcgatctccggatcaaaaagtactgcgagaagttcaatgtgatctacaccagatatgcagatgacatgctgttctctagcaacaatcaggaggttgcgaaacccttctttctcggtcgattgaaagacatcctgatagacttcgagctcaaaatcaactccaagaagaccatcatcgccgagaacaagattatccttaatggctatgtgatttcttccagggtcactcttaccagaaacaaaatgaaaaagctgaacacactactgtacaccttcgagtacaagtcaggggttaagagatatccacggacatttaatgagtttctgcagcggctgaaaactgtgaatgaggaactctttgatttgtcaaagtccatacctgaaactcgcattcagatcattaactacctggctggatatagggcctttctgctcagcttcaataagtccagtattaaagactacacttgcgacttcagtaaaaaaataaagcgcaccgagaaaatgctagacattctgtcagatattaggtattga

SEQ ID NO: 12378 - RNA, 984 nt, synthetic construct
  source 1..984: mol_type = other RNA
atgaatatttatagcggcaagagctttttcaaggaggtgttcgaaatgaaatacgaagatgtaaagaaggtgactgacagcaatatagaggaaaactacaacatcgtgaaaatcccgaaaacaaaggggcacagagaaatatattgtatcgacgactcttccgagctgtacattctccagaagaacatattgatgaatttcctcgatgacatacctatctcagagaatgcttttggcttcgtgaagggtcgatcctacattgatttcttatatacccacgtgtacaagaactacaaaaacatctactacttgaagctagacctgaaagactttttcagttccatcaaatcattccacatcgaacgtactctcgaaaagcatgtccatacaaatagcagcaaaatttccaaagagatcatcgacaacatcgttaaactcactaccgtcgataataaactgccccaaggagcagtcacgagcccaagtctgtctaatatcgtgtttcggttcaccgacattaggatcgcacgctattgtgagaaatttggaattaggtactctcgatatgctgatgatatgattttctcaagtgacagaaaggtcatccatgcccccttcttcataaagaccattaagaagatcctgaatgaatccaacttttatgttaacaaccgcaagactaagttttcaattgggagcttgaatctgaatgggtttaggattaccgataagattaacctgacacgcaaaaaacgggcgaaactgaacacatgcctgtacatttgcaacaatacgaaaaaaaagcacgtacttaccaagcttaatctttctggcttcaacttttcggacttcgaggatctggccaattatctcaatggtacccggtcctttttaatcatgatagccagatctagtaacaacaatatcgttatcaacgagctaatcaaggagattgaggtgaatattaacaagtttctgcagtga

SEQ ID NO: 12379 - RNA, 1014 nt, synthetic construct
  source 1..1014: mol_type = other RNA
atgattatctactctaaggagtttttcgataacaacatcttgaagatcagcaacgaaattgactacattaatgctatccagacaaaagagtcttcctatacccataaaagcattctgaaaaagaaccgattgaggaatatagaggttatagatagagacagtctcttggccaagatgcagattaatcttaaggacaacttcctgaacattatcccaatccctcatttcgtgtacggttttgtaaaggggaaaagctataaggattaccttatccctcacataaacaatatgtcgaagaacaagtactacattcgactcgacattgggaatttttttgacagtgtaactgtcgagttaataaaaaatgccctatccgagtatctttctctcaatgatctgcaggaaaaagaccaaatcatactgaatatagccgatttggtcacactggacggtaaacttccccaaggcgctattacctctccagtgatttcaaatatcgtgttcagaagactggacttgcggataaagaagtactgcgaccagttaaacattacttacacccgctatgcagatgacatgcttttctctagttacgacaacatcctgctgaaaaataatctcatcaatctcgtgagggcggtcctcaacgactatggattcgaactgaactttgataagacgattcgcactaaaaactttatctcactgaatggattcgtggttagcgataatttatccctgtcacgcaagaaactaatcgaaatcaaacggatcctgttcatcctggagaagaataagaagaacaagaacagtctgaaaatcctcgaagaaattaactccttcggcaaatacaagaagcgtaataaatttaccagcgaagaggcattgcacgattatctggccggctatcggagcttcctaatttccctgctccccgataacgatgacctgtggaaggagaaatgtatttcaacaatcaacaggatcgagaaggctatcagcgtgtccttttga

SEQ ID NO: 12380 - RNA, 1044 nt, synthetic construct
  source 1..1044: mol_type = other RNA
atgcaaatctttgataagggctttttctacgaaaagctgatagctaagagtaatctgcacgatttaaacaatgttcgcgacgtgtactatcggaagttcaatatcgtgataaacaacaagaagaggagtatcgctacagtccttgagggtacggctttatataaattgcagttccggctcaagaataattatctggataaactaccccttcccgactgcgtcataggctaccgcaaaggcaaatcttatcgagactttctggttcctcacgtgaagttagataaaaatgaccgcttttttgtgcgtcttgacatcaaaagttttttcgactccatcaacgaagatgtcattaaagaagcgctccaagactatgtcaaaatagccggagaggaagacaggaatcgagtgatatccgacattatcgacatctgcaccctcgaggggaagctgccacagggagcactgactagccctgccttgtcaaacatctgttttaagagacttgacctacgcatccggtcatactgtcggaaattaggctatacctatactaggtacgttgatgatctgctgttcagctcaaccgacctgagcttgatccagccgaaatttatccagatgatcaagttgattctctccgattacgggatgaaactgaaccatagaaaaatcatccagacaaagaacttgatttctctgaatggattcgtcattagtgacgagattaggatctccaaaagcaaaatgaatcatctgctaagccttctgttctgcattgaacagaacctcaagtcccgaaacctcgcagagctgctggaaaaactgaaccagattcgtcagcatgacggcaagagggatttcttgacagtggatgatgtaatggagttcctctctggtagccgggcctacctcattgcctggaattcatctgactcttcggcatggaaggtaaagtgtaccaagttcattcttagaattgagagacagctcgtgtccctggataagaagcacgggcaagagctgagagaggtgaacttttactga

SEQ ID NO: 12381 - RNA, 969 nt, synthetic construct
  source 1..969: mol_type = other RNA
atggattcctttaagatcctcaacaaagagacttggcttcaaaccttaaatatttccgaggaagagctaatgaaagtcgcagagctgaagagcctgttttataagaaataccggaaggagaagccaagtggctacaggactatctatatcatcaacaaagacagcgtactgtactcacttcagtctaagatacagaaaaagatcttccgcaatatattcctcccggaatgtgtgtacggatttcgggagaactgctcctatattgattttttgacacctcacatcagtagcaagaataagttttatctgcgacttgacatcaaggacttctttgaatcaatttcagtcgagtacatcaaggatttcttccagtactatatcgacgacaaaatatctaacgaagagaagacgttcatagttaactcaattatcgatgtcacaaccctgaatggaaaatttattcagggggccgtgactagtcccagtatcagcaatttcgcatttagagaaattgacataaggattctcagctattgccgcaaactgaatgtgcggtatacaagatacgccgatgatatgctattcagctccgaaaacaactaccttaactccaagcatttcattattgccatccaggctatcatcaatgacctcggctataccctgaaccacgcgaagaccctgaagtataaaaatgagatttccctgaatggctacgtgattggggctgacattcgtttgtctcgcaggaaactccataaaatcaacgaactgatctttcagctctcgaagtctgatttctacggttttgagaataacatcgagaaataccacatcaagaaccagttggccggttaccgatctttcttgatacaagtgaatcggcacgttgtggacctgccctatagaagacatttagaagagaggattctgaccatagaaaaactgatcattaagcacttcacatga

SEQ ID NO: 12382 - RNA, 903 nt, synthetic construct
  source 1..903: mol_type = other RNA
tgtctgagccagaagacagactgctacagggtgtacagcaaacaaaaaaaagatggcactaggaccatccatgccatcaaatcagactccggtttgtacgtgctgcagcacagaatgcagcagaagtttttgaacaacatctatcttcccgacactgtttacggctttcgggaacactgctcttacatcgactttctaatcccacatatttccgaggaaaaagacagatgtttcttgcgtctggatatcaaggatttcttcggcagcattcgcatcgacgatctcaaggaagcactaaaatattatgtcagcgatgagatcgagaacgctgaccaagaaaaaatcctcgacaaaatgatcgagatcgtgacggtcgatcagaaagtcgtacagggggctgtgacctctcctatgctgtctaatttagtgttccgacagcttgacattagaattgagcgatactgcagccggtttaatctcaagtatacacgatacgctgatgatatgctctttagtggtcggacatcatacattcactcacggaagttcatggccgccattgctgccattatagagtccaagggattttcacttaattactctaagaccctgagggcagagcaggagattagcctcaacgggttcgtgatcggctccgagctgcgggtaagtagaaaaaagctgcataagctcaacgaaataatgcaccgtttaaatagtcgcgaatttgataagttctccagtgactatgagctttatcacgttaggaatcaactggcaggatataggtctttcctgctgcaggttttgcataccgatgagtcggaagcccgcaaatataagattcaaatcaagatagaccgcattgaagcgctgatgagaaagtactgtaagatagactga

SEQ ID NO: 12383 - RNA, 978 nt, synthetic construct
  source 1..978: mol_type = other RNA
atgaagtcttggcagattcataattacgatagcctgatctcagacattctggagactagcccagaggccctggaagaggctttcaaaaatgtagacaagtactacgagagattaaatctgttgaagtccgacaaaaagtcctataggactatttatcgtcttaaggaaagccccgtgagcatcatgcagaaaaatctgcttaatcgattctttagcaacatttacttcccttctaacgtttttgggtttagaaagggttgttcttactttgactatctgaactaccaccagatgatcggcgatgggacatattatctgcgcctcgatatcaacagtttcttcgataacattacgatcgagaactttgaggactctatcacatattacatttcagacgattgcagtgatgaagagaaacagaaaataatcaagacgctcctcaagattacaacctataaaaaccacttcgtacagggctccataactgctccagttatatccaatatagtcttccgagaactcgacataaggatcgaaaaatactgcttcaccatgggcattaaatattctagatatgccgacgatttgctgttttccagccccagcagttttcttcactcagacaggtttatccggatgatcatcaacatcctgaatgataaaggattctccattaaccatcaaaagacactcaaacaggtgggacaattggtcattaatggctacgtggtcgacagtgcagttcatctgtcacgcaataaactccggaccatcaataagattttacacaccatcgagaaaaagaaatcgaaggtgctactgacttcttggggcgcccctaactatagggtgttgaattacctgtccggatacagatcgtaccttatcaacgtgatgaagtactgtgacgaggaaaagaagaacaagttagggaagaccctagcgcgcatcgaagatataattaaccggtactattga

SEQ ID NO: 12384 - RNA, 990 nt, synthetic construct
  source 1..990: mol_type = other RNA
atgaacaacataaccatcaaggataagactgcctttctcgacctgatcatggagaatccagaagatcaggataagtttgatcgagagaaagccactacgtaccgcctgttcaaaataaaaaagcacaatggcgaccgccatatttatgctatcaagcccacttccattatctgtaaataccagcagaatctttacaagaactttctgaccaaactgttgtttccggagtgcgtatgtggtttccgcaaggacaggagttatttcgacttcctggtccctcatatcagcaaacagaacaagcggtactacctgcggcttgacattagtgatttcttcgaatctattcagctgtccgatgtgaaggattgctttcagcactatcttaatgacgatatggatgaggaggtcaaggatgatatttgcaactacttcataaagatcgtgtcatacaagggtaaaatcgttcaaggggctgtgaccagcccagctatcagtaatttagttttcagatccctggacattaggatcacaaaatattgccaaccctttggaatcacatataccagatacgccgacgacttgctgtttagctgtaaccacaagaaaatcttttcatacagcttccagaagtgtattcaggcaatcttgtcggacaaagggtttaccttgaacattgacaagaccctgaagtttaaggacgagatcagcctgaatggctatgtgattggagagagcattagactatctcggaagaaggtcactaggcttaacaaaatcctctttgagctctctcagtctaacttcgatgaactaaaatccgaacgcgagagatatattttaataaatacgctcgccggctaccgagcgttcttcatcaattcaatgcggtatatgatagaccctgtgcagacaaaaaaaatggaaaggaagattcagcaaacagaaaaggcaattgacaaaatccgtgcactccccatccagcaaatatga

SEQ ID NO: 12385 - RNA, 975 nt, synthetic construct
  source 1..975: mol_type = other RNA
atgattgggtttagaattacctccaagtctcaattctttgatgaaatcgtagaaatctctgaggaaaaaatggccctcgctctcaataataaaaaaagcgcctatcactgctacaaaaaagccaagaaggagggttttagaatcatctatgccatcaagaagaacaatcttatctacgaattgcagaataagctgaagaactccttcttcatgaacctgttatttcccgagtgtgtttgcggcttcagaaagaggaaatcgtattatgactttctgattccgcacatctcttcaaacgagcctcgctattaccttcgactggatatttccgactttttcggctccatcgacgtcgacgatatagaggaatcattgaactactacattgatgacagcatatcctcagaggaaaagcagctgattatcaacaacattattggcattaccacaatcgatgacaaaatcatccaaggagctctcacaagccccatacttagtaacttggtgttcaggtctttggacattcggatcgaaaagtactgcaaaatgctgaatatcacgtatactcggtatgcggacgatatgttattctccagcgattctagttatatccataactacaggttccagaatatgattaagacgatcatcagtgagaaagggtttaatctgaacactaaaaagaccctgaagtacaagaatgaaatttctctgaatggatacgtcgtgggaaattcaattcgtctaagccggaaaaagctgagccagcttaacaacataatctatgagatgggcaagaaacagttcaaagggtttaagtccaacaaagagaagtacacaattaagaacaagctggcaggctatcgagcattcctcatccagagtattccatacattaatcgcaacaatctagtgcagataagcaaaaagataaccaagatcgagaatctcataactaaatactgtgctgactga

SEQ ID NO: 12386 - RNA, 981 nt, synthetic construct
  source 1..981: mol_type = other RNA
atgaatagttttcgaattgagacgaaagaggagttcttcaagatcttagattgtgacgaggacacctttacttcagccattaaggacaaagaaaaggcgtacttcaaatataagcttcagaagaagatcggtagcagatacatatacgggctagtaaaagataacctgatctacacactgcagaaaaagatcaatcgcgaaatcttcaagaatatcttgtttcctgactgtgtttacgggttctgcaaacgcagatcttatttcgactttcttgtctcacatatctctaacaaccaacgtaaacactatctccggctcgacatcagtgatttctttgactcaattgagattgatgacatctatcagtgcctgtcctattatatcagcaatgacatatctggtgacgaccgagattacatcctgcaacttatagtggatattacaacgttgaacaaccatgctattcaaggcgcaatcactagccccgccatttcgaacatcatttttagatcgctggacatccggatagaaaaatactgtgagaaaatcggcgtccactacactcggtatgccgatgatatgctctttagctccgagagtagttacatacattcctacaagtttaccaacgctattcaggccatcataagcgataaagggttctacctgaatcgcaaaaaaaccctcaaatgcgagaacgaaatcagcctcaatggatacgtggtgggaacaaacatcaggttatcccggaagaagtacaagtccatcaacaagatcatttatactttgacaaccagctctttcaccggcttcaagaacaattaccaccagtacattacaaggaataaactagcaggatataggtcttttctgattcagtattccaggtatatccaagatgaaaatcagaacaagaagattcagaagaagattgaaaccatacagaatctgattctgaagtattgcgtgtcttcaatttga

SEQ ID NO: 12387 - RNA, 1050 nt, synthetic construct
  source 1..1050: mol_type = other RNA
atggacagttttaagatagccaataaggaggaattcattgagcttattgatgtgtctgaagacgaactgaaggaaatcctgaaaaataagcagaacagctaccacaaatgctttgtgaataagaaaaagcgggattccattagaattatctttgctctggaccagaagtctaacctctttaaaatccagcgagcattgcagagaaagttcttctgtaacttttatttcccaagcaatgtctacggcttcatcaagcaacggaattacattgattatctggagcctcattgctctaggaacggaacacgcaattttctgagactggacatcaaagacttcttcggtacaattgacatcaaccacatcaaggaatgtctgaagtattacattgcggatacctgtgatgaaaacgagaagaagtacataatcgattcgatcgcagagattgtcacgtacgagaacaaattgattcaaggcgcaattacatcacccgtaatcagtaacctcgtttttaggaaactagatataaggattgagcgcttctgtgaaaaaaacaatgtaatctacacccgctatgccgacgacatgcttttcagcgggattgactttgacgtgcataaacggacttttatcaatatgatcgccaccattatcaaagattatggattctccctgaactataagaagactattaagatgcacgaagagttgtctataaatggttatgtgcttgggcgtgatataaagatcagccgaaagaaatatgagtcagtgaattgcctcctctactacatcaattccaagattaacaagatcccgatcagtcggagctttaagtaccagttaatcaacatactcgctgggtataggtccctgttcatacaagtgttaagatacgttcatgacagccacaacaaagaggtcatccagaaaaaaatagccgaaatcgagaaaggcattaacaagatttcacagttcaaggagaacaatattggagctaataaagactacgaagataaaatcctggaggagatctgctccaaaaagtga

SEQ ID NO: 12388 - RNA, 1095 nt, synthetic construct
  source 1..1095: mol_type = other RNA
atgctgcatagggcctccaagcagggagatgacacgttaaaagtttggagagtcgataactacaatgactacttcagcaacatcgttaaagtgcccgaaaaggaattcaagagcaaaatcgcggataatgaaaagaagctcttttactctgagtacattaacaaaaccaagaagaatggtctgcgaaaaatttattgtgtcacagagaactctgacctgtataagatccagaagaacattaagaacaacttccttgataacatcatgctgagtgactcgtcttatggctttagaaaaggccgaagctattacgactttttagcatcccacaagagcttctacagtggaaagtattttctgcgccttgacattagagattttttcggatccattgagtactctttgatagaggacgtggtcagttattacttcgtggtcggggaaaatcttacctcgtcacaaaaaaaggagctgctgcaaaacacactgagttccatgacctatgaaaataaggttcctcagggggccatcactagccctacactgtccaatattgtatttcgtcagctcgacttacgcatcgaaaaattctgccagaatgtggatgctatttatacccggtacgccgatgatttgctgttcagttcatacaacaggaacctacactctgccaagttcatcaacttcatcagatccattctgatatccaagggcttccacataaaccattcaaagactattcggactaagaatctcatcagcctcaatggttttgtgatctctgagaatgatatccacttgtctcgtaaaaaacttgcatcactgagccggatcctgttttgcctcgaaacaccaaagtggataaattccaaagccagcttcgtgaatctgaacatgaaactcaaaaccgagggcgacaaacatctgtttgaggggaagtacgcattgctaaatttcttggctggctttagggcttttatcataccaattgtgaggtcaatggacgacagcaagctccggaagaagcagcagaaatatattgtacgcatcgagaagaccattgaaaaaatcgagaaacttccgcccaagaaatga

SEQ ID NO: 12389 - RNA, 1050 nt, synthetic construct
  source 1..1050: mol_type = other RNA
atgaaagtatggaaaattgagaactacgacgactatttcaactttattgtgaaagtctctgaggataacattaatgaactactgtcacaggatgagaaaaagaaatactacagtggctatattgagataaagaagaagatcgggaaaagaaagatctattgcgttgataaagacagtaaactgttcaagctgcagaagaacattaaaagcaacttcctcgacaatattatgttgtccgacgcctgctatgggttccgcaaagggtactcttattacgattttctctctcctcacaaagacttttacagtaagaagtacttcctccgaattgatatcaaggagttcttcaactgcattgactattcaataatcgaggatgtgattaagcattactttgtggtgggagataacttaaccaagtctcagaagaaaaaactgatccagtatactctgaaggcagtgacctacagaaaaaaggttattcaaggtgctatcacctcacccgtccttagcaatataatattcagacagctggatcttcggattgaaaagtactgtaagtacatagacgttatctacacaaggtacgccgatgatctgttgttctcctcctataatcgttttctgcactcgagggcctttattaatatcatctccaggatcctcaacagcaagggttttgacatcaattatagcaagatcatccgggcgcggaattcagacaaaaatagtgtcagcatcaatggctacgtcataaatgacgaaatccacttaagccgcacaaaacttaagtctctgaacagggtactgttttatctggagaacacaaagtggaaaaactgtaaaaatgacttcgagtccttgaacaaaaaaatgaaggctgaaaacgatatccataattttagcggaaagtatgagcttgtgaacttcctcactggctatcgagcatttatcatatccatcgtgaagggaacggacgatattattctgaagcaaaagtaccagaagtacattgaacgcatcgaactattggtgaagaaactcgtctga

SEQ ID NO: 12390 - RNA, 1041 nt, synthetic construct
  source 1..1041: mol_type = other RNA
atgaaaagatggaggatcgataattaccgcgatttcttcaacaaaatcttaaaagtcgaggaggacgagcttatagcactcctcgaaaacaaaaacaatgtgtacagctcctataagattaagaagaagaaaggccaccggactatctactatctcaaagataacctcgaccttgcgaaaatccaaggcaatctcatcaaaaacttcctgtccaatattatgttgtccgaaagttgttatgggtttcgctgcaatctgaattacatagactttttggaaaggcacacaaccctgtccaatgatagatattttctgcggttggacataagcaacttcttcgaatcaatctctatggaactactgattgatgtgctgagttattacatagaagacagcgaatatgtgacttcagacgagagcaacaagatcgtctattacatcaaggagattgtgacatttgacgacaagctggtgcagggaattgctacctctcccatcattagcaatatcgtatttaggcagttggacattcgtattgagaaatattgccggaagctcggagttgaatattctcgatacgctgacgatttactattttcgtcggagattaaaagcaaaatccacggtgacttttttattggcaaaatagccaagattctgagtagcaaatccttcaaccttaaccataagaaaacgataaaggccgataaggagctttgtatcaacggttacgtcgtgggaaaaaatatccgcatctctcgtaagaaaatgcagaccatttctcgagtactttttttcctgaacagtgttaacatcaagaagaatttgaacttcctggatgagctaaaccataagctcaagaatgagatgaaggataataggatttacttcctcaataagatccagttaatcaactacctgtcagggaatagagcctacctgatatctattctgagatattccgacgagtacttcgggaaacggatcattaagaagatcaacaatatcgagaagctgattctggagctggatgaatcatga

SEQ ID NO: 12391 - RNA, 1044 nt, synthetic construct
  source 1..1044: mol_type = other RNA
atgaagattgctaagataaataacagggagcaactgtacaaaggcgtcctcgaatacgaaaaacgtattatcgacaccgctttaacagattctgccaaaaaacagtactatggcaagcgcataaatattccaaaaaagggcgggagccgaggcatctactgcgtagattcgaatacattcctctacgaagtccaaaagtccttcgcaaagaacttccttaataatattcccaacagcgatgcagcacacggcttcgtgaagggcaagaactactactccttcctcaacgcgcacgtctatccatattcaagaatcagtttcctccgtcttgacataaaggacttctttgaaagcattacgtcagaaatggttagaaactctctggactattatgtcagtaatgacgatccccgaatgcatgatgaggtgcttaatattatgactgacatcgtatgttacgaagggcgcttgatccaggggtccccgacaagtcctgccatctctaacattgtttttcggcctgttgacatcagaatcgagcgctattgcatgtctcagggagtggtgtacagccggtacgcagatgacctgctgttttccagcattagcggaacccagttatccgagagatttatatctggtattaaggccatcctgaaggataatcattttaggttgaacctgcagaaaactattcggtctgtggattacatctctctgaaagggtttgtgatagagggtcaaattaggttgtcaaggaagaagaccaagtcaatcagacaggtgctgtatttcctagagaaaaatcgctatgagaataccaatgcctggatgtcgtccttcaaggaggagatggagggcctgggtaacgactccgccatggacatcaacaactcatatagtctgaaaaactacctcgccggaatgcgggcttttatcatcagctccatcaaagagagtggagatatctattacaaaaagcgggctgcgggaattatcagcaggatcgaaaaacagatagacgagattgaaaacaaggggtga

SEQ ID NO: 12392 - RNA, 1056 nt, synthetic construct
  source 1..1056: mol_type = other RNA
atgggagataacaatgggatgaacgggtggaacatacaggataaggaagacttctacaatcgcatcggtgtgaaaactgacctggagctcaaatcctatgtctcttttttagccaagaacaagtactacaaacaatcagtagagatacccaagaagaatggtaccaggctgatctacaatattgataagactagcgaactctaccgtatccataacaacctaaagaaacagtatctcgacaggatatacattagcgacgctgcctacggctttgtgaaaaagcgctcctattatgactatctggtaccccacctgaacaagtacaagaatcgccattacatgagaattgacatctcttccttctttgattcaatcaaatccgagcacattgagaatgcgttcggcttcatacttaaagaatgtaaggacagggactatatcatcgagagattaaaagagatcttcctgtacaacggaactttggcacaaggaacaccaatcgcacctgctgtttctaacattgtgtttagagagcttgacattcgtatagagaaatattgcaacaaacggaaagtcgtgtatacacgatatgccgatgatctgctgtttagttcggatgacaatacggtgatgcgcaaggatttctaccgggggataagaaagatcttgggctctcggggcttcaacatcaacgaagataagaccatcaatatgtccgatagcattgttatgaatggaatcgtggtcgggaaaagtattcacctgtcaagaaagaagcttaaaccaattcgaaccatgctcttcgccttgaagctggttgagaaggaaaaagacattgaaaagtgtctcaaatgcatcaacaacacatttcagaaggctaaaattgataagaccttcaatagcgcaatcgacgtgcggttttacctgtgtggctataggagttacctaattcagatccttaagtattgcgaagacatcaatattgagaacaggttgaagaagatcataaatagcattgaaagctacctgaatggtcctaaaaaatcatttctctga

SEQ ID NO: 12393 - RNA, 1008 nt, synthetic construct
  source 1..1008: mol_type = other RNA
atgtggggaaaaaagacattcttcgaacctaacccattcttcaagcgccggctccagtggctgtatcgacagctcttaccattgtacgagccgcccgcatgcgcctttgcctatatcaaaggccgcaattacgctcaatacagagcagtgcaccagaagaatcattatatctacgccatcgacctcaaatcctttttcaacagcattacaacaccacaggtgaacaacgcccttcaatccttctgttcccctgccgtggccggttatctagcagacgcgctcactgccgagggtgttctccccattgggtttcctactagtccactgatatctaacatagtcttcaagaacctggatgagaaaattgtggagtttgcaaataaagaagggctgagctattcaaggtacgctgacgatatcctgattagctctaacaagaaaatcacaacccagaatctgaatgcctttgtatacctaatcgagaagaatggcttcaagatcaacttcaagaaattcaagaaggtggataagaacaccaatctgtctacgctgagcttgaaagagcgtagattccttaatttgcttctgcaccagtggcagaaaaaaggctacatggacaccaatctctggtttctggcagctcataggaagagttatgccaaaccgcaagatgctttgagtaacttccttcgggcgaagatttttccctttaaggatgacttccctaagctgtgggctcagtttgagagaatctctaagcagtatccctaccagactcaaaaccaaatggaggaaaatagcatacctgccactgagaaaacgcagattatgaaagaacagcccaagtcaccaacccagtacgctcaggcacccgaaccagttgttgtcagtgctactacaaacgcgaccaaactgaccttttccgcctcgcggcaggaattagaacagtaccgaaggacccctgtctccggatcaattgacaattttttcaagaaccactgccaatga

SEQ ID NO: 12394 - RNA, 1509 nt, synthetic construct
  source 1..1509: mol_type = other RNA
atgaagaagctgaacagctataaagtcaagaaactcattgacagatacatgacttcttctgaagagctcgggtcgatgttattgcgagcatccaatctgagcagacacatactcaacaccattgatatgaacaataccgacaaagcaacccataaattcctgtcaaattacaaggaggagatagacgatatccaggagcacaattcgtatagcctcagcaagtttagtagctctaaactcggactgagtaataggggtatcctaagtacttccatgtctctggctggaagttattcaaaatgggacgctcggcattgggtcagttatcgcgaggatgacaataggaagacacagttgtataaagaaggatcagagatcctctccccatctccatccgggatcgagtttgactttaacaacgatgtgttcatgggcgaggtaatcggtaacattaatcaattgatgggagtgattgggaagatgtccaattccgtgatctttcgacatcgattcgtggatggccggcgcatctccatgataaatcccaagctggaaaaaagcctgcgcgatattatagaggcggaatttaagggctatgctaagaacttctataagatgtacaacagctttcacctgaatattggctcaaatagggagcacgtgaccgggttcattaagggtaaaagctacattgatcatgctagggcgcacttaggctgcagaagcgccgtctcaatcgatatctcaaagttctacgataacatctcactgctcaacatcatcaacaacaacctcttctacaattcccttttgtcttttttcaagcaggagacggggctgccattcgaagcatcttcttttaaggaaggatatcactatgatctcctgtccaagctttttggacttatgaatgttcaattcgtgggcttgatgacttttctaacacataacggactgcttcccaccggtgcccattactcccctaacattagcaacctgatattatctaacgtcgatctgcacatggtggacgagatcaagaacatcaatagtaacctaaagtacacaagatacgccgacgatatctgtattagttccgacaaagacaaggatgagaatggggaatactacttgaatatggacttcattaagcggctggaaactattattaacgatcacggctttcacctgaattacgacaaaacaatgattatgggcgccagcgaccgtaaaaaaattgccgggataattcttgaccatacggcaaatcctcccagactcagcatcggcagtaggaaaaaactggagctgcaggagcggttcaatggtaaagactggaaggaacttaccacatctgacataggaaccatcaactgggtgaagaccatcaatgtgaaccagtataacttcgtatgctcggggatcacaggcgaacgcttaatgcctatcccgcggggctgtgaacgtgatcccatcacttcactggtcgttgacgccgttcctttttga

SEQ ID NO: 12395 - RNA, 1296 nt, synthetic construct
  source 1..1296: mol_type = other RNA
atgaaacgtctggccttgaaaaggacccgatataaaaagctgaggaagcagctctgtataagccggctgccaaagaataacaatgatctttccgcggtgtcttttctggctctctacatcgattttctcaagttatacagatcaaccctgatactgtgctgtagtatcgtgtattctgacagcattgcgattgagatctccaagaaaaaaaagaacaaggacttcttcaaccaacatgatatcgctctgtttgactctctgtatctttccataatcagcgactacgatctctacaagaaagacctgaacgaaaaaaacagagctgtggtggttgcacggatagatcgcaatagtaaattattgatgccggtcttcaattccctgtttgagctatttggaagcgtttcaaatacgtttatctttcgaaacgtggtgattaacaatcggcagctgtccataatctcggatagcattgatgccggtttgacctaccacattaagaagaacaataaagccatctcactctttttctccaggtattatagcatcttcgttaaccattactcactaaatgacaatgtgtatgggttcattaagaacaaaagttgcgttgataacgccaactaccatcttgacaactcacccgccagcctcattaacatagacatcaacaagttcttcaacaattgcactgtggtcaagtgcttgaagaataatgttttcaccgacactatcgacctgtttgacgcctcagtcgatacaaaaatcgccttcagcttcggtattatttctcttctgggatactgtacacacaatagtgtcttccctactggcgcatcgtttacacctgtattgagtaacatcatgctaattccagtggacgtcgctatcaaatcttacctgtccgaaacctttgggaacaacgtgtgtaatattagatatagtcgctatgtcgacgacatatctataagctctgatcgcgcgaaaatcaataaatcttacgtgctgacaatcgatacaattaagtgcattgagagtatcctcaacaattacgggttctatgtaaagtattccaagaccagcatcgcaggccccggcgataaaaaatccgtcaacaatattatcctcgacaataataaccacaagttatccattggaacggacaagaagcttaagtacaagactattttctcaaagctgtttgctgatgaagagcacgactatgtggtagcaaatctgccctacatcaaggatatcaacaaagaccagtacgattacatcactgagcagaaatga

SEQ ID NO: 12396 - RNA, 978 nt, synthetic construct
  source 1..978: mol_type = other RNA
atggattacaacaccgtgattactctcctcggccatgataacgaaagctggcaaaatctgattgcaaatggtatccgctattctgtctttcagctcccaaaggccaataagaagctgcgtctgatagaggcaccgcagggcgagctcaaacgcacacagaaatatcttaacaacatcctgtacgccgagtaccaccctcagagccccgactgtgtccatggatttattcgaatgaaagctgctccacggaacatcttgtctaacgcaaggactcacctggggaagaagtacctaatcaacattgacctgaaggacttctatcaccagataaccactgagagaaccacagacctgctttggaagcggtttcccaatcttctgcccaacgaagtggacgaattgaacaaaatcgtggtaaaggacgatagactcccaatgggggcccctacatcaagtgttttatcaaatatggcgtttcaagaatgcgatatggcacttatgacgtattgcgaccagcataagattgtgtatacaagatatgtcgacgatctgtccttcagctcgaataaacagatcaacagcgccatcttagaaggcatctacaccataattaagctgaatgggttcagtgagaatcctaaaaaggtaaaacactatggcgagtctgatgttaagatcatcaccggaatcgcgatgcagggactccactggcatgtgtccgacgacatgaagtcaaggttggaaaagaatatgtccgagtaccggaagctacgaaaactgattaacaatctcaaattcctgggcgtggaagctaaggccaaaacgaaactgaaaactttgaaaagggctattgccggtcaattagagtttgtgaaacagatagaggggatcgattccgatttctaccgctctatgaagaagatatggaagcaaagcgatgccgataccgtcaacgttgacctgagtgtgtacatttga

SEQ ID NO: 12397 - RNA, 993 nt, synthetic construct
  source 1..993: mol_type = other RNA
atgcatgccctgtttaaaaatgaacctgatcagctggcccagagcttgaattggcccgacgactaccaagatgtgatcaagaagcagaattaccatcagttctcaatgccgaagaaggatggcactctgagagcaattacagctccaggtaacaaactcaaatttctgcagaaaaccctttcccacgccttccagctgacctatctgaacaagatccccgattgtgtgcacggatatgtgccaggcgacatccatccagaagttgggacccgacacattctcagcaatgcccaggttcactttggagctaaatacttgctgaacttagatattgacgacttctttccgaacctcgatagtcttcggatactggatgctctgcgctactggtatcccgaaatgccccaagctactcaagagctgttggtggggatctgctgctacaacaatcaacttcctatgggggccccatcttcacctgtcttgtctaacatgtgtgtgcaccagatggatctcgccttacttacactatgtgctcagcaccaggtcacctattccaggtacgtggatgatatgtccttctcaagctccagtgataatctgctggccctggagcccgctttgatagaagcactccagtctttcggctttactatcaaccaggcaaaacgtatgcatttcggacccgagggccctaagattgtcaccggccttatcatggacgagacagacataacggtaaatgacacattcctcgacaatctaaacgagtgcattaaggaatattcgcagctcagatggctctctaggcagctggagatggacaagaagtggctacaatccaaagttcggttcgcagcgcagagcattgagggacagctggcattcttaagtcaaatccagggtgccgatgacgcggtataccaaaagtatcataggaagtttgacaaagcccagagcatgcgccctccaaactacgacttttatttttga

SEQ ID NO: 12398 - RNA, 1017 nt, synthetic construct
  source 1..1017: mol_type = other RNA
atgaatatcctgaacttacagaacgcgtctaatagagtgcagttttgtaaagtcctggctatttccgaggacgccctgaaaagcgctctggcaaatcacaagtactataccttcaaagttaccaaaaagaacgggaagctgaggaaaatcgaagatcccaacgatgagagacagtatgtgcagcaacgtctgagctttgagctctacccactgtacaagacggttctgccaccttatgtacatgggtatatccccacagctatttcccaaaacggctcaaggtctatcttatctaatgcagaggcccacctaaattgcaacttcatggtgaacctcgatctcctcgatttcttccatcagatcaccataagtaaaattcgaggatgtctgagcaaagtctacaagatacgaagtctcaacataattgacctaattgtcaagatagcatgttacgaggggcggcttcctatgggttccccatgctcaccggtgttgtccaacatgatagtcattgacttagatggagccctgtttgactattgccaggcccagaatatcacttacacacgttatgtggacgatctcagcttctctagcaagcttgaaatcaccggcgtccagatcgagactctgaagaagatcattctcaatgagggtttcctgctgaatgaggaaaaatttcgcatctttcaccagaacgaccccaagaaagttacaggactggttgtgcatcaaggcaaacttgatgtgtcagatgactaccttaattccctctcgagaaacatcaaaaagttgaagcggattaagcggacataccagcacatgagaatgcttcatcctgagttgaagactaatctccagtcacggtaccgcctgatcaagagtagtgtagcgggccaactatccttcgtgcaaaggattttgcagcccgaagacgaaaggtgccttgccttggccgaagagttcgatgacgctcgcacctctagcgaagtggtggacctgcacctgtatttttga

SEQ ID NO: 12399 - RNA, 1692 nt, synthetic construct
  source 1..1692: mol_type = other RNA
atgtattctaagaaagtgaagacgcctagtgatttcctccttctaagcaatgagcttgaaaatatccgagactttagcggactggccgtcctgctcggcgttaaccaggactatttgctaatgaatatcctcccgtcttacacttgtttcgagatcaaaaagaagagcaccttgagaaaagtctactaccccgagtactatgtgagtgaaatccagcgcacattaaacttgtacctgactgcttcttacctcacaaactattatctgccaacgcaactccctgtgcactcatatatcccgagaattaccctcacagaacaatcagattccgatatctgtcgtaataataaatccaacgccgaagtccacttcgggtccgaacgcattctcaagctggacttagccaacttcttcccatctatcaaatccatccacgtgagggacggtcttcggcgactgctgcccagactccctcagtattgtattgagtggctggtccatctgactacatttgagggttttctgccagctggcgcacctacttctccaaccatttccaacattattctctacgacttcgacaaattcgctaatagcataaacggaatcaagtatagtaggtatggagacgacctgaccttttcagccattgatgggcgcataaatctgaagcaggtagagcgagacgtgaagattgagctggaaaagtggcagtttcagatccaggaggccaaaacctttttccttaggaagggccagcggctgcgcatcacaggagttgtcctgaatgagaagctcaatattagtagggagtaccttaagtggttacgcgctgtagtatactcctgtgagagcataggtattgagaaagcagcaacgaaatatggcgacaggtactttgagaaaatgttgaactccacaaggaagaagtaccgctatatcggggtctatgtggataaaggtctgatcaaaaaatgcataaccaacaaagagctcgtctccttccttaaagccagtctgctgggccatataagctacgtttcctccgttcgtgggaaggatgatgtgtacgttcagaacctgagaaatcggtttatcaattgcctgagggaagaaggcttggaaaagaaggagatcgaatttgaagcgaagtcatttaaggagaacgagaatctggtgtatattactaacgccacctcacaatcggtagtgtactatgcctatgtgttcctgaagtctgctaagttaagtgatgatgacattaatcgacttcggaagcacttctcttataaagacagtagcaatatcgacttcaagaaaattaaggagaacttcatcaaccagtcaatttacttcctagagctgtacaattacatgttttaccgggaccggtttaagttgttctacgaatcactatcggatgatgaatggaatcagctttttaaccgtgaccagaatttcgcgaataagagaacttatcccagatggatataccaccttgattttaactgctctaacatcagaaacaactataacgaggaaggcgtgttccatcccaatagcggagtgttttttgaagaggagaaagcaaaccaagtgtacaacgcatacttgttggaaaaaaacttcctcgatcagttagggatgcggacctgcctgatctgccaaagcaatataagcgagttcacatga

SEQ ID NO: 12400 - RNA, 981 nt, synthetic construct
  source 1..981: mol_type = other RNA
atgaaaaacaagagcgccttttatcacttcgcaaagtctttcaatttggagcaggaggacctgtacctggtttactccgcacccacctatcatacctttgagatccccaagaggaatggcgatctgcgaacgatctatgcaccagccccaaacctaaaaaaaatacaacgcaagatcgcagagaagctttcaaagtactactcggagagcttacctgctagcgtaatggggtttgtgaagacagccgcctggaaaaaaaaacgggacattgtgagtaatgccagaaagcacattaaatccaagcacctgataaatatcgacatcgagaattttttcccttccataaaaaccgaccatgtggctcgtgtcctgaacgaaatcatcaagctcgataacgaaggtgttcagatcatacggcaggtgttaatgaaagatgattccctgccgcctggctctccagctagtcctatcctctcaaacctcgtctttaagcccattgacctcgccattgaacacttctgtaagggacagaagattatttacaccagatacgtggatgatcttaccttttcctcaaagaaggaaatcacaaaaactcagatttgcactattgcggacattctgacaaaatacaatttcagggtgaatgaggacaagactgtcatctataaaaagaacgacatcaaagagatcactggaatcgctatagtagacaagaagttgaccctatgcgaaagcacaattgaggagatcaagaacaacattttgtactacaaggaatggaaacagcagatcctgcaacaatatggtcccaacgagtctgttaggaagaagattagtcatatgcagcggagcattaaaggccagctgaatttcgccaaacgcatagatggggagaaaggagaaaagtataacgaactcaaagagctttacgaacactctctggatgaaaaagagttcgcgttcaaggtgtatatctga

SEQ ID NO: 12401 - RNA, 1200 nt, synthetic construct
  source 1..1200: mol_type = other RNA
atgactaatgcccctgacagtgccccccttactaccccttcagggaaaaagccaccaggactgtccgttacactgaccgtcgaaagacaccggctcctgcatgtgattcttgaccccgcagcctggaggatgtttcgggaggccctacaaacccgcggtgcttggagcagacgtggacgaattctaaaggcgacgttggtcgccgaggattttcgcgggtggtcaccgaggccttacttgccacctgactcgcctgactggagtgaaaccgtcatggaactgcaccccccaaccgaaccggctgcattcgagaggctgatcgcaactgcgatggagcacttccgaatcctcgagcaggaagacgctgctgcctttgatcgcagtctgagaaacacatgggagaaggttaggcgggccgcgatggcagctcatgctcttgcaccatctcagctgccccgcccctttccggtgtatgcagctcggctggcggccatccccaagaagaggccaggagagtttcgggttatagccgtccctgatagggcacaactggctgccgggcgatccttgctgccctatctgcactctcgactggatcccgccctgcctatccacggcttcgtacccgggcgcaacccagtgactaatgcacagccccatcgcggcttcggatggtccctaactatggacctggccgatttcttcgatcatgtaacagccgacaaactcgtggacgccggattgccacgtagcatcgctcgcttgattacagatagagatggcgtggcccgacaaggctacgcgacaagccctgccgcaagcaatctcgcttttcagacagtagaccaccggatacttgctcttcttgccgcagaatgtcctggcgccgtgtatacccggtacgccgatgacctgacgatttccgccaatgacagagaggctttaatccgcgtgcagcggaacctcgaagccttaattgccagcgcaggcttcaaagtgtctgcgcgcaaaacccacgttctcgcggctagggcagggagaagggtggtcacgggtgtggccgtgggtgaaactgatctcagagctacccgttctgccaggagacggctgagggctgctgagcatgcagataacaggatgcaggccagaggcttaagagagtggtcactcctgaaagcaccacgtgacaagctcccgtga

SEQ ID NO: 12402 - RNA, 1146 nt, synthetic construct
  source 1..1146: mol_type = other RNA
atgaatgactatatcacccttgaccttaaggggcgtagtgagaatggacggtctaggcaagtccatctgacaggagagggcctaagagaattcggagaaaaacttgaaaagaatggtttgcagaccgaagcgcccttaattgttagggcactttttctgcggggtgaagccggaaacttggactcccgcccctgtttcaacggtaatggctgggacggcaatatgctggaaattcacctggcaccgggtatcggcagcaaagtggccgaggcaggggtcgaggcttatctcgacgtgacattcgaccggaaggccgatgggctgttcgataggaaatggagagccgaaatggccaaggtgcggggaaactttccagggtttccaggggggggagtagccccttttccagcattcgatgcccccttggtacggatccccaaacgccgacctggcgctttccgcctgatagccacacccactgcagaccagaaaagagcggcaagatggctgctgcccaccctggataagtggattgattaccggctccctatccacgggtttgtgcacggccgcaaccctgttacaaacgcgaaagttcatataggatttcgattcagcctgggctttgacctcgaggacttctttgatcacgtcaccgtaaagaagttggtggccgccgggctgcctcgttcattagctgtggccgtgaccgatggggcaggtattgcccgtcagggatacccaaccagcccaactgcggccaatattgcttttcaggaggtggacagagctctcctccgaactgtggcccagctggaccagggagttgcttactctcggtacgccgatgacctgacgttttccgcagattcctggagcgtgttgcgcaggttaaggggcctggtcgaggagctcgttccacgatatggcttccggatctcacacaggaagacgactagttggtccgctttcgccggtagacgtatgatcacaggcgtcgctgtgggcaaggatggagtgtgcgcaccccgcgaaatccgcaggaggctcagagctgctcgccatcaaggccgagcacctcaggcctctggcctagctgagtggaacagagtccgggagccgcatgtcttcaggagatcggattga

SEQ ID NO: 12403 - RNA, 942 nt, synthetic construct
  source 1..942: mol_type = other RNA
atggcagccaggtttgcacgagggccgcaaggcttacagagcgatccatcccacctgaaaacaacagggtcccatactagtaaccgcgcggctatttgtggactggtcgacgtgttcatagttgaattcggaatgcaagtgctgcgcatcccgaagggtaacggaaaggtgagagtggtttacgctccttctgaagaggagaaggcagaactgaggtccctgctccccgctcttgtgaaaattgctaagcgacgatgcaatctcgaagtcgtacatggctttatgccaggtcgctcgcctctgactaacgccctccctcacgtgggatatcagtacactgttaatatggacctacaggatttctttgacaccgtcctcatcacacatgtcatgcacctcatcccaccccagattttggccaaggtgatgcggtatggcgcagcccgtcagggtttacccaccagtcctcttgtggcaaatattgccgctgcccagttggactgggatctgataaccgccttgcccgaggatgtcgtttacacacggtatgccgatgacttatcattttctttcgatgaccagaaactgaccaaggagctacctttgctggtaaaaaagatggtggaggaccacggcttcgctgtcaacacggctaagactaaagtgcaatgggcaggggcggggcgcagaatcatcacagggatcgcggtagaccacagccgggtttttgcaacgagagaagtgcggaggaagcttagggcggcccatcaccagaataacaagggctctaaagccggactcaccgagtggtgccggctgaaactccccgctctttacctggccgagcagaccagacgtggcaagaaaagcaaatcacaccatagggccgaggaaccagtggtcgaaaagagcaataaggagaggcgctccctgagactgtga

SEQ ID NO: 12404 - RNA, 1293 nt, synthetic construct
  source 1..1293: mol_type = other RNA
atgaaaattttgaagatcccaaagaagaacggcaagtatcgaactatttacgcccccgatgcagaggaaaagagggcactcaggggcatcgtgggaatactgaatcaaaaatgccagcatgtttgcgacccagccgctgtgcacggctttatgcccctgaaatcaccagtcaccaatgcattggctcatgtcgggagaaagtacacagttagcttcgacctcgaagatttctttgatacagtgaccccagaaaaagccagtaagtgtctgaccaaagagcagaaagagttggtcttcgttgatggagccgccaggcagggactgcctacatctccagccgtcgccaatctagcagctaccgacatggatcgcgccattcttaagtggatcgaaaagtcaggaaagtccgtggtgtatacccggtacgccgatgatctggctttttccttcgatgaccccgagcttattcctgtgatacagaaaaaggtgcctgagattattaggcgctccgggtttcgggtgaatacagacaaaaccactgttcaggccgcggtcgctggtcggagaataatctgcggtgtcgcggtcgatgatgaaggggttcaccccacccgggaagtaaagagacggctgagggctgctaaacaccagggaaacgagttggaagccgctggattagaggagtggtgtaaacttaaggtaccgtctggcaagcgacaaaaggcaagggagactacggaggggctcgacgagttaagaaagcattggaagctaaggaagatcgacatggcaaaagcagtgagccgtaaggtgatccccgaaaaggacctgggggacaattgttacattacgaacgacccagcctattttatgggaatgtctacttttaccactggctggaaaagctgcatgcggatggacggcggggagtaccgcaaaggtgtgatggcttggctcgcactgccgggtactagcgtagctgttttcctttcggatcgcacaatgaacatcgcgggcgttgagcgccgtaggatgagagccagatgtctggtccacaagctggagaacgggcagctggtgtatgaccgactctacggtaaccccgacgatacacccgtgctggtaaaaaaattagaagaggccggcatccggcctatacgcgagttcgcagggaagggcatttacgtggaaggagacgtccctgcgagtatggccatgccttattgcgacaacctctgggaagaaaaaatcaatatcaagtccggcaaacgagtggtgagattctatgtgtga

SEQ ID NO: 12405 - RNA, 1296 nt, synthetic construct
  source 1..1296: mol_type = other RNA
atgaagattgtgcagatccccaagagaaatggagagtacagaaccatttacgtccccgataagaaggaaaaacagaaattcaagaacctattgggcgagttaaatagaaaggccaagaatattctgtcaaatgcagttcatggattcgtccccggaaggagtccggtgacaaacgccctggctcatgttggttacgagtacactatatcgttcgacttagaggacttcttcgatactgtgacacctgaaaaagttagcaagtatctcacaaaggaggagaaggaaactgtcttcgtggatggcgcagcacgccaagggttgccgacttcccccgtggttgccaacttggctgctgcggacatggataaagctattctgaagtggatcaaaaagacccagaaaaatatcgtgtacacacggtatgccgatgacctgaccctctcatttaatgagccagagctcattccagtgatcaaagataagatccctgagatcgtcaaacgaaatggcttcaagatcaacgagaaaaaaaccagggtccaggccgctattgccggcagaaggataatttgcggaatcgcggtggacaaaaacgggatttacccaaccagggaagtcaaaaggagactccgagccgccctgcaccaaggaaaaatacggcaggcaaagggtctggaagagtggatgaagctgaaacttccaaactcagagaagaaggaagagaagataaaacggattgaggaagcgaaggtcctcatcgaactgtggggtattaagaaaatagatgtagagaaggcactccgggagaaagctatccctgaaatggacctcggggataattgctatatcaccaacgaccccgcatatattttcggcatgagctattttactacagggtggcgcagctgtatggctcctgacggcgggtatggaaaaggtgtggtgacctggatgatgcttagcggcacatccgtggccgtgtttctgtctgaccgtaagaaggctacggggtccgtcgagcgcagggtaatgcgagcacgctgtctggtacaccgcctgcgtaccggcgaactggtatacgaccgtttgtacggcaaccctcaagatatcgagtttctgaagaaaaagcttgaagagcacggaatcaaaagtgccagagaaatgcccaaagacagtaaactatacgtggttgggaacgtgtctcggtctttgcctcagccatattacgatacgcttcggaaggaaaaggtggttctgaaggaatcccagaaaaaggcctatcgcttttttatctga

SEQ ID NO: 12406 - RNA, 918 nt, synthetic construct
  source 1..918: mol_type = other RNA
atgagacggatattaatcccgaagagccaccggacctggagaaccatctatgttccaggacctgcagagaaagcacgactgcgtgggcttgtgcccgtgctccataggctcgagaggtccgccgcagaacgtcacggaactattcatgttgcccacggctttgtaccccacagatcacccgtcacatgcgccctggcacatctcaactgcgcctggacgctaacagcagacttggccgattggttcgaccacattcacgagtcacagattgctcatggaatcgaactggggggcggagatcctaacgttgctgcgcagctctgtgtggacggggcacctcaacaaggactgcccacatccccgatcgcagccaatctggctgctattcccatggatcggtggatcctggatcggctccctcctgatgccgtgtatacaagatacgcggacgacctgcagctgagcttgcgcaccgctccacacgacccacaggccatcgtaggtatactcgaagaggccgcctctcacatgggctggcagatcgcgcctcataagactcgcatttacgatgcgcgaaggggtcacaggataatcgtgggtattgctgtcggctctcggtcgatcgctatacctcggaccaccaggcgccgattaagagcagccaggcatcagcgaccccaacatccgcatacacagggcctggaagaatggtgtagactgttgcttccacgcgctttgaggcctcgccgtcgactacgctttgagcaagctaccgacactccaccagccgggctttcctccctgagtacgccctcttcaagaattagtcacgccggcactatcgagaggagccagcagcacaaaccagggcttcgccgggtgttcagattcagcgtccggaatcagagcagtccctga

SEQ ID NO: 12407 - RNA, 972 nt, synthetic construct
  source 1..972: mol_type = other RNA
atgaataatgactactccaacactcagggcggtagtgtcaatgataaccagtggaaggaagacctggatggcatatggtcgataaccctgacaccaaagttgagtaacatttacaacgtactagcctatggggaatggctttccgatcccaataaaatagaagccctgagcgtcaaaaaaattcacgtagacactggtggcaagaaacggttgatctactcacctaacatggattctaagggattctatcaggccatcttacctaagttaaatgagacgttcgagaagatggaggagcgagctgtggcgtatggattcgttcccaagagatcctgcgtcgaccaggccctccaacacgtgaactatgcatacaccatttctcttgatatcaaggacttctttgaccatgtgaagattaaacatgtgaagggtctgatcgacgaggaacttatcccttatctgtttatcgatggggccgctcggcaaggattgccaacatcaccgatggtttctaacatcgcatttaacgccattgaccttgaaataatcacctttctggaagaaagaatgggctttaccactagcaaacccaaagctgagcgagacatgttcttctgggacctcgacctggatttcgaccaagaacagaaacggtattatgcatacacaagatacgcggatgatctctctgtcagcttggatcagtacgaggacattgcacgcgttattaacggagtgcagcgcattctcctcaggcacgggttcgagctgaatgcccgtaagacgaagatcctagactccaataatggcaggagggtgatttgtggagtgggggtcgatgaggagacagtgtacccaactcgcaagaccctgaagaaactgagagctgccaaacaccagaagaacctgtcaagcatgtttggccatagggcttggatctacagtatcgataaaaagaaacccgtgcggtga

SEQ ID NO: 12408 - RNA, 951 nt, synthetic construct
  source 1..951: mol_type = other RNA
atgaacaatgattattctaataacgaaggctcttcagtaaatgaaaatcagtgggaggacaacagcaacggggtctggtctattacgctgaccccaaaactgagcaaaatatacgccgatgtggtctggggggagtggctatcagagcctgggatgatcgaagtgctcaatgtcagaaaaatacatgtggatacagggggtaaaaagagacaggtctattcccctgatatgaatagcaaggttttctatcaagcattgctaccaaacctgaatgaaaccttcgaaaagatggaggagcgcgccgtagcttttggctttgtccctaagcgttcctgcgtggaccaagccctccagcaccgcaactacgcctacacaatatcccttgacatcaaagactttttcgatcacgtgaaaccaaagcatgtgaaaggtttgattgacgaagagctgatcccctatctgttcattgatggagccgctcgacagggcttacctacaagccccatggtttcgaatatagccttcaacgctatcgaccgggagattattgcatttctggaggacaagatcaccctgatcgcggacaagccgaagtatggaggctcatcttggggaggcgaggagaagaaacgctactacacttacacccggtatgctgacgatcttagcgtgagtctggactcctatgatgacattgcgcgggttatcaacggagtacagcgtattctcctccggcatgggttcgatttgaacgccaggaaaaccaagatcttagatgcaaaaaacggcaggcgagtcatctgtggcgtgggtgttgatgtggaaacagtgtaccccactagaaaaactctcaagaagctgagggccgcaaggcaccagaagaatcttagttccgtgtttggacaccgcgcttggatttacagtatcgacaagaaaaagcccgtgagatga

SEQ ID NO: 12409 - RNA, 951 nt, synthetic construct
  source 1..951: mol_type = other RNA
atgaacaacgtttactctaattatgagggctgtggcgtgaacaacaatcagtggaaggaagaccaaaacggcgtatacagcatcactctggcacccaagctgtccgagatttacgctgatgccgtgaaggatgagtggtttttcgaaccttcaaaatctgacaccttatcagtcaagaagatcaatgtggacaccggagggaaaatccgaaagatctactcacccgatatgcagagcaaggtcttttatcaggctcttctgccaagtctgaatgaggcctttgataagatcgaagagcgcaccgtgagctttggattcgttcccaagagaggttgcgttgatcaggcattgctgcacctgaactacgcttataccatctctctcgatatcaaggactttttcgaacatgtgaagataaagcatgtgaaagggttgattgacgaagagctcatcccatatctgtttattgacggcgcagcccggcaaggactacccacatcccctatggtcagtaatattgccttcaatgccatcgatagacagattgtgacattcttggaggacaaaattggacgggtggcctcgcgccctaaagacgaattcttcttcgaccttgaagatgatctcaagtgctactgctcctacacacgctacgcagatgacctgtctataagtctaagcctttatgaggatgtcgcgcgagtaataaacggggtgcagcggattctcttaaggcacggctttgagctcaacgctaggaaaactaaaatactggacgccaaaaatggtcaccgggttatttgtggtgtgggggtggacgaggaaacggtatatccgacacgtaagactctgaaaaaactgagagcggctaggcatcagaagaatctttcctccatcttcggccacagggcctggatttatagcatcgacaaaaagaaaccagtcagatga

SEQ ID NO: 12410 - RNA, 915 nt, synthetic construct
  source 1..915: mol_type = other RNA
atgaatgacaaccagtggaaggaggaaattaatggtgtgtggtcgattaccctcaccccaaagctaagtaaaatttacgcagatgctgtatggggcgaatggctcagcggagacggcaaaagcgaggccctgacaatcaaaaaaatctgcgtggacactggaggcaaaaagcggcagatttacagtcccgatactcatagcaagctgttttaccaagctttgcttccgaacctcaacgagacgttcgaaaagatggaagagagagctgttgcctttgggtttgtccccaagcgctcctgtgtggaccaggcccttcagcacatgaactatgcatacaccataagcctggatatcaaagatttcttcgaccacgtgaaacccaagcacgtgaaagggttaatcgatgaggagctgattccttacttgttcattgacggggctgcgaggcaaggtctgccaacctcccccatggtttctaacatcgcctttaatactattgatcgggagattgtgaagtatatcgaaggaaaaatcggcctgtccaacacaataaagcagacggacgacttctttatttggggcgatgaaaatgattggaagtatgcatacaccagatatgccgacgatctatccatatctctgaacgacttcaatgagatccctcaggttataaatggtgtgcaacgcatcctcctgcggcatggattcgagttgaacgcaaggaagacaaaaatccttgacgcgaagaatgggcgaagggtaatctgcggggtcggcgtcgatgtcgaaaccgtgtatcctactcgtaagacattaaagaaactgcgcgccgccaggcatcagaagaatctctcttcagtctttggacacagagcttggatatactcaatcgacaagaagaaaccagtgcgatga

SEQ ID NO: 12411 - RNA, 1935 nt, synthetic construct
  source 1..1935: mol_type = other RNA
atgcatgagttaaggatcaacaaggggaatggaaagtttcgcagcgtggtagcggttgggaaagaggagcggtatttttaccgcgaactgctcgagaaccaactggaacaaaccctaactggccatcttaaggaaaatggcctgttcaatgtagtccacggccggaagtattctaatactgtggcaaacgccatcccccaccagcgatatcagtacaccctctctgtggatctgaagagctgcttcgatagcatgaccagagacgtagcagccaagaacggttttcctgatctgccggaggactgctttgttgctatttctacttcctctgagcccgttgctgcccaaggcctgccaacgagcactgtcatctgcaacctactgctggtgaaaaccgacataaagatcctgcacctcctccataaaaccttcaagggagaattcgcctacacccgctatatcgatgacctgacaatctcgtttaactcctttaacgaaaagaaatacaccaccttgcttagtaatttagtgtatctggtgtcgcagagtgggtttgaagttaatatgtccaaagtggaactccagcgtgccttggacggcaggagacgcgtctgcggtttggccgttgacgagggcggagtttacctgcctcggaaactgaagcggacaatacgtgccctcgagcacaaggagtctatgaacttatttccatcaaaacagactcgaacacttaggggcctgttagcatacggcgaactgaaactacccaataagctcggggcccagcaggaggatacggaatctcttatcaagtcaatagtagtgtctggcgagtggggaaaaaaatggctctgctatcttattgaacttagtagcaagcaatccaaaaatcccggacaagagatcttttgtttccgagttccacacaccttggacgatggttccataaggcagctggtggaggcttacaccatccaggagagttccattgagaatgacagaaagacactggacataaatcaggtgtcatccactgaacagcccgatatcagaacactgtccagctacgacattatcgcaacacaccatgaagtcgaggtgctggggtgtaccgatgcacagagcagcaagctgaaacaggcctatttcgagaagcgagtgaacttcacaagtcaggatcggaaaattctcgggttcctcgaaaggcgtgaacccattcctagaagtttacgcgaagtgattacaattccaccaaacacaaaaaagttggacgccctcgtgtgcgcaattactggactgttcgattcagaaacgatcttgaacatttgtaagcgcgagatctggctgtctggagcccttgagaacgtgctgaacgacgaagacaggctcttgttcctgagccaacacccctatgcttacagatacatgctccactttgtcaatgaacgcgatctggtcaaagtgcttgagtcaaacttctactcagctaagcatatctttcctcacattaaaaccgcacagatgaagcgagcgctaggtaatactcgggagctttataggaaactggtgtctactaactcatacggggctatgtacctggtgccacctgaatggttcaaaaaggagaggttcatttccttatgttctgagtactttaacctcacgagcgtgatgctctatgaggtctactcgaggtccgtcgcgttctattacctacgggaaagactttatgatagtaactttgagtgcgcgtccctggacgacgtcatccgccagtgtaaggctcataccttccgggtggtcgagagcgaattccctgccgctaaaaatttggatcagaatgagatctgtaccgtagagttgagagtgaataagctggttacagagatacagagcagatggccgtggaagtttgtcattaagaatatgggctga

SEQ ID NO: 12412 - RNA, 1164 nt, synthetic construct
  source 1..1164: mol_type = other RNA
atgaaggacagaattgagaaaattatcacgatctccaagaataatgggaaattcaggaaggttttcgtgcccacaccatcttacgccgaacagcttaataagaatctgaagtacctgaacgagatcctattggaaagagacaaatgcaaagtcaatcacgcttttctcaccgggaggaattcagtgaccaacgcaatgcaacacattggctaccggtattgtctccagctggatattgaggattttttcgactctattacctctgaaagcgttaagggccttattaacgatgaagtcataaacttggtgtttatagacggatttctgaagcagggtctgcctacatctcccatgatatcaaacatagcatttataccggttgatcaggctatactgaatttcgtaaagaatctcgatgaaaacatcgtctacactaggtatgctgacgatttaactttctccttcaacgacattagatgcaaaggtgtgatccacaagcggatcattaagatattggacgaatttggcttcaagattaacaacaagaagacaaagttccagaaagcagtcaacgggaatttcatcatcacaggcattagtgtgaatgagaaaggtgtcttttccacgcgtaaaactaaaaaaaaactccgagccctagagcatcagtaccaaaagaacatcaagttcatcatcaacatcatcgaagacattagcttcatggaaaaagatatccttaagttagtgaacgtgctgaaactgctgaatacctactataagaacaaggacaacatactgaattggaacctcaagtttttggacggattcctcaatgaggcctgcaatatctttgtgagcttttcagggaatatctatatctccgacgttaaagagatcggacgatatcacaagtacctgaaatataacagtgagtacaaccatatcatcaacaatcataccgatttcaagtggattaaataccggaaatacaagattaagctggaggacattatcaaaaaatgcgacgagtgtcgctataattttcactcggtaattggctttcgcggatgggccagctgtgcgcttcctaagaaggagaaaaaagatgccaaggtgaatcagtccagcagtaacattttcttcgatgatgataacatccccttttga

SEQ ID NO: 12413 - RNA, 1164 nt, synthetic construct
  source 1..1164: mol_type = other RNA
atggagaatagaattgctaaggttatcaccatcagtaagcacaatggcaaattcagaaaagttttcgtacccaaatcttcttataccgagcagttgaacaagaaaaggaaatacctcaacaagatactgctggagagggatgaatgcaaggttaatcacgcctttttagcagagcgcaattcagtcaccaatgccatgcaacatatcggttaccggtactgtttgcagctggatattgaagacttctttgattccatcactagtgaaagtgtcaaagacatcatagacgacaaagtgtgcgaccttgtgtttattgacgggattctgagacagggactacccacaagcccgatcgtaagcaacattgcttttataccagtggaccaggctatcctgaagtttgtcaaaaaactggatgagaatatcgtgtatacccgctatgcagatgacctcactttcagcttcaatgacatcaagtttaaagatgtgatctacaagcgggtgattaaaatactcgatgctttcgggttcaagatcaacaacaagaagacaaaattccagaagtcagtcaacggcaatatcattattacgggagtggccgttaacggcaagggagtcttcccaactaggaaaacaaaaaaaaaactgagggcgattgaacaccaatatcaggccaacataaagtttctcatcaagatcatcgaagaaattagtgtgcgagagaatgatgagtccaaactggtgaacattttcaagcttctgaatacctactataagaacaaggacgacattttgtcgtgggattgggaaaaacttaacttcctcttaaatgacatcgaagcaatctttaagatcttctctagcgatatctacatatccgatacaaaggagctgacgaaataccagatgcactacatccataactcaatctattactcaaacgattccgagtgttttaaccggaacaattatactgacttcaagtggcttaagtaccgtaaatacaagataaagagcgaggacattattaacaagtgtaatgagtgccgctataactttcattctctgattggctttcgaggttgggccaactgccccctacctaagaagcgggagaaagggaataagaatagctccaacttcgacaatgatattccttattga

SEQ ID NO: 12414 - RNA, 951 nt, synthetic construct
  source 1..951: mol_type = other RNA
atggatgacttcaccgagtatcatttcgagggaagctcgtggatcactccctggtattttccatgttggaattctgaatgggagtgggagtacgatgacaagatctatagaactatccatgagtggaacgccgcgggcagaatcatcaagaagggggagaaaaagaaatgctacctaccctgcagaaagcgcctcgtcttcacaattgatcagaccgccaggttcgacctgttttacatctctaagaagaacggaaaattccgacgaatttttagcttgtaccgtaagcagaaagatcagttgcggaagcttatcccatacctcgagaaaatattactgaagcacgatgacgacaaggttaactatgcatttataagaaaccgcaactgtgtggagcacgctatccagcacattggctataagtatacagtgtccatggatctggaaagtttctttgaatcagttaaccgcgaacacgtgtccaaatacctgaccacgaatgtcatggaccagtgttttatctcaggggcaccgcagcaaggactgcctaccagccccctaatcgccaacctggcctttctcgattgcgataaggctattctcaattcccttgaaaagtacaacattagctctgtgtacacgcggtatgccgacgacctggtagtgtccttcgacgacaaaaaagatatagggaaaatcatcttcctgatcacaaatattgtcaataaggctggcttcaaagtgaataagtccaagaccaaaatacagtctattaaaaacgggaggatcatcataactggcgtagctattgacaataagggtgttaggcctaccaggaaaacattgaaaaagattcgggccgcaaaacactcaggcaatgataagagtttaagcggtcttattgaatggtcaaaatgcagtctgcctaagactcatccacaaaagatttga

SEQ ID NO: 12415 - RNA, 957 nt, synthetic construct
  source 1..957: mol_type = other RNA
atggagatagaggaatacaagatcagtaaaatacctaagggaaaaaactcattcaggctcctgtatatcccaacacccaccctgaaaaaaaagcttcagtcacacctatcttatctgcagtacaagaatctcgagcttgacgaacatagaacgtgccacgcattcttaaagggaagaaattgtgtcactaacgctctccagcacgtcggctacaactattgcgttagcatggacatcaaagacttctttgacagcgtgcggccacatcacgtagagaacaaggtgtctcgggaggttatccaggattgttttatagacggtgcacccaggcaagggctgcctacttcgccattgctctccaatctggccctgttggatgccgacgctaaaatcatagaattcttgaatcagttccgtgtagtgcatcgatatactcgctacgccgacgatatttccataagttttgatgatgagcgcgcgactggaaggatcatcttcattgtgaacagtgtgctcgagtcctacggtttcagcgttaaccagaagaagaccaagattcaatccaaagagaacggcagaattattattacagggattgccatcgacaaaaatggcctgtttcctacaaggaaaaccaagcgaaagatccgtgccgcctatcatcaaaagaatatttcaagcgtccgcggactggaagaatgggctaagtgtaaactccccaataacacacctaagaacccgaaacggtttattagaatcgtgggcaaaacgctggtgtcttgcatgcactgtaatcagagcaacctgatctgggcagagcagtaccccggccgcacatttcttgtcaattctgaatccgggagtcggcacaagtgcaaattcttgaacgctatccttagccaaagggatctaatgacccagctgaagaagtgggggaccagaacctcatttttatga

SEQ ID NO: 12416 - RNA, 1464 nt, synthetic construct
  source 1..1464: mol_type = other RNA
atgcagacagagtttactatcaagaagatccctaagggtaaatcatttaggaccctctatatccccagctccgcttacaaaaagcatctgaaaagcaaactgccactgctactcgaacgctatatcctctttgaaggagacaacggattttgtcattccttcctccccggccggaattgtgtaaccaacgctatcccgcacattggcttcgcttataacatatccctggacatccaggactttttcgacgccattacgcctgaccatgttaccagcaaaatatcccgagagctcatccaggattgttttatagacggcgcacctcggcagggacttccaacctctccgctgatagcgaacattgccatgatcgacatagataatgagatcgtggcctcaatctctaagttgacctccgaattcgtgtacactcgatacgccgatgatatttgcgtttccttcaaccagaaacagtatttataccaggccaagtacctgataaccaatttactgaacaggcacggcttccgcgtgaacaataagaagaccacatttcagtcacttaagaatggaagactgatcatcaccggtattgcagtcgataaagccggagtgcacccaactagaaagacaagacgtaagatgagggccgcagagcaccagggtagcgagagctcttatcgcgggctgcatgagtgggctctgtgcaaacttcccggtcaagggatttcccactcacaggaactgcaccagatttctcctaagagtatctcttgtcagttctgcggggaacaagatttagtgtggctacgaattggcaagagcaagttaagactgtattccaaaaccacgaagatgatccacgattgcggccaacataagcggctggatgtgtttgagcatctgactgcactgggcttcacaaaattcgagacatctcggaaaccctggtttacagggttctacatcttgcagcaggaatcgctgttgctcctatttaggaaacgtggcattgatatctacaggattgatttcctcgaatactttcacgactgtaccagtcctgcggaagtcattgaggacgtgaacagcactctggtagaccatgaaatgtatgaaaccactacagagaacaatgggagtgatgaactgtacttggaggatcacgtccgggaggagctcctccaagacaatcagatcgatgagttccaaagaggatttacgcctagtgaactctgcagagacattttccgccccgagtctaaatatcttagtttgatggagagggttaattacaagaagtttcccctgaaagtccacaagttcatcctgtcattgactactccaattaacttccgcgaagagttctactcggcctataataacgctataagccagcaagcaaaaaatgggacactagattttgacgaccttgaccttatcgactgggacattccattctga

SEQ ID NO: 12417 - RNA, 3054 nt, synthetic construct
  source 1..3054: mol_type = other RNA
atgtggctccagtcctctgaggctagagagatcttcgacacagacttgacaaagacaataggcatcgacgcagccgaaatagagaaatttagaagagaactcgccgccgtaccttctgccaccttggtaaagttctggtttggcgcacagaggacttcggaacccacaacactggagaaacacctgcgggagaagctcagaaccagggccgcgctgttcagctgggtgcatggacctggaactagcatagcacgcgacttgctttacgtgaaactgccctcctctgaaaagaggcgtctagtcaacctgctgctggcctcgcttaggtctaggatgccatggatcgagtctagattaattcacgcaatggcctttcgcccagctgagttgaacagagttgctgagaaaacggtggggaaaacgaagggtttccagcagtggggacctctgtatagaggcgtgaaaatcggcaaaagaaggggctataggcagctgtggattcccaacacccccctcaaggctacccagggggctctactccgactgattgcccctggactggccagagtactgcaaccttttgtctttggtgccagctcaggacggagagggccaactttcgagaatgcagcagcccatctgggaaaagcctacgtggccaccttcgatctccgcgatttctttccgtcaaccagagtgggcgacgtcatacgcgggatccaatgggccgcagaccatggccatctgctcgtcgacgaaacacgcgtgccaagttatctcgaagagaacccccaggtccgttcacttaggtggacagacgacgcaatggttttggtggcacggttggccacctatcgggccagactaccacaaggatccccactgtccccacttctggctaatgtggcattcgctcgcttcgacgagagaatcctggatgccctcgggagggagtttggcaagagggagttcgcgtacacccgctactttgatgatttaaccatctctttgtccggtgctgccgccagggacttgggactcaagcagacctccaccgtccgggaccggattgagcagaagttgcaagaggttctggaggggagcagttttgccctgaatgcatcaaagagccgttgtacagcgcttactgtggaacggcggcccgctgctgggaaaaccatcgctaacagcctgggccaccatgtcaccggggtgatccttcggcgagagagcgtcgagttgacacgcgatctcaaacgagaactgcgaactacgatccaccgactgaagcaccgcgacttcgttgaagatgcacgggtgtggcatcaatccaaaaactttctgcccccagctttcaaaagccttagtaagggccatcgatgggagggtaataccataatttcacgcaggtgtagcgccgagcgcttaagcgtcctgatgttacgccactttcaccccgagttaagagtgcgggcgatcctgagggagtggtatccttggcaggagcgcttcattgggggggagcaagttcgtcgcggcaaacaggcttggcccctgattgagtggctcctcgctgctctctgggagggtacagtgactgcgaggagacacggcgacaatacaatccgattctcccaggggggagttgccgtttgcgatgtcgaagcagagtccgcattacagttcttcctgctggccaaggagagtgcgatcgccgtgacggaatattggcatcacctgcagggacttaagggttatctaggcgcctgccctatcagacctgagtttagcgatattattgagtggcgtgataggctggtggaggctatgagtgctctggagatcaggggttacgaaatagaggccaccgaaccgatcgtggaaaacacttcagacggggacccagaacccctaacggtgtcagatcgagtcaaggagcgcagtgataggtttattgtggtgtaccgggagtttgcgcggcggatgtccatcgccggtgatacattcttaggcacttgcgaagacgctgctagggttgtagccactaacagtgcagacttcgatcgctggatttccgccattcgaggcctcttcgtcactcgcttgcctcgcctacccgcagtcgtggagcacagggattctttcgacagaaggagactctttgatgccgttagagtgtgggacgacggcacgaagaggttggttgcagacgactaccagttcgtggccgacctgcgcgtggctctgaagattgatcgtctggattctgaagacacctaccagtttgctcgtgcccaattgagactatttgactggcttctggcctcattcgagcgatcgacagaaacacggcggtgtggcatcggcgaggttagcgcactggatcgaggatgcgacttacctgtgaacctgtggtccggcaccctgaaagaaaggctggctgaagcgtttgaggagctcgtgtccgcccacgaggtacttcggtcatctgacggcgaaacaaagcttttcattcagcggtcaggagaggagctccaccgagaacgggaaactatccggtgcactgaacagtggaacaatgaccgtgcatgggaacacctttgtcaggttgcacgggtcttgttcataactacccaagaaagtgtggaaccgtctctgtggagagatccagtggaggatgatcaacctgtgagcgcgcagaatgaactgagacgcaaaaagacatggaagggggtgtgcgatcgggtagatagtgaattgcgtcatagggcgagactcctggccaaactcagaaaccgagatgcccataaggctaatgacgataggcgagccgaatggtgtagcattcaggctgacgtagcccgcatcctgggacggagctgggaatccacctctggacggaaacacccccagtttcacgctaaggatgacttagagctatttgggcatgaggtcactgtagtgaagcttgaactcattcgttctcttaccgcactctttaatcgcgcagctgaactgcaggtctggaggccggaacacggtatggatagatga

SEQ ID NO: 12418 - RNA, 2529 nt, synthetic construct
  source 1..2529: mol_type = other RNA
atgacatcgcgcctgattcatgcgctggcatttcgaccctcttatttcactaggcatccaagctcacgctggggggctctctatcaccgacgggagatttctagaggaactaacaagcctagggtcctctatatcccgaataaacctctcagatccatccagagggcacttctgttcctgtttcttaaccgcgccagtcacgagctgggccaatccgtttttggggcaaggcccggacagagatgccctctgatcaataatgccaaacggcacctggggcagatgtatatcgtatcttttgacctggctgactttttcccctctatcacgttgggccacattgtttcagccctggctcacatcaggaccccgctaggccattgcgctcttcaggacaacgaggctaacctggatcggcctcgccgtgacttcccatggacacatgacgccgccgttttagtagctcgcctgtgcacttaccgagggagactgccacagggggcctctactagccccctgttggccaacatcgctttctccaggtttgatgacttgattgctgagagactgggcaccggactcgtttactcgcggtatttcgatgacattacgattagtgtgagcaagtctgctgccagaaggctccaccttaataacgcaaaagccttggccgattacgcccagacgtgtatagagacggagctaattcctgccggctttagactcaatgcaaagaaaactaggttcggaacagccgctgccggattcactgtcacgggccttaggataaacaagaataccatcgatataccaagaaaaacccgcagacaaatccgagctttactgcacactatctccacctctgggttactagcggccgctcggaaaacatggggcgccgaattggaagcccggataaggtgggactcagcccgtcaaagtcaccatagcgcaggaaggcggctccctcaggagaaactgtgtgctctgatgctgaaacggctcctgcctgacctggtgatcagggtctttgatcgcgacgaaaccgaagccccccggacaacagagatcaccggacgccaggcaaccagggtgttggaaaagctcctgacttatgcatggacacacagagtgagctttcgcgtacatgatgactacgtggctgtgaaggcagcaggtgaaagggagatagcacgattattctccaaagtctcgatcgaatttttcggactggccccaaacgagctgattcggtgcactgagctgtttcacaagcttgccggctggagcgcatttctggaggacgcagaaaaccatggagaggcgcgtagagtggccgacttgggtagggaactcagacgagttctcgccggtgtgcaagccgggacccgaagtgaaaccactgcctacgagactggcgcacttagagtggacccggcaggtttacccctgaccgctgaacaggagaatcgccagctggcgagggaggtgtttgaattgattcgccagttcatgctcttcgtgtcccccggcccaatttcacatgacttacctgagcttgagaggaatttcaaagctgtggctaattctgaagagacattctctcgttggcttgaaaccaccatgcgcttgtatcagatccgtgcagaggtcgttccacccgaatccgcgcgtagggaattccgcggccacgatattcacgaaacaatccggctactgagtgatcgactcgcagggagacgggcaccaacctacgagatcgagcgggacttctacaagaaggtgagtaaagatgatgtacctgatagcccgcgcgcctaccttagacatcaatttagagtacttggaagacttaagtccgcctttgattgctccttagctctacgaaaccagcgagggcccaccgcctggattcagactcttaacgagaatacctggagcaggagtattgcggctcggctgcatacagccgtccaggtgctgagggagagactcgtggaaatggcgagccaaccaggcgtgatgcgggtgtttcagaatgctgttctcgccgacctcaacgccggcatgagcgaactgatgacgacagtttccagtacaacatcagaactgcgctggaagtccctgttcgccaccggctctgtgctgtcaaagctaatattggaacaggtggaggcttcccgattggagactgaaactacagagaagcgttcacacaccgaaatcgctatcgctagcctgaccgcaggtaccggcgaaagccacgcggatctgctaaggctgatacacctgttgcggtgtcgcgatgcccatcctgcgactgatgagcaaatgaacgactggatcaagctccagcgtctgtgtggttcacggttaagacgggtcacaaccaacatcagaatgcccgacaacgccggagccatgttcgggaatgggcacctcgagctcacagagttggaggcaaatgacctgaagctctctattattgagggtgtcgatcgcttcttgcggcaggtcagcgtcgtgtga

SEQ ID NO: 12419 - RNA, 921 nt, synthetic construct
  source 1..921: mol_type = other RNA
atggcattccgcgaagatcgatttcagcgtctctttgccccagcccacggcgaactttaccgtcgcaagagagtgccaaaaggtaagtgctgctataggaccctgttcgtaccatgtgcccctctggcaagagcacaacggctgctgctgagccgttgtctgaaccagatgctgggtcactctcatccgggagtctacgggggccgacctcagacaagtgtctatggcaatgcccagcggcatcttggtcaaaagtttgttgtgactttggaccttagagacttcttcccctcagttacagtcaaccacgtcgtcgccaccttactgcgcttaccccccgtgtcactcgtgaggcacgtatggctagatcagcctacccaaggggggagagcaagggtgccacaaatgcatcggtacgcttggacgcagagggccgcagttcttgtggctcgactgacaacatttcgcggaaggttgcctcagggagcccccacttctcccgcaattagcaatctcgtgttcgcccgctatgacgacagaatcgctaccgctctgccgggatttgtgtataccaggtacgtggatgaccttaccttaagcgtgtccgagactgccgcgcgcgatttgggcattcggacggctaaacaggcccaggccgtggtcgtagagagagtagagcgcgcgctccgtcgaagtgggttcatgctccaccccgacaaaactagagtgactgctatcgaacgggagcatcgcatcacagggctacgggtgggcgctgacagggttgatgtgccaagaagagttaagcggaaagctgcctccttggcgcgggatctccggaagctgggattggttgacacagcgaggaggcgaattggcgcagagatacacgctgccacccaggcaaggccttgggtctga

SEQ ID NO: 12420 - RNA, 2868 nt, synthetic construct
  source 1..2868: mol_type = other RNA
atgtctgaccacattgtagagaagatcaaggcccttgacgctcaatttgtacagcttgagaagctcccccaccacgtgatatattcagagttcaccactcctcaacagttactgctcgaccggaaaatccagtatcgtgagggagcttatcagctgctggactggtaccccccaattagggaagccagggagttgctaaagcacctgcccccttttgaaatgttgaaactggtgggaggaaagccctgtagctcactgtcactgttcactttcattaagcgccatctggccaggaagggaacaaaaagtatcttccggtggtccgatcggaaaaggtttgtttactgggtttataggaacaagctcctgtccagtgtgcttccctacgtgaggccggcctctgaaagtaaacacttggtactaaggtaccttctcaagccccttaaaaagcagcaagggtactactcctccaaagtggtgcacgcttgggccttccgtccagattttttcaaagccaaggtagattatgagccattgtacataacacgcaagattgcaaagtctcagcgcgggtatcggaccttagacattccttttgccggactggctaagcttcagcgagccatcttgaaaatgctgctgaacccagcctgtcagcgcgtgttgaccgacagcgtgtttggttttacacccggaaatgatcggactatttttagcgcggccgaggcacacctgggtgcaaaattccttgttggctttgatatcgccgacttctttcatacggttaaattcaacgacattacttcaactctcatgaaactgccccctgatattctgagagcatccaactcagctatctcaaaaaacaagtcccctctaaaatgggagtgggacctggtgctccttctggccaagctgatggcgtacaagggacgccttccacaaggcgctccgaccagcccagccttagccaacctcgtcttccatgaatacgacgtcctgattcggcagcagttgtgtgatagcttcgagtacacgagatatgcagatgacctgacgtttagcatttctgctaccaaggctaaaagactcgggatccggtctgaactcgatgcaaggcagtacctggagaagcgcttaattcagctgttcgaatcctccagcttcacactgaatagcaaaaaaagtagagccgttaacttacgccagggcggtcgagtgttggggctgtatctcaataacgaaggtgtgggagttccacgcagcacccgccgagatcttagaacaaccttgcacaagatgcggaatcacggccttctgtgcaccgccaggaaccatcctgcgttacccgattgttccgaattcgtccatcgagatacaaaacgaggcgtgcgtcatttcttcaagtctgggagagtgagcatggaacggctgtgcagcctcactgcccacagaatctgtagaaatctcactatttcagacctacgcaatgaggggtctaccagggagctaatcggcaatcgcctgcgggacaccctggaaagagtcatttcaaatgcctggctagggaaattggtgctcgcgaaacaggactccaaaagcttacttgtgtcgtttaacagtggggatcctgcgctcctgctgagagcagaaacgggaatagactttctgctgctgggccggattgactgcgtcaaatgcgccttactgcaccagagcctctccggctacctgtcttttctggagggggctcctaacagggctacgttcgcagccatccatgacctagccaaacagctgggtgacgtactcggcagcctggacataggccaattccagcccgcagcaagtcgtcaggctggcactaccgacggagagaggccatcacttacaatcgacgaagatgtgacaagaaaagcccgagcttttctcgctaaactgggagtctctgactttgaacaccctgattggagtgtgctatgcagggccgtatattctcgggagcaacttgattcctggttaactgctacagataagctcatcaaggagaaaagagtgtttgcggagggttcccgccgaaaccccgtcaaatttatcgacattagagctggcaagatattcggcaggcgcaccggaacctatgatgaggaaaatcaataccttgtgaggagattgtccgaggacggtctgagtcgtcccgacctggccttgcagctccaggaggagctcatcgaagatctgatagagtatgccgagcaagctggcgaacagggggaaaccgcatacccagagcagtcggtccggctagaacgcgtgtgcgccgatcttaagaagttgcggaaccagctgactacaacaaacgaaagtatgctcctcttcgcaagaaggtgctcaccggaaaatgacaccaacatcaggaagagattagaaaagcttgagcagccaatctcaggcgattcgtctggggcggtgtggtacagtctgtttgagttcggcttctgttttgttcagagtttccaggaaagcttggagcacgatgatgaaggtaagccggtcgcaaccagccgtgcctggaaggacatcaagcggtataatgtcctgtctctgctgcgaaatcgccatgcacatgggtgggttaagactgcagctaacctggccaatctcgatgagatccaacggaccatcgccaagcgtctgggcaagatctggaagcctaagaaaaatcaagtgggggacacactcgagtcccttatcacattggagttgacctcttttgaggctaatgagttcactctggatatactgaaccagctccgagacagcctcattgcagtcagacaagaactgcagacacccccttccccatga

SEQ ID NO: 12421 - RNA, 945 nt, synthetic construct
  source 1..945: mol_type = other RNA
atggaaaggactgaaataaccccctggttctactacgacatctataagacagaaaaacgtaccatacataagccttcacatgctttgaaaaaagtccagcgatttattatgcggaagtttctcaaaccccactttaaacaaatgacaaccaacgaagcagcttccgtgcactgcgggaagaaatggattatgaagctggatatcaaagactttttcaactctatcacggagaaacagatcaaagacgtgatcaagaaatatgtgtcctatgacaactacgactcctctattacatacgagcacacttgggaagtgtttagcgaggaacagattttcagcgtatgtaccctgaagggaaaactcccaacgggggcctcaactagtccctatatagcaaacctggttctgagggatttcgatatcgagatcgagaatttctgtctgcggtatggtgtgagatatacacggtacatggatgacctgtttttctctactaatcgcgagcagtactttctcagccttgtggaactggaagttctcagactgtttaaggagcttggtttcgagattaatgtcccgaagatcaagtacatctcgagtaataagtgccaacagattttaggcctaggcgtaaacaataagaaaccagtgctgactaaagataccaagagggagtatcgcgcctatttttataacttactcgcgcctatacagtttaacaataccgaggagtacaagaagcacgagaaagaattgttcggacatctagcctacatcatgagcgtcgataaaaagttctactacaaaatggttgcctacatcttcaacattatcaagcgcttgaatatttggcgtaagccttgccttaagaatctgattaagaagattggcaacaactttgagacagaaatcgagatgttcagattctgttcctatctgaagtga

SEQ ID NO: 12422 - RNA, 1248 nt, synthetic construct
  source 1..1248: mol_type = other RNA
atgccccctgcagaacccacaccttccctaggacaagctatgcgccgcttgcggttagctgccggactgagccaacgtgaacttgccggtcgactcgctgtagatcccacttacttatctcatctcgaatctgaccggcgagatccaagtgtcaggttcgtgaaaaggtttgcggcgctggtggacgtgccagtcacctcactcctggtggttgccatgtgggatgagatggcccccagcgagcaggacatgttccagcccgtcgtgagctcgctgatgcacctgacagaggcggtggtgaggatgcccgcttcatctcctggcccacttcggcgtctgagtgtgcagaagctcgtggctgtgtgtcggctctctgaacagcagtttgcgagactgttggaaagccgagaaaaggaatatcacgaggtatcctgggagaaagagcctggtaaaaccaggactctgcacattcccagcgagaggcttaaggccgttcagcgcctgatactgcgctacatgatcgaccgagttcctccgcatccctgcagtgcctgcgtgaaaggaagaggcaatcattgggcctaccggagacatgctcgtcatccatcaatgctgaggctggacattagtgatttctttccatcagtgggcgaggacgccgttagagaagcattcatacgccttggcgcaagggaaccggtggcagacgctcttgtccgtctcgtaaccttacccgagcgcttaccacagggggcacctacgtccgtggctgtagccgatatggttctctttcctctagacgttaggcttgccggaatggccgagaagcacggcttcacctactctcggtatgtggatgatattacactgtccggtgggaataggctcgctagattcgagcagactgtccggagaatcgttacagacctcgggtgggaactgaacgagaaagggggcttggtgggttcagatcaaagacactccctgctggggggaatcgtaaacgcaaagccgaatgtggcctctgagtattatggcagggtccggagctacttgagactggtcgcaaaggggcgcgagcaacctgacgaagacgattttagaaagctgcgctccaaagtggaatggatcgtcagcgtcaacccagagcggaaagccgccctgcacgccttggtcgatgaggcactaaccacgttgaagcagcaggaggcttccatccgcagacgagaaaagattgtgccacagtga

SEQ ID NO: 12423 - RNA, 963 nt, synthetic construct
  source 1..963: mol_type = other RNA
atgttttcactggatgagcttctgagtatattcaacgacgtcgaagaggtggaaatgtccccaagcttcgcattcgtttatagtcagctggtcgagaagggcaccagcgccttttggctgggggtgaggaaacacgccctgcgagactggtatgagcagtatcacaacgtgctgagcgaagacgtgaaagtggaatacacccccgtaaggatcccaaagagatccggtgggttccggactctctacatcccttcagatcaactgaaagagcggcagcgtgcttggttaaagcttacgtatattcttgttcccaaggttactcatgcctacgcattcgaaaagcggaggagtctgcgggatgcgcttgagaagcacgtcggcaattatttgtttctgagactggacattaaggacgcatacccatctataaggaagaaggttttggactcagtgctcgttaaacatgacgttccactttccgtaagacagatgctaatccgcgattgttactttaagggactacctcaaggcgctcctacaagcggccgcctgtttaatattgtgttgtcccagaccgatttagtgattgccgaggtcattgctagactccatggcgtgtatacaaggtatgcggacgatatcttggtgtctttccccaaagacgccaaaatctccattagcaaaaccagtcaggtaattaaccgctacttgaacaaaatcagcctggagctgcacccctctaaactccgcgtcggtcgtggtaaactccgagtgttaggatgcgtcgtccactcggataaggtgacaatctcacgaaaagtgagacggctgtaccgcgccatgctccataataacaaaacaggaaagatctctctgtccaagcacaagatcaatggaataaaggggtggctcaatatggtgtacaggagcgaaactgtacctgctatcgggccgatatcttga

SEQ ID NO: 12424 - RNA, 1410 nt, synthetic construct
  source 1..1410: mol_type = other RNA
atgatcttcataaaacttctgctgctcccgttctacctgatttttggtgtgctgcgaaacatcctgtctgaaggagggcacccgttcgacggcgcatacaacgacatggtcgctcgccaaaatgaggagcatcgaaaaaacctcaaagagcgaagcgacaaaatcaaaaaggccatcaacgagattgaaaagaaatccaaggaagaaccactgtggaagctctcaaaactgacgaaaatttcgatcgaggagctaaaacataccaccggaacatataggaaagtgaacgtcaagaagaaaacaggtgggtatagagaattacaaatccccaatgaccagttgaagcaagtacagaagaagctggctaagttcataaatagccagtttaagaacgatatctctcccttttgccacagctacaggaataaccgcggcattataagcaattccttaccccatcttaactgtaaagtgctggttaagctggacgtcaaagactactttcagaatatcaccttcgagcaggtgatgcgggaacttgacctgggctttgagagcatccagttccacccacagagtaacttcattcggcacaatgtgagcgagcctgacagcagaatttccagttaccttgcttccgaggaagcgcaggagattttgaagaaactagtctattctgaacagggactcccacaaggtgctccaacttcccccgtaattagtaatcttgtcctgagtgattttgataaggaagtgtatgcacttgtgacctccttgaatggcgcatacactcgctactcagatgacatcaccataagctttaaagaggattcgtctcagaagatagcccaggtgatcaagtttgttgaagccaaactggccgagaatggctttaagctgaacaaaaagaagggcaagattaacgttctcagacctcatcaagctcagcggatctgtggggtgactatcaactctggaaagcctaccatttcccgtaaacagcggcgtctgattagggcagcagagcacaatgccaagcaaggaaaacctacaacattcaccgaggaccaaatcaaaggacatgaatctttccagaagtatattaaggaacacggggagttgctagccgggaatgagcgcatacaatatctgaagactaaggtcatcagtgctagagggtgcaaagtggataagaacttcgtcatcctcaagggcagccagttcgatatctcaaaatttgatgaggccaaagaagaatttcagacattgttcaaccagctcaaacaggagggcgtaattgttctcaagcagaatgtggccaggttcaagcggaaccaccagttcaaatccaagactctcgcgacgtctctgttacacttgaggaatgtgagatcatcaaagtgggtttga

SEQ ID NO: 12425 - RNA, 999 nt, synthetic construct
  source 1..999: mol_type = other RNA
atggaattcgccgtggattcaatttcatacgagcttggaactgtgttggcactcttggtggtcctggtgggcctcgttctgctcactaagagcttagcccgggattacgtctccaagtatggaggcggagctcgaaagcatgctcagcgaaagaattcacgtaccctactggataccatagatgtaagggaggacgttttttttggcgtcgcaacagactacgcccttgtcaaaatccctaaacggactggaggaagtagacagttacagatccccaatgccgagctcaagcgcctgcagaggaagctgctggtgtatctgacagctaaactggggcatagagtgaaccggtccgtgcactcttataagaaatacaggagcattaagaccaacgcaaccgtgcatttgggcgctgcagtggttatcaagctggacattgtcaatttcttccccaaggtgacgctgaaacagtgccgccaggttctcaaacttctgaatctgactaagcccgttgaggatcgtctcgtcgcgctgttaacaacgccaggcggcctacctcaaggggctcctacctccccgcttctgtccaatctggtgttgcgggctctagacaagagtgtttggtactattgctggtctaggggtcacagatacagccgttacgcagacgacataacaataagccttccaattgatgaccgccaggccgtgcacagagctatcagctttgtaaaccacgccctcaaacgggccgggttcaaactgaaccggcgacgcggcaagttccacattctcaggcgccatcaagcccaaagaatttgtggtgtaaccatcaattccggtaaaacaactatctcgagacagaagcgaagagaacttagggcaatccggtataggctggagaacaacatggaagcctcaattagcgaaatccagttggaagggtatgaggcctacgtccgcatggtgtctggggtaagtgtgaaagcgttttcttga

SEQ ID NO: 12426 - RNA, 1098 nt, synthetic construct
  source 1..1098: mol_type = other RNA
atgctgccacaccagattagacctgaacacttagccgaagctatgggcctaagtgtcaacatgctgtggtcctttgcccgcaatatggatgcttgcttcaaaccacgaaggatgcaatgggacgggaagaaacatagacctatcgatcccctgtataaacccccgaaacggctgctcaaaaagctgcacaggtttcttcagaaccaccacctgtgtcatcccgcagcccatggcggagtaaggagacggtccacattcacatcggcccagatccatgttggttcacggaacgtgtggacgagggatgttacagattgctatccatcaatttcacaggccgcaatgtttagccaactgcgaaagctgaagttccagcatgacacagcacttgtgctcagcatgttgttcacctatcgcgacggagttccccaggggagccctattagcggggatgcactgaacatctttttctggcctctggaccagctcttggccagtatggccggttccctcaagctccgctatggtcgtaatgctgacgactttgtgtggtccggttcgaatcgcgagaatggagacaaacttgcggcgagattggaatctgagatagaactactgggactgaagatcaatgagaagaagaagagggcaaacgggctacagactagcagtgacgagcggttggtccacgggatatccgtttctaaaccaagcggcactgctattagcagactgcagtcaaagaaagctctggcccttggcgagaagtacgtggcggcttgtcgatccgtcactgccgatagtttagaagccgtcgctgtgaaacgggcccaactcgccggatggatgtactactgccgacaagcacacataggcccggcgcggaccatcagacagctcttggaggctggcgataggcatgtgctcaagaagcttagggccattggactgtcttctcagaaaaacaagtggtggatcatcgactaccgccccagacgcaataagccttctagaaatgagccaaaacgtttagctaacgcatggcgtaccaggctggcccggatgtctcacaaaaacgtagtggcaaccggcctgtga

SEQ ID NO: 12427 - RNA, 1080 nt, synthetic construct
  source 1..1080: mol_type = other RNA
atgaagcctagcgaaatcagggtggaacaccttgccgaagcgatgggcctctcaattaatgctttttggttcttcgctaggaacattgataatgcatataagcccagacgtatgagatgggacggaaaaaagcaccgccccattgacccgctgaagcccatggctaaaaaggtgctgagaagacttcaccgcttcttgcagcggaacagactatgtcatcctgccgcgcatggcggaatcaaagggagatcctgctttacttctgcgcgggtgcacttgggcgcaaggaacgtatggacacgcgacgctaaagattgctacccaagcatcgctcccgaagccatgcagaaggagctgcaggctctctcctttagaaatgatactagtaaagccctggtacttctcttcacttatcgaggcgccgtgccacagggttctcctatctccggggatgccctgaatatttttttctggcgattggatcagctgttggcaagcatggccgggtcactgaaattaggctactccaggtcagctgatgacttcgttttcagtggggacgaccgggacgcaggagatcagataaccgcatgcctagagaacgaactgcttaaccggggcatgaagatcaatcgtaaaaagaaggaggagtcgggacaccaaacagccagcgatgagcgtttagttcatagtatcgccgtcagtcgcaggaggggtacaggagtttgtaggctgcatgcccgcgaagcactcgagctgtgccgcatctttgtggctgcctctcggtccgtgagcgccaattcaattcaatctgtcgcatccaagcgagccacgatacagggctggctgaactattgtcggcaggcagactttggacctgctaagaccgtccgacagcagctggaggcgggtgatcgccacgtgctcaggaagctgcagtctatggacctctcggccaagggcaacaagtggtggtacgtcaatagcacccaagggcgagacgagccacggagattatctgcaacctggcgggctaaacaagctaaaaaaagcgcggacctcgccggttccaacgcctga

SEQ ID NO: 12428 - RNA, 1047 nt, synthetic construct
  source 1..1047: mol_type = other RNA
atgaaccccaagtccattacgcccgcagagatcgccgccgcaatgaaaatgaccgagcggcagctctggactttcacccggaattttgaaaagctttttaaacccacccgagaaattatgatcgggtctaaaaagcgcgccattgacgccccaagggatagtgcgaaaaagaagctaaagctgttgcataaatggttctttgagaaaaaactgttccacccatctgcccatggcggtgtacgtcaccgatcatgttttacatcagctcagcagcacctgggaaagaagtttgtctggacacgggatgcatccgattgctatccatccattactccagagatgttcttttatgaactcaagagaatcggcttccgccaagacacagcgacgctgttgacccgcttgtgtaccgtgcgagggtctataccgcaaggttctcctgtgtccaatgatgcaattaatctatacttctggcggatagaccagttcctgaaaagcctgtcaggcgcaaacgacctgtcctacagccgtgttgctgatgactttgtgttgagtggctataagaagtacttaggggataatattctcctcaggctcgaaggcatgctgcagcagtttggaatccaaatcaacgacaagaaaagaaggaaaagcggattccagaacagatctaacccgcaattagtccattctatccgggtcgacttacgccgcgggactaaaatttcgcaggagcatagaacaaagatcatagatctggccaacagctatgaggctgcctgcaagcgtgttcagcccagtagcctggaacctatcgctcataaaagacagcaactcattggataccttcactacagcaggcaggccgacctgagccctatcaagcaccttaagagtaagatacagaatggcgacagaagagtgtccaggatccttaaaaacctccacatttcagctttcaaaggtaagtggtggctggtgtcatccaaacgcaatgagcctaggcggctgaagagtatctggatgaagaggctggaggctaattga

SEQ ID NO: 12429 - RNA, 1155 nt, synthetic construct
  source 1..1155: mol_type = other RNA
atgctctctaagaactggctgaagtggaaacacggctctatgaggtactcacctgccgtgaagacccgcttgtcgccacccgacctcactgttaagcgtctggcggctgtggcgcaagtagacccgtccgaacttatgaggtatgccggaaatactgcagtgatgtatcggagcgctaggaaacagtgggatggcaaaaagcaccgggtaattagaccgatgaacaaaaagttcaagaagatgtccaaacggttgcacaaattttttcagcggcagccttggtggcatggcgcagctcatgggagtatttgccatagaagttgttttactagtgccgccagacatgtaggccagagacacgtgttcaccagagatgttgaaaactgtttccccagtatcaccactgacgctctgtaccgccagcttctgctgctccgattcaagccagacgtcgctgacctgctcgccaagctgatgacctgcgatggtaccatcccccagggatgccctacaagcacggacgcggtcaatttgttctttgccggcctggatcaacgccttgcttcgactgccgccgctatgggagcacagtactcccgtgtggtggatgatgtcgtcgtgagcgcaaaagataaagacgccggccagattgttataaatcgggttgagcatgagtttgaacgattaggtttgaagacaaacctcaagaaaaaacaaaccgacgggtaccggggcccacatcagaaacgccacgtccacgggcttgatatctcttcaaagagaggggttcagatcagccgacagtgtaaggaaaaggcactagccgtggcccagtcttatctggactcatgtaagtcagctacccccttaagcctggagtccattgccgcgaagcgcgagagggctatgggttatatgcaacacctaagacaaggaaccgggtccacattccgccagctcgaccagaaagtcaaggcaggagatcgagcagtgcaagccaaactgcggcgcgtgggggtgacatgcaggaaaaacagatggtggatcattaggggtcctcaggacaggataacaaaggcagcccggaatatcgtgcgtgaggtcgctaggcagtggcacgccacaaaatacagcacgccctcttccagcccatga

SEQ ID NO: 12430 - RNA, 1059 nt, synthetic construct
  source 1..1059: mol_type = other RNA
atgaaaccgtcagacattaccccagcgatgattgccgaggcttgcaaagtcgatgaaggccgtctgtggcgtattgccgaacggacagagtctcagtaccattccccccgacctaagctgatcaaaggaaggcaccgagagatagacccacctaaccatgactttaagaaggtgcttcgacgcttacaccggtacctgcagagatcactcacctttccgaggtgtgtgcatggggggctacggggtagaagctgtgtgaccgctgcggggaatcacgtgggtcggaagtacatcgtcacacgcgacgtgaaggattgttacccatcaatccctacggaggccctcaggcgtagactcatcgacgagggcttcagaagtgataccgctctgctgttatctcggctaatgacaaatcggggggtgatacctcacggggcaccagtgagtggcgatgccttgaatctgttccttgccgattctgaccgtcgactcgatcactgcgtgagacgccgcggaggctcttatactcggagcgctgatgacatggtggtcagtgttggtgccagggagtccgttacgccccttgccagagtgatcgaagacgaaattgaagggcacggcctgagagtgagcgaacacaagaggaggcagaagggagttcaacattcaaacactcgagggggacctcgcgtgcataatctcctggttaacaataggagaggcgtaggcgcagtacccgagcatcgcgcaaaaggactgagactggctgagtcttatgtatgcggcgcacggagcgttcgacccgagacattagagggactggcaagtcgcagggcggaactcgtcggcatgattaactatttccgtcaattgcgcttttccccagcaaggcacttggcccgcttgctgaggcagggtgacagacttgtccggagccggctctccactgtcggagtgtccctgaccgccaaatggtgggttaatagccgcaagcggaacagacccagggaaatcggcgatagatggaggctgaaatcggacaactcccccgctgcctga

SEQ ID NO: 12431 - RNA, 1023 nt, synthetic construct
  source 1..1023: mol_type = other RNA
atggcgtcgctggatggcatggctagcaacatggcatcttggtacaagcccgcgcgaaaagtattgattaagggtaagctgcgagaaatagacccgcctacacctgttctgcgctataggctcaggaagctccacaggtttatcgccgctaactttagaccacaccgtggcgtgcatgggggtgcaaaagggcgctcttgtttctcaagtgctcgcgtgcataaaggaagacggtatatcataaaacgggacgtgaaagactgctatcccagtattaagactgcagccctcctcgatcgacttgtggcttacggattctgcgaggagacagccagaatcttgtccctgctgatgactctgaacgggaggcttccacacgggagtcccgtgtccgctgatgcacttaacctctttttgttcgaagcagacgaagtgattgtagccaagtgtactgttctggggggcaagtactcccgtacctacgatgatatggtcgtttccaccaatagtggagcagctagccgagagctaggcgaggtcttagagtctcagatcgccgcccacggcttggaggtcaatagcaggaagcgggctaaagaggggttccagccacctcataagcggcagctggtacataatatcgacgtgcggtctgctggaggtgtgagaattgtccgcgagcatgaacaaaaagccctagccgtggccacacgctatgtccgggcagctcgctgtgtgtctcccgaatcccttgagcctgttgcgctgttaaggagccaagccgccggctacatgcactactgcggtcaggccgactttggcccagctaagcagttaagacgtctgctgaagcagggagataggcacgtccggaaacgcctgacgaatgaatgcgtgacccgatgtagaaagtggtggatcatcagcctgcggagaaacaaagcaaagcaaattgcccagaggtggagggccctccaggacgaagagtcaagatcctcagcgccgagcacctcaatagcctga

SEQ ID NO: 12432 - RNA, 1107 nt, synthetic construct
  source 1..1107: mol_type = other RNA
atgaaggagaagtaccgcatgcagtgcaagcacaaggacgtgaaaaaaccactgaaagggatgacagtggaatggctggccgaggaatgcggcacgacaggagatttcctttggatcttagcaaaggactcaaccttcatgtacaaaccccctagaaagcagctgaagaggtccggtaatggatatagagagattgacccccctaagcaccaatacaagagaatcctgcggaaaataaccaaggttttgtctagcaacatgagacaccatcctgccgctcatggaggcgtgccttaccgctcttcctttacatccgctaagccacactgtggcgccaagtttatcgtcacccgcgatatccgagaatgctatccgagcattagcagtcagaatctcttccgctcttttcgactgcttggggctagcttgtcattcgccaaatttctctctgctattatgaccgttcacaaccatattccgcaggggggccccccttcgagtttagcattgaatctctatttcagacggatggacgatcatttctaccggcgggcacagtctcaagggggcaactaccggagatttgccgatgactttgtgatcagtaataacagcaggaaaaaagctgtagctttggagtcagagctggaccatagtatctcccaccgtgggctagaggtgaacgaaaagaagcgtgagaaaaaaggattcttgtccggcgatcagctgaaagagattcactcccttgtagttaactgtaggaggggcctcaaaccaaaacgcgaacacatcgccaagggtctgcagcttgcggagcattatgcgagatgttgtacttgtgcaaaacctgccgacctgcccagcctggcaaagctgcgacaacgggccactggaatgatgtattactttcgtcaggccgacttctcacccgctcgccatatacgaaatatgctggaacacgcggataagaaagtcctgaggatgttacagtcgaggggtctgcagccccataagaataagtggtggctcgtgcacgccactcggaacgaaccacagaggctcctatgcctctgggagccatctgcccaagtctgcagcgtggcatga

SEQ ID NO: 12433 - RNA, 1101 nt, synthetic construct
  source 1..1101: mol_type = other RNA
atgaacagcgaaaccgcctcaagaaccgccgatgccggaacgctgctgagaggaatcacagtggaggccatcgcgcaagcgtgcgaaacttcccctgacgagctgtggcgactcgccagaaattctaaactcttgttcaagctaccgcggcagcaacggaaaaaggggggtggctttcgggtgatatatcctcctaccaaaacccacaagccactgctcaaacggatggcccgctttctgagccggcagatccccgtccatagtgctgcacacggtggagtcaagggacggtcaagcttcactagtgctgctaaacacctgggggcaactgttcttgtggtacgcgacattgaggagtgctatccgtcaatcggcccccaggccttggctaacgctctaaaacgtctcggtgccagcccatcgctggccaagtttctcagttccattatgactgtggatgggcagataccccagggtggacccttatcctccctcgcactgaatctattcttctataggcaggatgagcatttgcataggaaggcccgtcgcgtgagaggcgcttacacaaggctcgccgacgacctggtagcctctgtcggcgatacagagacgggggctgctatggggcgagaattcgactcggctatttctagccgacaccttcgcgtgaacgcgtctaaacgggcaaagaaaggccttttagggggcgacaagttgaaggaaatccacagcctgattgtgaattccagaaggggccttagaccaaaggatgaacatgtgcagaaagccctgaggtttcttcagaactactgtaggcgatgccgctctgcaacacctgcggatctcgaaagcttagcctacctgcgacgggttgtctgtggatggatgtactatatgcgccaagctgccagaagtcccgcaagacatatgaggaagcaaatccacttggcagacgccagggtgacccagatgctgaagaagcacgctattcaggcgaaaaaaaataagtggtgggtcctgtcatccaagcgcaatgagccacgtagactggcagcacagtgggtttggcgcgaggttaacgctgcaagggccggctga

SEQ ID NO: 12434 - RNA, 981 nt, synthetic construct
  source 1..981: mol_type = other RNA
atgagtgagcacacctttctcgactgggtggccaggggggatgaacggtttctaccaactaggattgatagcagctctgggaagtttcgggaactggacgtccccaagccgtctgatatgcgtatattccgcatgttgaataaaagcctgggattcgaccggttgtttcacagggtagcacacggcggtgtgaaaaggaggagtagcgtgacctctgccaaaagccatatcaaggccccattcgtgtgggtgatcgatgtaaccaattgtttcccctccgtgaagttcgaccgctttgcttcagaactgggccatttgggagtgactccagctatgcagaagattatcgccgagactctcttttgcagaggccagattccccaagggtgtcctacaagcaacctggccctcaatcttttcttcatggctctggattaccagatggccgagtactgctggaaacgcctgatctcattcacacgcatggcagatgacatcgttgtaggagctaaggaaagaagtcgcggcgagcacgctgtggataaattggttgcagggctggcaaaactggacctaacagtcaacgagaagaagagagcaaaagtgggtttccagcctaacacgggccaacagctcgtccactcactcgagatctcttctggatcacttttattatgcgatgaacatcggaaccgtgcccggcaagtcgctgagaaaaccgttggcgcgtgccgatcggttcagcctcagtccctcgaaagagccgccgattatcgacgacagcttaatggttggtttcactattcgtcccaaagtcaggacctgttaacgtccgacctggccaaagcgatacgcgtgtccgacaacgctgtcaagtctaggctgcagagagctcagctggactgtaagcggtggagatggtgggagattaagaccgccacagagcttgcggcacgttggggatcccatattagcgtgtga

SEQ ID NO: 12435 - RNA, 1218 nt, synthetic construct
  source 1..1218: mol_type = other RNA
atgggggatctcatccacactaggcggtgggatcttccagatatcgacgagctgctgcgggaacgaggtctgccagaattgtccgacgggggaaatagggtcccaattagcagcttgcctatccagcgaatagccgtgcggagaaggcctagaaggccatccgaaggaaacgagctggacgtcctgatgcgcatttgcacggctctcggctgtaacgccgattggaccacagtggttcaggtggccagggcctctcattgggagaggcaccgacgttacaagaaaagtggcgctattcggtggctcgatgtacctgaggaacgtctgaagacggccctgggtgagattcacagactactgctgagcagcatgccgcgggatggaacaagcacagccttccatgcaggcgcatcccctgcactgcacgctagggttcacagcggagccgtggcagcagcagcagcagacattagaaacttctttggcagtgtgcgtccgcggcacctcttgccttggttcggcttgactgactaccctaaggcaagcctactgcccggctggtcggagcttgggagaaaggccgtgtgccagttgctcttcagatatagagatgggaaaccagcgtacctggcgcaaggtgccccatctagtcccctcgctgccaatctggctgggctttggcttgaccgggctatcgtgtctgctgcggctcgccagtttgctcccgggaaatttgcctattctcgctatgccgatgatctggtgctgtccgctgtagactgcgaggaacccacccgctttgccgaagaggccgcccaaatcctcgcgagatcagttgccggccagggctggaccatccagtcatctaagagtcggcagtggacaactgccgactccgtcgccttacacgtctgtggattgcgcgttcccactaggcccggcgagcctttaaccctgggtagagaaacctggcgccgcgccaggtcagctcttcatcgacttcgacaccggtccgattttggactgcatgctgcaggctccccagccgtggcacatggtctactcgcttatagctactctgcgaccggagacttacgttggctggcttacacatccgcaagactcgcgtacttagccaggcgcttgggagggcccatattctctgaaagtctgctggctgggtggtcagacgagtcgtcactcgccgacgtcccctga

SEQ ID NO: 12436 - RNA, 1065 nt, synthetic construct
  source 1..1065: mol_type = other RNA
atgccatttagcatcaagaagcgtgagaaaaccaagctacgggacaggtttcctgtactatggcaagttctcggagacttgctcgcaaacgaaacctgttactgcgcctcagactacaacagcttcacatttaaggcgcgcagatccagaaaaagtcggacgatagatgccccttgccctcacctgaaggctctccagcggcaggcattgaacatcctgctggcgccagtggttgtacatgaagctgccatggctttcgcacctggcaagagcatcgcgatgaacgccaggtgccatctgggggcgacacacctctattctacggatattcgatctttctttacttcagtgagtcgtgtccatgtgaaggaaatgctggccacccgagtgaagtatttatcagtggaggcaagagaggagattctggaccttgtcacctggaatgaacgcctgcctcaaggcgcaccaacctcgccacacatcgccaacctggtcatgttcagcttcgatgagctgtgtacagatatggccacacgcgtgggcgctacatatacccggtacgccgacgacatttccatttccagtactagcgccgacgttcttctgcagatgcagaaagtggtgaatatgggcctcggagcactcgggatggagccacaccccgagaaaacacgacaccttggtcctaatcagacgaagttagtcaccgggctggacatcggtggatctcacattaggcccactcgggccttccgcaaaaagactaccgctctggtgaggatgtctgtaaagtatccagctgagatggaaaaacatcaggaggtgatctttgggtacttagccttttggtacgatgtcgaccctggagatccccagttggcaaatcttttgtggcagatgggtcaacctagggaagcctccagagctaaggctacccgccagaaacagataggcatgatgtccaaaccatcaccgactacaccgccgcccaaagaacagcaagccgtgcccctgaatgctgagagaaaacccagcaagccccccgttactaagcccgatgtctga

SEQ ID NO: 12437 - RNA, 945 nt, synthetic construct
  source 1..945: mol_type = other RNA
atggaggacgttttctatgatcgcgcaaactcataccacagttttacaataaaggccagacgctctgccaagatcaggacgattgacgcacctaacccccccctgaaattgttacagagagctaccttggacaagcttctcgcacccgttgtggctcacgatgccagtatggcattcgcacctgggaagtctatcgcaatgaacgcccgaaggcatctcggggcttcctatctgttttctactgacattcggtcgttctttccgagcgtcacgagccaacacgtgagggaaatgctggaggccaggttccagcacttctctcccgaggctcgtgaggaggtccaagatctggtgacctttaatggccggttgccacaaggagcgccaacctccccgcatatcgggaatcttgtcatgttcagctttgatgagatctgctgtgccaaagctgccgaaatgggagctgtgtacacccgctatgcagatgatattagcgtgtcctccaattcaagtgaacctcctcagcggatgcaggaagttatcaccggttatctctccgcgatgggcatggagctccatcctgacaagacacgacagctgggcccaaagcagactcggattgtaactggcctggacattggccgatctaggctgaggcccacaaaggcctatcgtaaaaaggccgccgccctcgtaagaatgagcagtaaataccccacaaaaatggcgcggcagcattacaagatactaggttaccttgcctactggaacgacatcgatccttcagacccacagttagcagccctgctggatcagatgaaaagaccgtcatgggcggctaaagtgcgcgctagcgctgctcgccaaaagccaagaggacaggccatgttccacagatttcccgaggaactgctaaaagacctggggccaggattgcggaagtga

SEQ ID NO: 12438 - RNA, 1056 nt, synthetic construct
  source 1..1056: mol_type = other RNA
atgatttttgggagcgacgaccgcaaggttaatattctggaggaatatcctacactgtgtcaagtgctggaggtcagccaggaggaagggaactgtgattgtgaggtgagttacaatagctttatcatcaagtcccggcgctccaaaaagtaccgtacaattgacgccccatgcccccatcttaagtccattcaaagagccctgctggaccgccttctagcaagtgtcccgccacacgacgcagctgccgcttttgtgagaggaaagtctattgcgatgaacgcccagcgacatcacggggcaagccacttgtttactacagacattagatcgttcttcccctctgtgaaggattctcacgtgcgagaaatgttgagaatccacttcccacatttcagtcaggttttctgcgaagagataatatccctggtcaccaacggcggacaactgccacagggagccccatcttcccctcacatagcgaatttggtcatgtcaaaatttgatgagcggtgccaggaggctagcgataacttaaaaaccgtatacactcggtacgccgacgatatctcaatctcctcaaatgatgctgcgagtctcagacgcatggaacgggttgtgcggatcggcctggacgctctggatatggaaatacacagtgaaaaaaccaggcacttaggtccccagcagactaagctggtgacaggcctcgacatcggtggctcaaggatcaggcctacgagggcctttcgtcgaaaaacctccgctttggtgaggatgagcgtgaaatatccggggaagatgaacaggcatcgcgatactatccgtggctatctagccttctggtacgatattgaccctatcgatccccaacttccttctctccttaatcagatggccctccatcgatgggaggtacggctgcgggcagcacaggagacaaatcagaggctcttacccattcagcccaaccctctgcagggcagaacccaaacgaatggatataccaaggtccgcagcaacatcgtttctctgttcaaaaagctcagagactga

SEQ ID NO: 12439 - RNA, 972 nt, synthetic construct
  source 1..972: mol_type = other RNA
atgtcgagcgagcagtcagtactttcttctgtactgggcctagacagtacagccatcaagcctgtcatgggatggtatgggccaatgttttaccacagcttcgacgttaagccaaagagacgcggccgaaaggcacgccagatcctcgcacccattgatgaactgaaaacaatccagagagctattctggagaaattactgtctcacgtctcaccgcatcccgccgctactgcattctttgcgggacggtcaattgttagtaacgcacgacagcatcacgggtgccggtacctgtataagaccgacatcagcgacttttttccctccgtgacgaccggcatggtcagggttgtcctcgagcggcacttcccgcacttgtcccaaagtgcaatcgacgaaatcattagattaactacccatgaggggacccttcctcagggtgcccccacttcacctcatctcgccaaccttgctttgtacgatttcgatgactctttgtccagactatgtaatgaaataggtgccaggtatactaggtatgccgacgatgtgacggtgagcgctcaggatgaatatgccctgagcatagccgccggagcgattcgtagcggctttgcggaactgggcctcgcacagcacccagctaaaacacggtgtttcggacccaattgcaggaaaatcgtgacagggctggacgtgtccggggaggtgattagacctccacggtctttccgcaaaaaggctgctgccctggtgcggatgagcgagacatacccaaagaggatggagaggcattcgccccgagtgatgggctacctggcccactggcaaggtaccactcctgatgatcctgaactttacaacctgaaacatagaatgcgccagttgcaacgccgtgaggctatagcggaccacaccgtcaatgcagtgtcctcctgggccatcgaggatgacctcaagattagtttttga

SEQ ID NO: 12440 - RNA, 1362 nt, synthetic construct
  source 1..1362: mol_type = other RNA
atgactgcacaaacccccgagaggctggtttttgagggacgggagcatccaatgttttcagagccactctccgatttcttgcgcagtgggagcgggcgccctgaattccagatgcagtctacggcatgctggagaggctatatcggcacatgggaagttatcggaaggagactttatctggttaagctggaaggccggctgaagtctggggaaaaggccaatctagctgcagtattccccagtagcgaagagcgtgtattcgcgcggtggttctctggaatcattcagctgccgcagggcgacgagatcgagtacctgcatatcggcttcgcttccatctatgagagagacttgcttcttagatttgaggacggagagcttgtcgaccgcagattgcgagtgaacggtgagacggggagtgatgctcccggtgactgtgcactactcccgaggcgcgaagatgcaaagctggctgccggccccggacatcagttgtgggagcagatagagcgggccgctgaagagctctccacacaaccaaaaacttttgccgccctggccctccgcgagttttactatacggaggggagtgtccggatagcacggaaaatcagagccctggcgtgtccctccgaacagctcaagaaactgcagaggtcaattctgactagcattctggacgtggccgctcctcacaaacaggctacagctttcttccgagggtgctcgattatacagaatgccaggcaacaccacaacaagcactacatgtttaaaaccgacatccgaagcttcttcggttcaattaccaccgaggatataaccacaactttacgtagatttatccccaatctctctcagaagaatctagaagcattgaccaaggtgctctcatgtgatggtaccttacctcagggcgcccctacctccccacatgttagcaatcttcacatgagggattttgacgaactggtgtcctcgcaagcgaaaaagcacaaatgctcctacactagatacgccgacgatattgccgtcagcagcgataacaagttcgctgtgcaccagatgtctgaaatcgtcggagatgcactgggcaacgcccggtttacccagaacacccggaagacacacctccttggaaaattcgataggaaaatcgtgactggcttagacgtgagtggggaccatattcgcccaacaaagaagttccgaaaaacaactaaggcgatggtcagagtgtttatcgtgcatgacaggaaagcaatgctgcctaacatacagtcccgactcgctttttggcgtagcattaggcctgacgatccagaaatgctgcaactgcgcaagtctattgcctcagcctga

SEQ ID NO: 12441 - RNA, 915 nt, synthetic construct
  source 1..915: mol_type = other RNA
atgcttaccgaggccccccgtcaccacctatggaaggaaatcgaacgcgctgcagaggagctctccacacaccatcccatcattaaacttaatgccttcaatggctactccgggagggagtttttctacaccgagggctctataagggtcgctcgaaagcggagagctctcgcctgtccttccgaacagttaaaagaactgcagcggatcatcctgacgtctattctcgatgtggccgctcctcataaacaggccactgccttctttcggggttgctcaattgtccagaacgctcgccagcatcaccgtaaggattatatgttcaagaccgacatcaagtcctttttcgaccatatcaagtcagcggatatcatgagagctgtgcagagatttattccgaatttgtcacaagccaatcttgatgcactaaccaaagtcctgtcttgtgacggtgctctccctcaaggcgcaccaactagcccacacgtttcgaacctgcacatgcgagattttgacgagttaattagcgccgaggcccgcaagagagggtgcagttacacacggtatgccgacgacatagcaatcagtagtgacgataagttcgctgtgcaccagatgagtgaagttgtgggggaggcgctggagaaagcaggattcacacagaacaagcgcaaaacacatctcttgggcaaattcgatcgaaaaatagtaactggactggacgttagcggagtgtatataaggcccaccaagaagtttcggaaaactaccaaagcgatgacgcgcgtatttattgtgtacggcagaaaggcaatgctgcctagcatcgaaagcaggttggccttctggagatccatccggccagatgaccccgaactgtttcaactgaggaagtctattgacaacgagaggtga

SEQ ID NO: 12442 - RNA, 1485 nt, synthetic construct
  source 1..1485: mol_type = other RNA
atgggcaagtctaagaacaacgaattttccagacggcagctgctgattgcctttgcttccacatcaatcattggcataatgccaagtatcacctcagcctctagccacatctacgagaaagagaatgcattaatttggcttatcggtacactgcagcccattagtttgaatgagcttgagaacacctccttttttccagaccgctcttggctgattgagactattaataacttcgaggagcagctactaattaacaagcataagcggatctccgagttttatttctctttgacccacgagggtcacgaaaagctgccttggatccacgctcatagtaaagatatcaccagactcagcattctccgttcaagcatcttcaggtccaagaataaggtcaaattcgatcgctggatagcatctgctggtgtatcccccccgaaacggacgaacgttccagtgagcctgggagctcacaacttcgcccgcattgaagacgagatggtgagttccgacagacttttttccgacaaaaaccagctgattagctttaatagtgcacaggacctggccgatagtatcccccagaatctgtcccagagcgaggtccctttgtacaagttcgcaattgacctaggcattagcgtggaattttttcaaaagttcttcgaacaccgttatgaaatgtacaagttcaagaagacacgcaaacagaacggaacgctgagggaaattgaaatccctcttgagaatcttaagactctccagagcgtaatggcatggaagctctcatttcagctgaagcctcacaagaccgtgcatagttttatacggggacgatcgagcattactaacgctaaggaacacatacgaggcgactttatcggcaaatctgacatcaggaatttcttcccaaacatttcatctagcaagatctatacatctctgatctcctcaggatacaacagattcgaagccaaattcatagccctcttctgtacaatacaaaagaacaagcgctccaaattgccgcatgggtcccccacctctcctatcctctcaaactttgtcctctacgatgccgatgaaaccatctatcagtactgcaaagccagggatatcacatatacccgatatgcggatgatttcactttcagcggcaaaaattactcaaaaatccaacaggcgatcaaataccagatttctgccttggagaatcatgactttcaacctaatcattcgaaggttaaaatcagcaatgccagggactttcccagggtgacagggattaacatcagcggggatatattccccccacggaatctgaaaaagagggctagagctgtttttcacctgatagagacggggaatagttcgccaaaagtgagaagccaagcagccggatacctggggtatttatctcagttcacctcattcactagaactgcgacttacaagaaatggcagaccatcttagagcgccggtga

SEQ ID NO: 12443 - RNA, 1005 nt, synthetic construct
  source 1..1005: mol_type = other RNA
ggctactacacgttcaccatcccaaaagggtcaggtggcaccagattaatcactgcgcccgatgatgagctgaaagcaaaacagaggaagctgttgaagaagatgcagaaaaagcactggatctcaagaaaggcacatgggttccgcaagcgacataactgccttaccaatgctcaggtccacgccggcaagaaatatattctgaacatcgacgtaaagaacttttttcccagcataacttctatcgcgtatcggaactacgctactcgggaaaggaatctgatggagacaaagtataaagatgaggaccgcggctttcccaatttgttcttctacgcagctacacctgtgtttcactccggatctctgcctcagggagccccaacgtctcctttcattagtaacatatacatgcgtcgcttcgacacacagatcgaaaagctcctcaggcagtatatctccgacgacatcctatacactcgatacgtggatgatctcacatttagttctaatagcagagccgttgaaagagtgatccctattgtccgcgggaaactgaaatccctgcgccttgagattaacgatgataagaccaagtttatgtccccctcgcaaaggcaagagataacaggaattaacgtaaacagtgggaggccgacaatcgggaaggcctatagacggaaagtgagagcgattgtccaccgcgctgaacagggttgggtgattacttcagcacaaaaggaacgattattgggcatgattagccacatcgctctctgtcatccgagtgaggccgcaaagtatcgtgacgccctgcttccagttagcatatccccaaatagcgcccgtatgttcagcggtgtgaatcgggttaagctgcccgtcaaaaagaccaggtcaaaaaagaaacagtctaattccaatgccggagtcaccggagctaaccggaccgtgaaacggaaaattgccatagacaaaaagggcgaggtgcatgacatcgactga

SEQ ID NO: 12444 - RNA, 1071 nt, synthetic construct
  source 1..1071: mol_type = other RNA
atgctcatggggccacaacagatgcaacccgtggctgcagcggccgcatggaatgttcctcgcatagaatccccagacgccttagccgactggctccgactcactcctggagagctgagatggttcgcagatctcaaccacctgaatgatcgcagcagaattcaaaagctgtcccattaccactatcagatatccacaaagccagctggtgggtggcggttgatcgagtcaccaaagcctcgcctgaaacacatccaacagcaagtgctgcaccatattctggaacgcattcctccacaccgtgccgtacatggtttcctgaagggccgctcgatccagacatttgccgctccgcatgtcggcaggcgtgttgtcttgagaatggacctacaggatttctttcctacgttccgaggcgctcgtattcgcgcgttcttcagaaccctgggataccccgaaaccgtggccgaccttctgggtggactctgcactaatgccgtgagccacaatgcgtggcctacgcggatgcatcacgaagactctgcccacaggtctagggtccaggccttctacagcagggtacatctgccccagggggcaccaacaagtccccttctggccaacttatgtgcgtatcgtatggactgcaggttggccggacttgcagagtcagctggcgctcggtataccagatacgcagacgatcttgctttttccggcgagaaggattttgaacgggggatagagaggtttagtacccacgtggctgcaatcctccttgaagaggggttccaggtgcactttagaaaaacaagagtcatgcggcagggcgtgaggcagcatttgaccggcatcgtggtgaaccgacgactaaacgttatgcggcccgattttgacaggctgaaagccattttaactaactgtgttcggctgggacccgagagccagaatcgagagggtcacgccaacttccgctctcacctggagggacggattggctttatggagatgatccatccccagaaaggggctcggctcagaaggatctatcgcgaaatcagatggccgtga

SEQ ID NO: 12445 - RNA, 1329 nt, synthetic construct
  source 1..1329: mol_type = other RNA
atgcagaagctcttcctagtgaaggttattgccggtgcatttctgtctggcgaacccacgattccagaaattgtcgccaggttgtctagaactctcgggaagagatgggactggatccatcctctggcccagaggtatataaagacaatcgcaggtcgaacccgcccacgacggagagatgtagtgaagtttctgctgcaggactctggcttcaagaaggcctggtccaatcatgcgcaccagctctccattaagcagtggttaaccgagccccaacgaatgcagccggtcagtgccgctgaaaattggggaattccagtgatagagagcatcggcgccctggcacagtggctggaactgactcccagcgaactcctttggttctccgatctacgcgggctaggctgccgctcagatgagcgtcgcttgaggcactatcactaccgcatcctggataaacaatatggtaacatcaggctgatcgaattgcctaaaccccgcttaaaacaactgcagctccagatcttagcgcagatactggagaggattcctccccacccatcggtgcacggatttgtgaagcggagatcaatcaaaactttcgttgccccgcacgtgggcaggcctatagtccttagaatggacttgcgggagttcttcccaagttttcgtgccgccagaatccagacactgttcagaaccatcgggtatcctgagccagttgccgacctgcttggagggatctgcaccaatgctgtgagccgcgacgtatggaaaaaaccttcccccgacgtgcatccttgtcggtggagcgaggcgcggattctgtactcaaagcctcacttgccgcaaggagctcccacctctcccgctctggcaaacctatgtggatacagaatggattgcagactggctgggctcgcaaagagtgtgggcgctcaatacacacggtacgctgacgatcttgccttctccggcgataaagcactcgaaatgcgcattgagaggtttgcgacacatgtggcagccatattaatcgaggagggctttatggtccactaccggaagacccgggtaatgcgtcaaggagtccgccagcatcttgttggactcgtgatcaaccaccatgtgaacacgattaggcccgactttgaccggttgaaagctacactgactaactgtgttcgtctggggccagaatcacagaatagaaatgcccacccacatctcaggcttcatctggaggggaggctgggcttcgtcgagatgattaaccctagcaaaggtaagcgactccgagctatttttaaccagatcaattggcagtga

SEQ ID NO: 12446 - RNA, 1329 nt, synthetic construct
  source 1..1329: mol_type = other RNA
atgccgttcagcagcctactgcgaactgttgcggcctccttcgtagcaggggaaacgacaaccgaggaaatcatcgccagactttcctctacattgggacggaggtggaggtggttgggccctcttgcccagcgctacgtgaagttcgtctcagcgagaacacgccccagacactccgaagtagtccagtttctgcgccacgatgcgggctttcgaagggcttggagccggcacaagaacgagatctctatcgagcagtggttaagtggtcccgctcaaatgcagcctgtgaccgcagctgcaggttgggacctgccagcaattgagtcaataggggaactcgccgcctggtttggactgaccgtcagtgagcttctctggttcgcagatctgaagggcctcgggtataggcagaagtctgagaaactccatcactaccattacaggatactccctaagcctagcggtgagattcgcctgatcgaggcccctaaaccccgactgcgcgaattgcagagacacatactgtccgggatcctgtccagaattcccccacatcccgctggtcatgggtttattaagggccgttcgattaaaacattcgtgctgccccacgtgggccagcacgtgatcctcaggatggacctgcgtcacttttttcctagttttcgagctgcgaggatccaaaccattttcagaaccacaggttatcccgagccagttgctgacctcctgggagggatctgtgccaattgcaccccaagagacgtctggaataagtacggcagtgagtccgattacgactgccggtggcaagcccgagtgctgtattgtagaccccaccttccgcagggagcgccaactagtcctgcccttgccaacttatgcacgtatcgggccgactgccggttaagcggcttggcacgcagcgcaggtgctcgtttcactcggtctgccgatgacctcgctttctctggcggggccgattttggaagacatgtggagcggttttcaacacacgttgcagctatattgctcgaggagggcttcgacgtgcactacaggaagactcgtgtgatgcgccaaggcgttcgccagcatcttgccggagtcgtgctgaatcagcacgtcaacgtaatgagggctgattttgatcggctgaaagctactctgaccaattgtgtgcgactaggaccaaaatcacagaacagggaatctcattcaagcttcagatcccatctggaaggacgcatggccttcgtggaaatgattaacccagccaaagggaagcggctacgggcaattttcgaccagatccattgggaatga

SEQ ID NO: 12447 - RNA, 1356 nt, synthetic construct
  source 1..1356: mol_type = other RNA
atgaggaatcactcgctccttacatctctcgccaggtcatttctggccggggaacctgacaccgatcaggtctttacaagagcaagtcgcttacttggaagacgttggcgctggctgcggcctttggctaggaggtatgttatggcatttgcggacaaggctaggcctagacagagagacgttgtccgctttctcctgcacgatcccgatttcaagcacgcccgtgaaaagtatttcaaagagcttagcgtgcgacagtggctgatcggcccacaacagatgcttcccgtggccgccgcagaaacatggggagttcccgctattggcagcattggggccctggccgattggttgcagttgaccccgggcgagctgcagtggttcgctgatcttaaagccctaggatataaacgaaaggactgcccacagctccagcactaccactataaggtgttttcaaagcgctccgggagcatcaggttcattgagagtcccaagcctaggctaaaggagctccagcgtcaaatactggctcgcatactggaccgcacgccagcgcatcctgcagtccatggcttctgtcggggacgatccattaagaccttcgcagcatctcacactggccggagggttgtgttacgtatggacctgcaggacttcttccccagcattactggagctcgcgtgcaggccctgtttagaactgctggctaccccgaaagtgtagcagatctcctggggggaatctgtaccaatgtagtcccacgggatgtctggaaagagccagcccacgagatcgatctgcgacagctctgggaggcaagagtgctgttctcccgacctcatttgcctcaaggtgcaccgacctcccccgctttggccaacttatgcacataccgcatcgattgccgacttgccggtttggccaaaagcgccaatgcggagtacaccagatacgccgacgacctggcattcagcggcggtcacgaatttgaaagatctgtagaacggttctcaactcaggtggctgccatcctatccgaggaggggtttgcgatcaaccatcgcaagacccggatcatgcggcagggcgtcagacaacatctcgctggcctggtgatcaaccagagggtgaacgttacacggtctggatttgactgtttaaaagcgactctcacgaattgcgtgcggctggggccagaatctcaaaatagggagaaccatccaagtttccaggctcacctggagggtcgcatcgggtttgtggaaatgataaaccccgctaaagccattaggctgcggaggatatttgagagaattcaatggacaggcatggaatcacagagagagcggtga

SEQ ID NO: 12448 - RNA, 1329 nt, synthetic construct
  source 1..1329: mol_type = other RNA
atgtctaggtcatccctcctgagagtcctggccaccagtattcttgcaggagagcctacggtggaccacatcgtagtgcgcgtgtctaggacactcggtaggacctggagatggctcccacctttgtcccaacgatacgtcaaggccttcgccggaaggactcgtccacggagacgcgacgtcgtccagtttttaagacatgaccctgggttcctgtgtgcctggtccaaacactttcacgagctctgggttgagcagtggcttaccgaacagcagagaatgcagcctgtggctgccgctgaaacttgggctgtccccgtaattgagagtcctggcgcactagccgattggttgggcctgcggacagtggagctgcagtggttcgctgatctgaaagggctcgggtataagtcctcccgacctaagcttagacattatcattaccggatcttggccaagcagtctggtaacatccggttaatcgaggcaccaaagccccgtctgaaagaattacagcgccaaatcctggcccagatcctagaacggattccaccccatcccgcagtccacggttttgtgaaaggcaggagcataaagacctttgttgcaccgcatgtaggacagagggtggtgctgcgaatggatttgcgtgatttctttccgagcttttctgctgcgagaatacaagcaatcttcaggacgctcgggtatccagagtcagtggctgacctgctgggcggcatttgtactaacgccacaccccgcgatgtttggtcacggcctgcgtttgacattgacctgagtcaggtccaggaagctcgcgccctgtactctcgcccccatctaccacaaggagctcccacctcgccagcactggccaatctgtgcgcttacagagtcgattgtagactgagcggcctcgccaaaagcgtgggggtggagtacacacggtatgccgatgacttagcattcagcggcaacgaagccttcgaacgttgcgtggaccgatttagcacccacgtggcagctatccttttggaggaggggtttgcggtgcactttcggaaaaccagagtgatgaggcagggagttcgccaacaccttgcgggcctggttgtcaatcagcacatgaatgttatgcgacctgacttcgatctgcttaaggccacattgactaactgcataaggctgggccccgaaagtcagaatcgggacgcccacccccgcttccgatcacatctcgaggggcgcgtgggtttcgtggagatgattaacccggtacggggacggagactcaggactattttcgaacagatccaatggaggtga

SEQ ID NO: 12449 - RNA, 1338 nt, synthetic construct
  source 1..1338: mol_type = other RNA
atgagtaagagctctctgcagcgcgcacttgcgaacagcttcctggctggtgaaccatatctggagcagctcgtatcaagggcatctcgcaccctggggcgagattggaggtggctgcgatcactcgcacacaggtacctgaagaggtttgcaggtcagacccgccccaggcatagggatgttgtgcggtttcttaacgacgattcgggctttagacgtgcttggcttcagaaccacagcgagttgactgtggcccattgggtgaccgagccccctaggatgcaaccggtcgcagcagccgagtcctggaagattcccagcataagctcagctggcgacttagctgcctggttagggctctccattggcgaattgcagtggttcgaggatgttcgccgactggtgtacaaggagggctccagtaaactccgacactatcactatcgtgtagttgccaagcaattcggagccgttagactgatcgaagcgcccaaaccaaggctcaagacactccagcggcagatcctgtcccagattctggagcaaatccctgcccatccggccgcccatgggttcattaaaggacggtccattaaaacatttgtgagcccccacgtcggacggagggtgatccttcgcatggacttgcaggacttcttcccatcgtttgcagctgcacgcatccaagccctcttcagaacctttgggtaccctgaatctgtggctaatttgctcgccgggatctgcaccacaactacgccccagtctgtgtgggagggtacagggttcgatgtgagtctgaaacagctgcaggaggcgcgcatcctatattctaatgcccaccttccacaaggtgcccccacttcccctgctctcgccaatctgtgcacctatagagtggactgtcgtttacggggtctggcttctgcagcgggagcagcatacactagatacgccgatgacttggcctttagcggcgacacccagttcgaacagggcattgaacggtttagtaatcacgccgctgctattatcctagaggagggcttcgctgtccacttcagaaagacgcggatcatgcgtcgaggggtccggcaacatttggcgggaatcgtcacaaaccaccatataaacattatgcggccagatttcgacaggctgaaggctatcttaactaactgtgtgagactaggacctcagtcacagaatagagacgcccactcccattttcggctgcatcttgaaggaagagtaggctttgtcgaaatgattaatccagccaaaggctaccgcctgagacgcatactggatcagatacagtggcctaccgagacatga

SEQ ID NO: 12450 - RNA, 1335 nt, synthetic construct
  source 1..1335: mol_type = other RNA
atgggcggcccaggcttctatgcggccttagcgaatagcatggtggccggcgaggctaccgaagatgccatcgccgctcgcctagcccaaaccctcggacatcggtggagatggatcaggccactcgctcggaggtatgtggcccgctttggtggggcaatgcgacctagacgccgcaccatcgcacagttcctgataacagatgagggattgtcccgcgcgctgaggcttcaccggaaagatattcgtatcgctaactgggttgctcccgctggcgacatgcagcctcatagagcagcaaagaactggcccgtacctgccattgaaaccgttggcgcccttgctgaatggcttcaggttacacccagtgagttggagtggtttgccgacctcaaaaggatgattagcagaagagaggacggattcgagggacccctgagccattatcactataggatcctggccaaaccagggggggacgtccgtcttattgaagcaccgaaggaaagactgaaaaagatgcagaggcagatcctggccgacgtgcttgaaaaaatccccgtgcaccccgccgtacatgggtttcgaagaggacgatcaattaagacatttgcagcgccgcatgtcgggcaacgcgtcgtaatccgaatggacctgcgcgatttttttccttctatctctgctccccgggtgcaggcattattccggactgcaggttaccctgagagagtggccgacctcttagggggcatatgctcaaatgccaccccaaggactctgtggacgaagaagggcagtggtattgatccactaaggatggctgaggccaggcagcactacgcttggccgcatctgcctcagggtgcaccttcgtctccagccctggcaaatatttgcgcctacagggtggactgtcggctgacatgcttggccgaagcctccggagctgtctacactcggtacgccgacgatctggctttctccggcggcatggatttcgagagatgtgcagagaggttcgctattcgcgcagcggctatactcctggaggaaggttttgcggtgcatcacaggaagacgcgaatcatgcggcagggcgttcgccaatacttggccgggattgtggtcaatgagcacgtgaacgtgatcagacgtgactatgatgccctcaaggctactctgaccaactgtgtgagacacgggtgggagtcccaaaaccgggaaggacacgttaacttccgcgaacacttggccggtcgggtcagcttcgtcgaaatggtgaatgctaagcggggagccaaactcagagcactgtttgagcgtatacgatggtga

SEQ ID NO: 12451 - RNA, 1206 nt, synthetic construct
  source 1..1206: mol_type = other RNA
atgacattgggtagaccatggcgctggctaagaccactgggccagaggtacctggccaggttctcgcaaggcactaggcctcgaacggccggagttgtcgacttccttctgcaggatccaggatttcgtcgggcagcccaacggcatgcacgtagcctggacgtggcgaattggctctgtgagcctcgccagatgcaacctgtggggaaggctgccggctgggatattcccactattgaaaccgtgactgatcttgcttcatggctggaaattcccttagacgcccttaattcagccgctgtcccatttgccacaagccatcactatcactatcgcctcctgtccaagcagagcgggatgctgaggctgattgaggcccccaagccacgacttaaggctttgcagagaaggatcgcagcgggcatactggactgcatccccctgcatccggccgtacacggctttcgccatgggcactctatcaagacatttgctgccccgcatgcgggacaacgggtagtgttgcggatggacttaagagactttttccctactataacacgggcacgtgttcaggcctttttccgcactgcagggtatcctgaagcagtggccgatatgttgggaattctctgtactaactcaacccctggaagtatctggaaaccggccgatcccaaactagtccctgagatgcgcgcacttcacaggaccccccatttgcctcaaggcgcacccacctctccagcgttagcaaacctgtgtgcatatagattcgattgcagactctctggcctagctctcgcctccggggctttctacacaaggtacgctgacgacctggccttttccggtgacacggatttcgagaggtccgtggaccggttcaccacacacgccgctgctatcctcatggatgagggcttcagcgtccaccacagaaaaacccgcgtcatgaggcggggagttcggcaacatctggcgggactcgtgaccaatgatatcccaaacatctaccgaggtgattacgaccgactgaaagccattctgaccaattgccttcgacacggccctgccagtcagaacagaaatgggcatcccgatttcagagcccacctcgacggtcgcatcagttttgtggaaatgattaacccctctaaggctcggaaactgcgtgcactgtttcaccagataaactgggcttga

SEQ ID NO: 12452 - RNA, 1329 nt, synthetic construct
  source 1..1329: mol_type = other RNA
atggccaacccctcattgcccaatctcctggctcgtagtttcttggcaggcgaaccctcactagaccaaattgtttcccgatgcacccaggtgctggggcgcagatggctttggctgaggccgctggctcagagatatctggaaactaccacgagtaaaactcgtcccaggcaacgcgaggtcgccgacttcatcttacgcgatcccgtgttcagcaggatatggagcgagagggcacatacactggcgattgaacaatggctgccagctccatcccgaatggcacctgtgccagccgctagagcttgggatatccctctcatagattcccctgcggccctggctgactttctctggcttgactacgccgagctggactggttcgcagatcttaagaagttaacctacaaaaccgcccacccacggctgaggcactactactatagagtcctcaccaagcagagtggcggcgtccggttaattgaagccccgaagcggcgtctcaagcgactgcagcgcgagatcctggccggaatcctcgagaagataccccctcaccccgccgttcacggattttttaaaggaaggagcatcagaacatttgtcgctcctcatgttggccggcgggtcgtgttgagaatggatctccgggattttttcgtgagcttcggcgcagcgaggatccaggcctttttccggactctcgggtatccagagagcgtagcggacctgctcggcggaatttgtacaaacgcggtgcctaggcacgtgtggcatgatgcagggagtgacatcgatccagcagaattcgaacgcgttcgctccctatactctcgccctcatctgccacagggagcccccacttctcccgctctggcaaatctgtgcgcctatagactggactgccgcctggccggtcttgctaaatcggccggggtaacgtacacgcggtatgccgatgacctggctttttctggcgggtcagagttcgaaaaacacgtggagaggttttccacacacgtggccgcaattgcattggaggagggtttttctgtgcatcaccggaagaccaggatcatgagaagaggtgtccgccagcaccttgccggcgttgtcactaatgagaggattaacatactacgtgccgactttgatcggctcaaggcaaccttaacaaattgtgtgaggcatgggccggcttcacagaaccgaactgcccatccaagcttccgagctcaccttgacggtcgcgtagctttcgtggaaacaattaaccctgaaagaggaaaacggttgcgaaccttgttcgagcagatcgactggagatga

SEQ ID NO: 12453 - RNA, 1308 nt, synthetic construct
  source 1..1308: mol_type = other RNA
atggccaacccagccctggttgcacaccttgcgcgctgttttgcgtccggagagacaaccgccgacagaattgctgaaagggcagcggaagtgttggggcggacctggttctggttactgcctcttgcccgacgctaccttaaagagcataagggttccactcggccgaaacagcacgatgtcattcgatttctactggatgacggggagtttaggagaagagcaaacaagctgagcgtggcccggtggttaatggccccacagaggatgcaaccagtacctgctgctgctacctggtccctgccagaactcgtgacggccggagacttggctgcatggttgggcgtaagtcctggggaactcgactggttcgccgaccgaaagggcctcaacgcacgaaccaagagagctcccctggaccactatcactacagaattctcgcaaaaccccggggaggcttaaggctgatcgaggccccaaagccgagactgaaagagatgcagcgaaggatcttgactgaaatacttaatcgtattcccgcacaccccgccgcccatggtttttgtccaggacggagtatacggacattcgctgaaccccacgtgggacgcagcatcgtactcaggatggacctgcaggacttctttcccagccttccggctgctaggatacaggctgtgttccgcacccttggctatcccgagtccgtcgctgacttgctggccggtgcctgcactcatcgcacactttcgtctgtgtggagggcagcagagcctagcatctctggggccgaactgttcctggctcgccaactgcatcagtcacctcacctccctcagggagctcctacctcacccgccttggcgaatctgtgcgcctatcatgctgattgtcggctaacaggtctggcaagacacttcggcgcggtgtatacgcgatacgccgatgatctggccttcagtttcgatgagccaggtgacgttagccggtttacctcttacgccgccgcaatcctgctcgaggagggctttgctgtcaataatagaaagactcgtattatgactcgggggagacagcaacggttggcaggactcgtgacaaacgctcgcttaaacattccacgctctgatttcgatcagctcaaagccacactcaccaactgcgttcgtttcgggcctgcggagcaaaatagagccggcgtggccgattttagggcacacctgctggggaggattggctttgtcgaatcaatccatcccggcaagggcaggcgcctgcgtatcctatttgacaatatctgctggtga

SEQ ID NO: 12454 - RNA, 1308 nt, synthetic construct
  source 1..1308: mol_type = other RNA
atggcaaacccagctctgttaagcattctggcccggtgcttcgcgtcaggagaacctacagcggatggtatcgctgcccgaactgcccaggctctcggtaggccatggttctggcttctgcccttagcgcgcagatatctgaaggcccacggcgctttgacacgtcctaagagacaagaagtcattaggttcttgctcgacgacaccgggtttcgccaccgagcacacaagctgagtgtagccaagtggctgacagagccacagagaatgcagcctgtgcaggcagccgctgaatggaatctgcccgagttggtgactgagggggatctggcttcttggttgtccgtccgcccagaggagctggattggttcgctgacccgaaagggctcaatgccaggacatcgcgcccacctttagagcactaccattaccgagtgctggccaaacggcggggaggcattcggttgatcgaagcccccaagccccggcttaaagaaatgcagagacagatcctcggcgagatcctcgatcttgtccccgcacatcccgccgcccatggattttgccctggtcgcagcatccgcaccttcgctgaaccacacgtggggcggccagtagtgctgaggatggatctgcaggacttcttccccagccttccggcagccaggatccaagcagtgtttaggactctgggctaccccgagctagtggccgaccttcttgccggtgtgtgtactaacagaacccactccagtgtattgcgtacaccccggccagctatacctcaggttgaactcatcgaggctcggcgcttgtatcactggcctcatctaccgcagggggctcctaccagtccggcattagctaatctgtgtgcctacagagccgattgtaggctgaccggactcgccaggaattttggcgcaatctatacaagatacgctgacgacctggcctttagcttcggacagccatcagatgtcagacgtttttctacgtatgcagctgccattctgctcgaggaaggctttgcagtgaaccaccgaaagaccaggattatgacgcgcggtatgcaacaacgtctcgcaggcctggttactaatgaccatctgaacatacctcggtctgattttgataccctgaaagctattctaacgaactgcgtgagacttggccccgcgacccagaatagagcgggggttcctgactttagggcccatctcaacgggcgcgttggattcgtcgagtccatacacactggaaaaggctcccgactgcgggcaatcttcgacaacatttcatggtga

SEQ ID NO: 12455 - RNA, 1323 nt, synthetic construct
  source 1..1323: mol_type = other RNA
atggatcgcaggacactcgcgactgccctggctagggcactgtgtgctggcgaagctgatgcagccagcgccgctgagcggttagagcagaccctcggacgtaaatggagatttgtggcacccctggctcgaaggtatgcagcggcctttgaggccgttgtgcgtccacgcctggcagatgtggagcggttcctcagtcgggacggcggtttttgcagagctgctcgaaggcatggaccacagctcgccgtggctcagtggattcaggaacctgcaccagcaatgaggcctgccgccgctgctagagaatggggtctacctgctgttgcgactccgggggacttagccgcgatgttggggctggaggctgccgatctggactggttcgcagatctgagaggctggggtgcagggggagttgacgccaaactggagcactaccgctatcgtgtggttcctaagcggtccggccgcctcaggctcatagaagctcccaaacagaggctcaaacaggtgcagcggcgactgttggctgaaatccttagaagcgtaccccctcatccagctgtccacgggtttgtggcggggaggtccgtagccacattcgcagagccacacaccgctaagcgcatggtactgaagatggatctgcgggacttttttccaagtgtgagggcggcccgtatcgaagcctttttcaggacggcgggctatccagaacctgtcgcccgagctctgactgggctagtgactaatgctgcacccaggagagtcttcgctaaagagggggagttgggtttagtgcacggcgcgcgaagcctatactgtagaccccatcttccgcaaggagcccccacctctcctgccttggcaaatatttgcttcagacgcgccgaccaacgccttgaggcacttgcccggtcagctggtgccgactatacccgctacgccgatgatctcgctttctcaggcggcgacgatttcgcccgacacgccagaagattttctttgcacgtcgcagcaatcgcaacagaggaaggcttcgccgtcgagcaccggaagacacggttggctcctgagtcgggcaggcaacggttagcgggagtcgtggtgaaccatagacccagcctgccgcgagccgaaattgagacgctggaagccatcctgaccaactgcgcccgcgactctccagaaacacagaaccgcgacggacacccccgttttcgggagcatctggcaggacgcatagcctacctcgccatgcttaatccctccaaggccgccaagctgagagccatcttcgaccggattgcatggacctga

SEQ ID NO: 12456 - RNA, 1326 nt, synthetic construct
  source 1..1326: mol_type = other RNA
atgcagcggagcctggtgataaaaaagttggccgaagtctttctggcctctgggataaacagtcctttcttgacttcacggtgcgcagtcgtgcttggccggaattggagatggctgaggcccctggccgatcgatatgtggtgaccttcagcaatcgtataaggcccagctacagagaagtcttaagtttcctcgaaaccgatactggcctcaaagaggcatttacacgcaactccggacagtttgaaatcaagcagtggatagaggaaaccccccacatgaggccagttccagctgcccaagcttggcccgtaccccctattgagacaacgggggcattggctgagtggctgtggctggacgcaggccacctggagtggtacgccgacttgaaagcctttgccgagacatccatctcagaaaaacttagccattattcttaccatgtcctgcgcaagagaaccggaagcgttcggttgatcgaagccccgaagcgccagatcaaaaagcttcagactcagattctcgagtggatcctaaatccagtgcctccccatcctgctgttcacggctttattgcgaagagatccattaccactttcgttgctccacacacaggccagcgggtggtgctgaagatggatctgcgaaatttcttcccgagtctgagggcggcgagaattcaggcattttttagaacggcagggtatccagacgaggtggcccagctcctcacaggagtgtgtaccaacatcacaccaaggaggttttggcgcgctcccgaactgaacctgaccttgcaggagattcaagacatgcgggatctctacggaaggccgcaccttcctcagggtgctcctacctcacctgctcttgcaaacttatgcgcatggcgcctggactgcagactgcaagcgttagcggcctctgcaggggcccaatacactcggtacgcagatgacctagttttctccggggacgagcatttcgaccgttctgtcagtcgttttagcgcccacatcggtgccgtggtgctagaggaaggcttcgctattcatcacgctaagacgcgaatcatgcggcaaggacaacagcagcgcgtcgctggccttgtagtcaaccagcacgccaatgtggccagacctgattatgacaggctcaaggccattctgacaaattgtatccgccatggacccgagtcccagaaccagaatgctcatacttcattccgacagcatctggagggtcacatctcgtttgtgcacatggtaaacccagccaaagccctcaggctccgagccctgttcgatcagatcgcatggtga

SEQ ID NO: 12457 - RNA, 1134 nt, synthetic construct
  source 1..1134: mol_type = other RNA
cgcgataggggacttctgcgggcctatgaaaattacggtcaccgaatcaacgtaatcacctccttcccagaggtacaggaaatgtgtcccgtcccagctgcgaggacatggggagttccaccaattagaactgagggcgagctggccacatggctggggatagagctgaatgagctttattggtttagtgatgtggcaggcttcggcgccagacttggtgcacctccgaagactcgccactacagttactggattctcactaaacgctccggaaacatcagactgatcgaggctcctaaatctagattgaaggccctgcatcgaaagatcctctctgaaattctggagcgtgtgcccatccacgacgcagctcatggctttgttaaagcaagaagcatcaccacattcgcagctccacacattggacggcgagtggttctaaagatggacctgcaggattttttcccctcctttcatgcagcacgaattcagactctgttccgcaccataggataccctgagcgagtcgcagacttgttttccggcttgtgctgtgccagcacgccgagagaactttggaagcagatgcctatcgaggtgaatccacagcaatggagggaatcacgggacctctacttcaggacacacctaccccaaggtgcgcctacgtcaccggctctggccaacatctgttgctaccggctcgattgcagattagcctctctggcgaattcggccggcgctgcttataccagatatgctgatgaccttgccttctcaggggtgggtcagtttgtgcgcggcatagagcggttcgctaaccacgtggccgctgtcctgctcgacgaagggtttagcgtcaactttaggaagacccggattatgcgtcatggcgtcaggcagcggttaaccggactcgtaatcaatcagcaccctaacgtgccccgtgatgagttcgatcgcctgaaagccattttgacaaattgcgttaggctcgggcccgacactcaaaacagggaggggttgagccattggcggcagcacctggaaggacgcatcgggttcgtggaaatggtgaaccccaagaggggcgccaaattacgcagaatatttgacgtgattgcctggaattga

SEQ ID NO: 12458 - RNA, 1332 nt, synthetic construct
  source 1..1332: mol_type = other RNA
atgcgccccaacgtctgcctctttgaggcactcgccagcgccttcgtagccggtgatcccaccgtggacgggatcgtcgcacgcagtgctcgcatgctgggacgtgattggcgttggctccggccactggcccaaaggtatgttgaaaccttcgcaggtcgtgtaagacctcgccgaagcgacgcggttgacttccttcggggtgataagcgattcagacggatctgccagagaatcccatcccatattggcattgcacattggctgactcagtcccagcgcatgctgccaatggctgccgccaagggatggagggtgccttccattgaatctgtcagtgccctcgcagattggctagggactgatgaaaattacgttgaatggttcgcagacttaaaagcattaagctgtaagtccgaccacaacaagctgagacattatcactaccgtgttctgctgaaagatagtggcgacgtgaggctgattgaggcccccaagcaaagcctgaaaaggttgcaacagcggatactaacggggatactgaatggcataccagcccaccccgctacacacggattcgtaactggcaggtccatcaaaacctttgctgctccccacgcaggcaaacggattgtgctccgaatcgacctgcgcaacttctttccctcgttccgggccgcccgcattgaagcatttttcaggactatggggtacccggaaaccgtggctgccatgttggctggaatctgtactaatgcgacccctcgggatatatggcataacgtgaagccgggaggcggacccgtgcagttttgggagacacgcagcctgtatgcgcgccctcacttacctcaaggggcccctaccagtccagcaatcgctaatctgtgttgctacaggctggactgtagacttgcaggtcttgctaggtctgcgggggctgtctacacaagatatgccgatgacttggccttttcaggctcaaagtcatttgagaaatctgtggagagattcagcattcacgtcgccgccatcgctttggaggagggtttttcagtgaatcaccataagacacgaatcatgaggcagggagtgagacagagactcgctggcgttgtcgtgaaccagcatccaaacgtgcttcgacatacgtttgaccggttgaaagccacactaaccaattgcgttcggtacgggccgagctctcagaatcgggagaggcacatcaacttcagagcgcacctcgaagggcgcatctcctttgtggagatgctcaatcgaaacaagggctctagacttcggaagctgttcggccagattaggtgggagtga

SEQ ID NO: 12459 - RNA, 1338 nt, synthetic construct
  source 1..1338: mol_type = other RNA
atgaccggacgcatcgctgccgcaatgaacgccgcgttcttagccgcactcgctcggtccctcatggcaggtgaacaaacagtggaagctgcacgagcgagagccatgaggactctcggacgcaggtggaggtgggcaggtccattcgccgcaagatacattgcagcctttcgtcatggaccgcggccacggttgaaggacgtcatcgcattcataagggccgatgaggggtttgatctggccgctttgacctatggctctaagctgagtattgctcactggctggcggccccacagaggatgcttccatatggccccgccgctgattgggatctgccctcaatccatactgagggcgatctggcccgttggcttgcgctgcacgcaacggagttggactggcttgccgatcgcaaaaatctctgtagaaagcaagcgaaccccaagctgcgccattaccgatacgtgatcgagcctaaacgcagagggggaatcaggctcatcgagagccctaaaaggctccttaaggaactgcagcgacggatcctggctgaaatactagacagaatcccccctcacccagccgctcacgggtttgtgaaaggccggagcatagtaaccttcgcaacgccccacaccaaccagcctctggtcatgagactggacctggagaatttctttcctagctttccagcagcgagagtgcaagccctgtacaggacactaggatatccagacgccgttgcagacgtgctgaccggcctgtgcaccacttcaactttacatgacattgtcagagcccagacattcgaggaccgccgtttgtatgagcagcggcaccttcctcagggtgctcctacaagtcccgcccttgccaatgctatggcttaccggttggattgccggctgtcgggacttgccagaactgcgggggctgtgtacaccagatatgctgacgatctcgccttctctggcggtgatgaatttcggcggaacgcacaccgattccagcaccatgctgctgccatcgccctggaggagggcttcgctgtgaatttccggaagacgagaattatgcgtcagggggtaaggcaatcattggccggcttggtcgtgaatggcgggttatccattcgtcgcagggacctggaaaccctggaagctatactcacaaactgtttaagacacggacccacatcccagaaccgagccaaccatggcgactttcgcgcccatctcgaagggcgcatttcctacgttgagatggttcacccggagaaaggtcgccgactcaggagcctatttgacaggattgattcttgggcaaatactctgtga

SEQ ID NO: 12460 - RNA, 1299 nt, synthetic construct
  source 1..1299: mol_type = other RNA
atgaaaatttcttttcctgctgccgttgtcagtgcggttgctcggtcactcatggccggagagccgacagtggaaggagcacatgtgagaatgatgcgcacactgggccgcccttatagatggctgctgccattggccggccgatatgtgagagccttcgctggaagaacccgtcctcgattgcgggaagtcgtgcagtttcttctgaacgacaggggatttaggagggtgcgccagagacagctcgccgtagaacactggctcaccgagcctcagcgaatgcttccctgtggtcctgccgcagagtggggcttacccgtggtcgaatgcgaggctgaccttgcaggatggctgggcctgcacctgtctgagctcgagtggttctccgaccgcaagggtctgtgtcgtaaacacggaagcgagaaattgcaacactaccactacagaatggaagagaagcgatccggcggcataagactggttgagtgcccaaaaagggaactgaaggaactgcaaaggtggattttggggagtcttctcgatcggatcccggcacatgccgccgcacatggtttcgtgaaagggcggagcatcgtctctttcgcggcaccacatgccggcaaggcagtgctcctacgtatggacatggagaatttttttccctccttccccgcagctagggttgcggcactgtttcggactctggggtatcccgaggtcgtggcggaacatttgatggggctgtgcacgaacgctgtgcctcgtggtgtatggggaacccgggtcgaaggcagaatgctctactcccgcagacatcttccacagggtgcccccacatcgccagccttggcaaatgccatggcctatcggctcgattgccgcctaactggcttagcccgcaccgcaggcgccgtatacacaaggtacgctgacgacttagccttcagcggcggggaagaattccggcgagtggttgatcgattcgggatacacgtggcagctgttgccctcgaagaagggtttgctgttaaccacaggaagacgcgggtgatgggtcagggaatgcggcaggctctagctggggtggtcgtcaatcagggcgtgtcaattaggcgcgatgagctggagaaactggaggccatcctgactaattgtgtcagaaccgggcttgctgcccaaaacagggagggggtagcggattttcgggcccacttagagggaaggatcggattcgtggagatggtgcacagagagaagggccgcagactgcgcgctattttcgagaagatcaggggctga

SEQ ID NO: 12461 - RNA, 1035 nt, synthetic construct
  source 1..1035: mol_type = other RNA
ctggtggccgaatggctccctgaagcacctaggatgaggcccgtggcagcagccgaagagtggaaattgcctgcgattgaaaccgttggggatttagcagattggctctccctttacccagccgaactggagtggttcgcggacctgaagcatctgaacaaccggcgacccaagctgcagcactaccactatagagtccttgtcaagaggtcgggaggcgtgagattgatcgaaacaccgaaagccacccttaaggcccttcaaagaagggtgctcagcggcattctcgatcatgtacccgtgcacccggatgtccatgggtttgtccgaggccgtagcatcgtgacatacgctcagccccacgtgaggcaggatgtcctgctgcggttagacctggagaatttctttcccgcctttcctgctgcacggatccaggccctcttcagaacgctggggtatccagagactgtttctgatagactggggggactgtgcagcaatagcgctcctgctgacgcctgtggtgcactctacgcacggccccatttgccacaaggcgcacctactagtcctagtctggccaatctgatggcgtaccgccttgactgtcggctctcagctttggctcggacagcgggtggtcggtatacaaggtatgccgacgacctcgccttctcaggtggggtaccctttcgccgtggagtggaccgcttcgcttcccacgccgctgctatcgccctagaggagggcttcggggtgaaccaccataaaaccagaataatgcgcccatccacccgacaacagcttgccggaattgttgttaaccaccacgtgatcatctctcgtagggagctggagctgttagaggcaatactaactaactctgtgcgcagaggcccagcctcacagaatcgagacggaacgccagactttcgcggatgcctacagggccaggtatccttcgtcgaaatggtgaatagggctaagggccagccgttgcgcaccctgtttgaggccattgattgggaaagatga

SEQ ID NO: 12462 - RNA, 1359 nt, synthetic construct
  source 1..1359: mol_type = other RNA
atgagccgagcggccatcctgtctgtcctggcacgctcactgcttgccggcgaacctgcgtatcccgcagctaggagtcgggcagaacgaacactaggacgccggtggcgctggttgggacctttggctagacgattcgctggccgatttggagatgcagtgaggcccaggcaccgcgatgtcgtcagattcctcgctcgggacgcgggcttttcagaggccctgcatgcttatgggggccggattcggattgctgagtggttggctgaacctcagagaatgctgcctgttgaagctgcactggcctgggatctccctgtgatcgagactgctggtgccctcgcggagtggctaggtgtgaccgtggacgaattagactggtttgccgaccggaaagacctgtgtgggagggcgaacgcctctgagcagctccgtcattatcgtctccgactgctggcaaaacgcacaggaggagcccggttgaccgaggctccgaaacctaggctgaaggccgtccagagacgcatcctggaaggcatactcgatagggtgccgccccatcctgccgctcatggttttgtgcaggggcgttccatcgtaaccttcgcagagccccacgccagaaggcggatgcttctcaggctcgacctggcggacttttttcctgccagtcccgccgccagagtggaagcactcttcaggacattagggtaccccgaggccgcagccggactattagctggcctttgcaccacagccactcccagggccttctggagagactgcccagcctggttgggagccgaagagtggtccgctgcccgaacgctgtacgctagaccacaccttccgcagggggctcccacatctccagccttggcaaacgccatggcctacagacttgattgtcgtctggcagggctagcaagaagcgcgggagcggtctatactcgctacgcagatgacctggccttctccggcgatctggagttcgcaagaggcgtacacaggttcgccgcacacgctgccgcagtagccttggaggaggggttcgccgttaaccaccggaagaccagaattcgcggtcagggtgcccggcaaagactggctgggctggtggtgaatgaccgccccaatctgccacgcagagacttagagaggctcgaggctatactggtgaactgcgctcggcggggtccacaagggcagaatagggcaggcgaagctgattttcgtgcccatcttgaaggccgtgtgggctacgttgaaatggttaatccagcaaagggagagcgacttcggaggatcctggagactattgcttggccagaacgccaaggccgcacgctcgatagctga

SEQ ID NO: 12463 - RNA, 1005 nt, synthetic construct
  source 1..1005: mol_type = other RNA
atgcctgaggcctggggcctccctaagattgctagtgctgaggccttggctgaatggcttgggctcgatccgcctgacctggcctggttcgccgacttgcgaggtatgacgagacaggccccaacagaggccctacggcactaccgttatcacgtgatcgttaaacgacatggcaatctgaggctgatcgaagcccccaagccgcgactgaaagcgatccaacggcagattctgacagagatgttggaccgggttcccccacacgaagcggcacatggatttgtgcacggtcgttcaatagccagctttgccgctccccatactggacagtccgctgtcctccgcctggacttggaccacttctttcctagattacagcgggcgcgcgtacgcgctttcttcgaaaccctcggctataggaagcctgtggctaccctgcttggggggctttgtaccaatagagcccccaggttccttccatggcccgacttcgcaacaatgcaggttcatactgccccccacctcccacaaggtgctccttcatctccaagtatcgccaacagctgtgcttacagagcagattgccggttagcagggttggcagctgctgcaggagtcaggtacacccgctatgccgatgaccttgccttttccgggggtgacgagttttctcgcggagcactgacatttgcaacgcacgtggcattcattctgggagaggaggggttcgccgtgaatcatagaaagacccgtctcatgagacaaggggtgcagcagtacctgaccggactggtcgttaaccagcacctgaacgtggatcgggaggattttgatcgacttaaggccactctcacaaattgcgtccgcagaggcctggcgagcgaaaacagggagggcttaactgactttagggcgcatctggaaggcagggtaggcttcgtggagtggatcaacccacggcgcggcgaaagattgaggggcctaatactgcagattaaagattga

SEQ ID NO: 12464 - RNA, 990 nt, synthetic construct
  source 1..990: mol_type = other RNA
atgcacgcaaggttcgccttaagccatccgctgccaccactgcccacagaggtggctctcgccgattggctctgtctcagtccatcagagcttgactggttcgcaaatcgcagaaatctggcgacctctgccgccagaagccactaccgataccatctgcttaccaaaccctccgggggagtccgtctcctggaagctcccaagtttcggttgaagtgcctccagaaacgcattcagactggcattctggaccttttgcctccgcatcctgccgtgcacggctttgtgaaggggcgatcggtgaagtccttcgctattggtcacgttggacagcccggcgtgttgcgcatcgatctcgagaactttttcgcttccgtgcgctctgctagaatcaccggattgttccggacgcttggctatccccctccagttgccaagctgctatcagaactctgcacgaattctgtaccaaagacagtcctggccgaccatcccgagaggtttctgtacttcaatagacacctaccccaaggagccccaaccagccccttgctggccaacctgtgtgcatatagagccgactgcaggttagcagccctcgcaaaagccgatgggagtttatataccaggtacgctgacgacatcgcattctcaggtttcgtcaacaacgaccttgctgcccaagctagtgcgatactggcagaggaaggctttacagtaaatcaccacaagactcgccttatgtccgagggagttcgacagcatctggcgggcctcgtcgtgaacgccaaaccatctacacctagagatgagtacgatcggctgaaggcaactctgactaactgtgcccggtatggtctagatagccagaaccgtgacaagcaccctaattttcggcagcatctggaaggtcgggtggcttgggtcgaatacatccaccctgagaggggggcgaaactgaggaccatattggctaaactggaaccttga

SEQ ID NO: 12465 - RNA, 1299 nt, synthetic construct
  source 1..1299: mol_type = other RNA
atggcacgcatccttaacggagctcccttcgacgtccccggtatgatcgcctcagcagacgagatgctaggacgacggttccgctgggtgcgcttactcgccaaacggtacgccagcgctatggcaggcaaaacacggccccgccttcggactacccgtcaattcctcatccaggatggcgctgtatccgaagcgtggaggaaacacaagattagagttgagcagtgggtcacccacggaccaagaatgcaacccgctccggctgcctcagaatgggacctcccacggattgaaacatcgggcgatctggccgactggttttggattgaacccggggagctggagtggttcgccgatctcaagcgtctgggcaataagttgggtgttgctaagttgcagcactaccgatacttgatactcaagaagcccaatggcagactgagactgatcgaaatgcctaagaggaggcttaaaagcttccagagacagatccttgagttcatattggaccgaatccccgtccatccggctgcgcatgggtttgtgaaaggcagatcaatccatacattcgttgcaccacatattggacaggaggtagtgctgcgaatagatatcgccgatttcttcccagccattagtcaggaacggattcaggccctgtttcgcacgatgggatatcctgaagcagtatccgacctgctcggggggatatgcacaaacgccgtgccatacgaggtttggggacagaccccggagggtgtcgatgctcgggtaagatatgaagccaggaatctgtatagatgggcccaccttcctcaaggcgcgcctacttcccctagcctggccaacctgtgtgcctatcggttagactgtcggctggccggattagccaatgccgcaggcgtgcggtactctcgttatgcagacgatctagctttttctggaggcggggcattcgttaagaatgtgagacgctttgcggtcagtgtcggctctattctgcaagaagaaggttttgctgcaaaccacaggaaaactagggtgatgaggagaggagtgcagcagagactaaccgggctggtggtgaacgagaggcctaatgtgtcccgcgaggaatacgatcgtctcaaagcgatcctgaccaattgcgcacgacatggggctggtagccagaaccgggaaggccacgccttttttcgcagtcacttggaggggcgagtcggctttgtggaggctgtgaacccagagagggggcaccgcctcaggaagattctggagaggatcgactgggaggagtga

SEQ ID NO: 12466 - RNA, 1365 nt, synthetic construct
  source 1..1365: mol_type = other RNA
atgcctctcgccctggaaattgaaatctgcgccgccttggcacaagccttcacgaacgcggcgtccttacccgacatggtggctagcgcagatcatcttctgggtagcaggtggaggtgggtaagactgctagtgaagagattcgctgctgccaatcctagcgccacacgacccagataccgcgacgcatatcagtttctcgccaaagacggagctgtccggagggcactgtatcggcatcccggcgaaatccatcttgcccacacaattccctctcccccaagaatgcggcctgtcccagcagcccaaccctggaatctgcctacccttgaaactctaggggaccttgctcagtggttttggctgtcacctgagcagctagattggtttgctggcctcaaccgattctcaaagaacggatccgaggagctgcaacactatcgctaccgtctcgagccaaaatcacatggaggcttaagacttatagagattccaaagccccggctgaggaaattacagcgccagatcctccactatattttggacttgatcccggcccaccctgcggcacatggatttgtgaaaggtaggggcatcctgtcctttgctcaaccgcacgcagccaagcccattgttttacgactggatctccaggacttctttccatctatctacggccccagagtgcagactttgttcaggacatttggctaccccgagaatgtcgccgatagcctggggggtatttgtacgaacatagttccgtctcacatttggaacactaccccagagggcacaaccttggacgctaaggtggccgctaaggcgctctaccggtcgagtcaccttcctcagggtgcacccaccagcccagcactcgctaacctctgcgcataccgcttggattgtcggctgaccgggttggctaaggccgcaggagcagtttatacaaggtacgccgacgatctggccttcagtggggatgcgtcctttgcacggggggtagaccgtttcgccacccatgtggctgccatcgccgctgaggaaggcttctccgtgaatcatcgaaaaactcgcatcatgagactgggggtgcgacaacacctagccgggcttaccgtcaacgaaaaacctaacatacgtagggacacattcgacgagctgaaggctatactgactaattgcctccgccacggacctgctacccagaatcgggaaaatcatcctgatttccgcgcccacctggagggcagggtgagttttgtcgcgagcatccacccagccaagggactgaaactgcagtctctgctgagacagatccagtgggccgatactcctagacccgccgctccaagtccgccatga

SEQ ID NO: 12467 - RNA, 1377 nt, synthetic construct
  source 1..1377: mol_type = other RNA
atgaaacctcatgattttgccacagtgttggccatagcacttctggccggtgatcagagcgatgacgccgcagttgcacgcctgaggttggtggcaagagggaggcaacgggacctgctcagactcgttggctattaccgggccctagcgcctaatggtgttgcccccaggagaagggaggtggcaaggcagctgcgcgcactcttcgacgcccagagagaacgaggagcagctccctgggttcgggctaggacgcaagtggatgtgcccctgccctcgccagtaatgaggccgagtgcaatgcgcacatctgctgtgcgtgctgctccagcccatgcatgggaccctgccccaagagacaggcctgacatcgccaccgtaggagcgctggccagctggttagaactgcctgtcgaggaactgctttggttcgctgactgtagagacttgaaccgccgccattccgctccgagtcttcgtcattatcatgtgtccactcgtccaaaaaggcacggaggggtccgcgtgattgaagccccacaaacccgcctgaaggccatccagagaaaaattctatcagagatactcgaaaccatccccctctattatagcgcagcccacggtttcgtgaagggccgttctgtgcgatccttcgccgctgagcacgtcgggaagcctctcctgctccggattgatttagctgatttcttccccactgtgtcaggggccagagtccaagccctgttccggacactgggctacccagaggctgtggcggaccttcttggcgggctgtgcactgcgacaacctctagacacgtctttggcgcggttcgggcacaggtcgacagaaggatgctgcagcacgccatggagttgtacaccaggccccacttacctcagggggctcccacaagtccggcactcgcaaatgcctgtgcttttcgactggatgcccggctcactggtcttgccgattgggctggagccgtgtacagccgatacgccgacgatctggcgtttagcggcggagacgaatttgccagacgaattgaccgcttttgcgctgaagtgggcgcgattgccagggatgagggctggagggtgcaggaccacaagacccgaatcatgcggagaggagcacgccagcagttggctggcgtcgtcgtgaacgagcgcctgtccacccctcgggttgcctacgagcagttgaaagccacgctgactaattgcgtgcggtttggcccagcatcccagaaccgcgcggctgtagtcgatttcagagctcatctactgggacgtatggcttgggtagcttctctccacgcagcccgagggcggaagttacacgccatcttcgatcggatctcatggtga

SEQ ID NO: 12468 - RNA, 1344 nt, synthetic construct
  source 1..1344: mol_type = other RNA
atgccccaccaatcactgacgatcgcgttggccagggctttgactggcggctcgcaggacgagccttccattgcactgaggttagcagtaacccttggccgaccacctgctcgctggatagcgcgattcgcccatcggtatgtccgtgcattttctggtaatactcgaccccgtgagatcgaggtcgcccagtttatcgttgccgataggtcttggagtgcccgcttagcgccaacccccactcgacctagacagctagtggcgcgctggcctcttgaaacaccggggatggttccagttccagccgcagcagactggcccgtaaaacgtatcgagtcagtaggggatctggccgaatggctgggaattgacagcagcatgctcgactggttcgtggatgctaaaaacatcgctcacaagcagcctcatacaaagctgcaccactatcattacagggtgctccagaaacggtctggcggcatcagaatcatagaggcccctcaggagcgattgaagatcattcaacggaaaatcctcaaggatattctcgaacaggtgccacagtattactccgccgcccatgggttcgtcaagggtcgctcagtgcggacatttgccgcaccccacgtgcaacaacaggctattctccgaatagacctgcaggacttctttccaaccatcggccgggccagagttcaggctctgtttcggaccctgggctatccagagactgtcgccgatgcacttggcgccctctgcacgaatacaaccccccgcaggttcttcgccatgaccccgagaactgccggagacgtggcgcttcaggtgaaggctagacacctgtacggaaggccgcatgtccctcagggagcacccactagtccactgattgctaacctttgcgcttatcgcctagattgtagactaaccggactggccgattgggcaggggccgtttacacaagatacgcagatgacgttgctatttctgggtccgggaatttcgcccgcaacgtagaacgctacgctgcggaagtgtccggcattgctctcagagagggctggagcgtgcaacatcacaagacaaggataatgcggcgcggtgtgcgtcagcatttagccggaatcgtggtcaacgagaggctcaatgtcagtaggacggacaccgatcggttgaaagcaattctgaccaactgtgtgagacatggtcctacaagccagaaccgggaacaccaccccgactttcagagccacctgcgggggagagtgggatgggtgacctttgtcaatcccctgaaaggacaaaggctggctactttgttcgagcagatcaattgggaatga

SEQ ID NO: 12469 - RNA, 1191 nt, synthetic construct
  source 1..1191: mol_type = other RNA
atgcacaccctcgcacgagcgtttctcgccggggaactgaatgcccagtcagcagcagctcgagcagcagcgctgttcgctactcccccccgttggttgcccgcactagcagctagattcgtcgcggccttcgcaggaaaaacgcgaccgagatttctgcacgcagtcgcctttctccaagcccagcctccacgcgcggccaaactgattaattggctcacagagcctgctgtcatgcagccagttgaagccgccaagggttgggctctgccttccctcacttcaactggggagctcgctacgtggctggggctgagtatacctgagttggaatggcttgccgacttaaggggtacagcgcgccccggtcactaccattaccagcctgtggctaagcagagcggagccgctcgtttactcgaagcgcccaagcctcgcttgaaggccgctcaacgacagatcctgcgccagatccttgatctcgtgccaggccacgccgccgttcatggatttcggagacatcggtctattcggacattcgccgccccccacgctgctagaccagtagtcctgcgcatggacctgagggattttttccccagcatctccaggacacgggtcgatgctgtgtttagaactctagggtaccctggccccgttgctgcccttctagctggactgtgtaccactgctgccccgactggcggtccattatataggcaaccccatcttccgcagggcgctcctaccagtccagcccttgccaacatttgctttcacagatctgattgccggttggcgggtttggcagctgctaccggcttacagtatacccgctacgcagacgatttggcattcagcggcgagttcatcagcgagaacctgcaggcaagaataggcgcaatcgtgcttgaggagggcttcacgctgcagtatcgaaaaacacgcctgatgagacaatcggtgaggcaacacctggccgggctcacagtgaatgccgggtgtaacgtacggcgggttgacttcgaccgcctgaaggccacactgcacaggtgcgtgcagctaggaccacgtgacgaaaccagggatgccctgaccggccatgtggcctttgtggaatccgtgaacgcagccaggggaaggaaactccgggccctgctggagagaattcagtggacctctcatggatga

SEQ ID NO: 12470 - RNA, 1347 nt, synthetic construct
  source 1..1347: mol_type = other RNA
atggagcggcccttgcagcctctgtctcactcctcaaacgagttcctcagcctcgctcacgcacttctgtcagccgagcaggccgtggaaccacacctacagatcttgcgtactgcatttcgggcagaacctccccccggaaggcttagacccctggctgtacgaaccgtgggatgggcaagcactaggcccagaccgagaatcagacgattcatagaacagctacgggctgagcctcgccttgtgcgcctcatagaacgccacgggctccgacagctgccattggtgagtgtaccgctccgtatgctccctatccctggtactgcgcctgtggtgttggagacagccgggtccttggctgcatggttggaggtcgaagccggacaactgctgtggttcgccgacctgcgggattggaacaggaaagcggggggtgaccgcctgaagcactatacctgccgggtgctcgctaagccatatggcgctattcgcttactggaagttccaggacccagactcaagagcatgcagcggagaattctgcgtgagattctcgcccctgttccaccccatccagccgcacatgggtttaggcgagggcgcagtatcgtctcttttgctgctccccacgcaggccgagaggtcgttctgaggatggacctgcgtgacttcttcccctccataagcgggccgagggttcaggcgctgttcaggactctggggtaccccgaacctgttgccgacctccttggcggcctttgtacagcgaccacaccgaggggtgtgtggcgcaatactggatgcgagctgtcggcagcagacctccaggatgcgcggatcttttacgccaggccacatttaccacagggcgcccctacatctcctgctattgcaaatctatgcgccctgcggttagatcggagaatcggcggcttagctgaaaaagccggtgtgacatataccaggtacgccgacgatcttgctttctccggagatgcactctttgctagaggagccgagaggtttgccttgcgcgtcgccgcaattgccgccgaagaaggcttcgccgtccatccccgcaagacgcgactgatgagacggggggtccggcaacatttggccggtctgaccgtgaatgctcagccccaactgccacgccgcgagctagagagactggaagctattctgacgaactgtgtgcggcacggcccagagggacaaaatagagatgggcacgccgactttaggaggcatctggagggcaaagtggctttcgcaaccatggtaaaccctgcccgtgccggccaccttcgagagttactggagagaatcgcgtggggcgattga

SEQ ID NO: 12471 - RNA, 1797 nt, synthetic construct
  source 1..1797: mol_type = other RNA
atgggatatcacgagcccaccccggcaatttcagtgccggcaagacccagggtacctcacgtcagtcgcgtgggtgacatggggtaccatgaacccacacctgcgataagtgtgcctgctcgaccccgcgagcctcatatctcaaggctgctcgaaacatgggatactaccaacctgaccagaccaagcgccctctctcacgagaggcggtgtgatctcgctctggcttcgcggcctcttgcagcacaacggccagctgctattctcttaatgcgtcgatccgccccctcttggcagggcaaaaaaccgagtggattggccctcacgtctctgggcctccctcaaggtaacgtagccattagggcactagtcgccggcgcctccctgagatctcatgccgaccagttgccaccaggtcagaccaggtggtcgacccctttagcccctcggctgtccaagagtgtgctgatacgtgcattagctactgctttcctgcacggggaacccactacagaggagctgatccaacgagcagcccacactctggggcgcaactggaggtggcttcggccagttgcccgacggttcgtggagagattcgcagggaaagttcggcccacaagacgcagcgtgctcgccttcctacgtgaagatgagaacgtcaataggacatggcacagccgtaggcatcagctcaccgtggcgagctgggtggtggaacctgatggcccagccgcaatgcagcctatggcagcggcagcagattggcctataccagccatcgccacagtcggagacttggctcgatggctgggcctgaccatgggcgatctcgagtggttctccgacccacggcggcttacggctaagacacgcactcccactttacagcattatcattatagggtctttccaaagagcagcggaggctttcgcctgatcgaagctcccaaatttcggctcaagaaagtacagcggcagattcttcacgagatcttggacagggtgccgacacatgcagctgtgcacggctttgtgcctggtcggtccattaaaactttcgcctcactacacgccggtaagcaggtagtgctaaggatcgacctgcgagaattctttccatccattggacgtccccgcgtgcaggctctgtttcgaaccatgggatatccagactctgtggcggggttactgagtgggctttgcacgaacgcgactcctcgacgcgtctggagagaaggcaccgctcaacccagccggagcgttgacccagcagcctcattcgaagccgcccagttctacgctagaccccatttgccccaaggagcccctgcgagcccagcattggcaaatctttgtgcctttaggctggactcccgtctgcagggactcgctaatgctgccggcgccacctacgctagatacgccgacgatctggccttttctggggacgcagccttcgctcgctcagcagagcgcttcgctgccagagttgccgccatcgcggaggaagaggggtggacagtcaatcataggaagacgaggatcatgagacagggcgtcaggcagcaccttgttgggctggttaccaatacccacgctaacgtgcgccgcgccgactttgatcggcttaaggctattctgactaattgcggactgcacgatcccgcgacacagaatagagaaaaccaccccgccttcagggcccatttggagggcagagtgtcctttgtcgagtctatcaacccgggcaagggtagaagactccgcgcgctgtttgatagaatagtttggtga

SEQ ID NO: 12472 - RNA, 1452 nt, synthetic construct
  source 1..1452: mol_type = other RNA
atgagggcgtatgccagctacctgactccagaccagacccgttggtggggaagcgctgctgctcctactatgctcccctcgaggacccaagtgactccccctgttgagtgcacccgcaataacttggcccgagcactggctagtgcaatggccgccgggccagtcgaaacagatgctctcatggaacgcgcctcacgactgctgggtgatcaggagcagcataaacggctgagctggctgcgcccccttacgagaagggtggaggctgaatttggggcaggtccacgacctagagctgctgccctggctgagtacttgttgtgtgacgagggatttgaacgggcctttcagaaacacgcgccttggccggtaggccttgtatctgctgcccccgctatggcccctatacctgacgccgcagattggagagtagcccctctgaccaccgttggccaagctgccagctggctcgggttaagtgtgggtgagcttcggtggttcgccgactgcagggcctgggaaagaagacgtccagccggccccctccgacactatcagtatcggggactaactaaacgattcggccagacccggttaatcgaggcgcccaagccaaggctgaaggccctccagagacaagtcctggaacgtgtgttagacagggtgccgccccatgatgccgctcatgggttccggagaggaaggtccgtggggaccttcgcagctcctcacgcaggacagagggtcgtattgaagattgatcttcaggacttctttccgtccatcgcaggggccagggttgctgcactgtttcggtccgttggctatcccgagccagtcgccgacgtgcttacaggattgtgtacaaactccgcaccacccgatgtctgggcagagggtcccacgtcaagagcagccgcccagcaaagacgcctgtactccgctcctcatctgccgcaaggggctcccacaagccctgcactagccaatctcatcgcctaccgccttgattgtcgactggcggccctcgcaaaatctgcaggtggcgtgtacactcggtacgcggacgacctggctttcagcggcggtcaggaattcctgcgcagtgtgcaccggtttcggacacacgcgtgtgccaccgccatggagcagggattctcagtcaaccaccataagacacgtgtcatgccctcttcccagcagcagcgcattgctgggctcgtggtgaatgagaggccagccgtttctagagtggagcgcggcagactgaaggccattctgagtaattgcatcaggcacggacctgaatcacagaaccgtgacggccacgcagattttagggcgtgccttcaaggccgcgttgcatgggtggaaatggcatgcccaccacagggcgcgaagctacgctctctcctggatttggtggactggactgccacgcggaaaagatga

SEQ ID NO: 12473 - RNA, 1323 nt, synthetic construct
  source 1..1323: mol_type = other RNA
atggaaactgatattcaatcagtggctagagctctcgctgcagctttcgcagcagggccactgaccgctgacagattggtgggatgcggcgagaggacactgggtcgaaggtacagatggctgaggcctctggcctggagagttgaggccgaattcgcatacgggcctagacctcgggcagaccacatcgccgatttcctgctgctggacgagcggttccgagtgtacgcggcaaggcacgatgcagccgctgtctccagagtccatgacccagtggagttctgcccattcccggcagcacaagcttggcccgttgctcgactccgcacacctggacaacttgcgggctggttagacacaccacctcagcagctggcctggcttgctgacgtccgtggatgggaaaggcggaggaggagagggcccctacgccattatcattaccgggccctggctaagagattcggagccactagactcatcgaagcacctaaaccacggttgaaggccgtccagcgtcggctcctggctgagatcctgcaccatgttcctccccacgatgcagcccatgggtttcggcccggacgaagcattcggaccttcgccgcaccacactcaggccagcgtgtggtactcaaattagatctggaggacttttttccaagcacccccgctgcccaggtgaatgccctatttcgcagcctggggtatcccgaagccgtagccgatctgttgaccggtctatgcacaaacacggcgcccgcagccgtgttttctcccgacagtgcgcgtgattggagggccgctttacagcgcgcccggtatgcacagccccatcttccccaaggcgctccaacaagtccggctttggcaaacctgtgcgcttaccgcctcgattgtcgacttgccggattggcagcagccgccggaggtgtatatacccggtatgccgacgatctcgccttttcgggcggcgctgagtttgcgcgctctgttcaccgatttaggactcatgccgctgccatagcgctcgaagagggctacagagtcaaccaccacaaaacgcgcgtgatgccgaccgctcagcaacagaggatcgctggcctggtggtgaatgcccagcctgccgtttccagggctgagagagacaggctcaaggccgtgttgaccaactgtgtccgccacgggcctgcatcccagaatcacactgggcacactgacttccgcgcccatctgggcggtcggattgccttcgtggaaatggcctgtgccagacaggcggcgaagcttcgccgtgtctttgaacagatagagtggggctga

SEQ ID NO: 12474 - RNA, 1338 nt, synthetic construct
  source 1..1338: mol_type = other RNA
atgaggccaggccacagcaccgcggtagccttagcaaccgcattcgtggccggcccgttagaagtggaccccctcgtggaccgaggagcacacgtgcttgggggtcgaccccgttggttacgtcctctcgcccgtagagtagcagcgagattcggggaccagacacgaccaagggtcactgctgtggcccgcttcctactggccgacagggcattgttacgggccgccctcacctgccaaatacagcctggcgctggtctggggcttactccagagatggcaccactaggccctgctgctcggtggagaacaccatcactgtgtaacaccagagagttggcggggtggctcggacttcccgttggagaactggagtggttcgctgatctgaggagcctggagtctcgccagagagaagggcccctgcggcattaccactaccgccctctcacgaaacgattcggccagactcggctgattgaggcacccaaacctaggctgaaagctatccagcgggtcatcctcgcagagctgctggaccacgtcccaccccatccttctgcccatggcttttgtcggggcgggtccgtgcgaacctttgctgcaccgcatgccggaaggcccgttgtgcttaagattgacctggaggacttttttccctcaatcgccgcagccagagttagggccttgctccgcgccataggatatcccgaacgcgtagctgatcttctggcagggctgtgcactaatgctgtgccgcctgatgtctggaaggaagccggagctcctgccacaggacatgctgaccgacagctgcggcggtatgcccaaccacatctaccccagggtgcacctacatcccctgcccttgcgaacttgtgcgcgtaccggctcgattgtaggttggctgggttggcagaagctgcggggggtgtttatactaggtatgccgatgacctggctttcagcggaggcgacgcttttgccaggtgcgtgggcaggtttcaaacacacgtctgtgcaaccgccatggaagagggatttgcagttaaccattacaagacgagagtgatgcgtaggggccaacgccagcagattgccggtctggtagtcaaccacagaccaggcgtcgcccgggatcagagagatcggctgagagctaccctgacaaattgtgtgcgccacggtccagccagtcaaaatcgcgaagcccacgctgatttccgggcccacctaaatggccgcgtggccttcgtggagatggttagtccggagcaggggcagcgcctcagaagacttttcgaagagatccgttgggaggcgggctgcggagtgtga

SEQ ID NO: 12475 - RNA, 1323 nt, synthetic construct
  source 1..1323: mol_type = other RNA
atgccaacccccagaataacggcagacgctctggcggccgcatttttggccggggagatcgaaaaagaccagttgatagcccgtgcgtctaggatgctgggaagacgccctcgttggctagcccctcttgccaagcgcgtagccactgcatacggcaccagaacgaagccaaggcgcgcagctctggcgacctttctcttaggagatcccggctttcgcgccgctcttgctaagggcccactcagaatcgtggattggactaccgatgaaccggccatgaggcccacaactccagcggctgcgtgggttttgcctctgattggcaatatttcagaactcgccgcatggctgggcgtcagtctacatgagctggcatggttcgctgacatgcgctcatgggaggcaaaacggtcctctggggccctacgacactaccactatagaatcgagagtaaaaggttcgggcaggttaggttaatcgaggctcctaagtcccggcttaagacaatacagcggcggatcctggcagagctgctggaacccattcccttgcacgaagccacccacgggtttcgacggggtagatctattaaaagctttgcagtcccccatgtgggtcaggcagccgtgctcaaaatcgacctccaagacttcttcccttcaattgccgctgcccgggtgcaggctctgtttaggactgtgggatatcccgagccagtggcggatgctcttgctggcctgtgctgtaacgccacaccggcagatgtctggaacaggtccgaagccgacggagatgccgctcaacggcgacaaacccgttggctttatgagaagccacatcttccccagggagcacctacgagccctgccattgccaatctgtgcgcctaccgcctcgattgcaggctctcagcattggctgcttccgctagggccgcttacaccagatatgccgacgacctcgcctttagtgggggagccgacttcgcgagaagcgctggtagattcgagactcaggtgtgtgcaactgtaatggaggaaggatgggctgttcgccatcggaagacaaggttaatgcgacagggcgttcgtcagtcgctggcaggcatcaatgtcaataagcgactgaacctctgtcggcgcgacgtcgatcaactgaaggccacactgacaaactgcgtgaggatgggggccaccagccagaaccatgctgaccacgcagatttccgcagccacctggaaggtcgggtgtcttttgtggaattcatcaatccagagcgaggcgccaaactgagaagattgttcgagcggattgagtggtga

SEQ ID NO: 12476 - RNA, 1323 nt, synthetic construct
  source 1..1323: mol_type = other RNA
atggccagcgagacaattgtcaggctattggcggcagcttgcctggccggcaaccttgaagttgacgaagtggtggatcggtgggggagggctatgggcaaaaggtggcgttggctgcgtcctcttgctaggcgcgtcctcgccgaatttgccggtgacgcacgggcaagagagtctgcagtagcgcggttcatagcctctgaccgagggtttagaagagccgcgttgacccacgatctgcgtgtcgcagaggtccttcatgcctctgggcctggaatgtcccccgtgagggctgctgaagtgtggcagctgcccccattacgaaccgcaggcgagctcgctcagtggctcggaatcgatacacgacagctggactggtttgctgaccgcaggagctttggcagtaagcggcatcagggccctctcaggcactatcattaccggacggtagcaaaaagattcggtcaagtgcgcctgattgaatcccccaagccgaggctgaagcagatccagcgtcgcatactcgccggaatcctcgatctgattccgacacaccccgccgttcacgggtttaggcggggaaggtcgattatgacatttgctcagcctcatgttggtcaacgaatcgtggtgcgcatcgatcttcaggacttctttcccactgttggcagggcctgggtgcaggcattgttccgcactgtaggctaccccgaagtggtcgccgatgtgctggcaggcgtctgtacccacgctacccctgcagatgcttgggaaagtgtggattccgagcacttcggccgccagcctgacagaatccaccggttgtactcaaggcctcatctaccgcaaggggccccaacgtccccagctcttgccaacctgtgcgcctatcgcctggactgtagactggccggtttagccagaagcgcgggagcgtcctacaccagatatgcagacgacctcgcctttagtgggcaagcagacttcgtgagagtggccccccgattctgtctgcacgttggagccactgctatggaggaaggattctctgtccaccatcgcaagacaagacggatgaggcagggggtgcggcagcatttagctggactcgtcgttaatgagcgcctgaacgtacgacgcaaggatttcgatctcttgaaagccaccttgactaactgcattagatcaggcccacagtcacagaaccggggtaatcaaagcaatttccgggcccacctagctgggcggcttagctttgtggagctggtgaatccagagaaaggccgtcgactgagagagctgttcgacagaatcccatggtga

SEQ ID NO: 12477 - RNA, 1323 nt, synthetic construct
  source 1..1323: mol_type = other RNA
atgtctgacataactgtggcacaggccttgacaacggcgtttctgacaggagagcccgatttagatcagatcgtggataggtggagtgtgacactcggaaggcggtggagatggctccggcctttagccgtgagactcctggccaatttagacgaagccgatcaaagacgcgaagtagcagtcgcctggtttctcttccttgacagaggcttccagagggcctgcgactcccacgatctggatgtggctcagtggattcacatcacacgtcccccgatgaggcccatagcagcagcaagagactggcaggtgccgtcaatatgtacccccggcgaactcgctgattggctggacgtcgagccaaatcggctggagtggtacgccgacctacgtagcctggagtcgtattggcctcaaaataaactgcgccactatcattatcgcctgcttgagaaacgtttcgggcaggttcgcgtcatcgagtctccaaagccgcggttgaagcaaattcaaaggcaaatcctaaccggtattctggatcacattcccccccatcctgccgcgcatggattcaggcgcggctgttcaattagctcctttgcccggccacacgtgggcaaacggatcgttgtgagaattgacctgcaagatttttttccttccatcagccacctgcgaatcagggccctctttttgtccctgggctacccacagcaggttgctaaacgccttgcaggtctgtgcacaaatgtcgtgcctctcgacacttggctgggggattgtgggaacagatcaacgttcggacccagcggtgtccagagactgtattccacccctcatctgccacagggcgccccaacctctccagctcttgcaaacctctgtgcttttcggctggactgtcggcttgccgccttggctaactctgcaggggctacctacactcgctacgctgacgacctagctttcagtggtgaacgggacttcgaacgagttgctcataggttccacctccacgtgtgcgcagctgtaatggaggagggcttccgcgtccaccatcacaagaccagacggatgaggcgaggagttcgtcagcacctggcgggcttagtagtgaatgagagattgaacgtctgcaggcaggacttcgatcgactgaaggctatcctgactaactgcatcagacacggccctcagagtcagaaccggatggcgcatcccgattttcgcgggcatctcgccgggcgaataggattttttgaaagcgtgaatgccgcgaaggcaaggcgcttgcgagcccttttcgaccagattgcctggtga

SEQ ID NO: 12478 - RNA, 1323 nt, synthetic construct
  source 1..1323: mol_type = other RNA
atggactcttatgccaccatagccgacgctctcgcaactgcctttttggccggcgacatcgagacagacgagttggttgatcgaggctcacttctgttcaacagaaggtggaggtggattcgtccactcgcacggcgggtcgttgagacttttgcggccggcgtaagaccccgacagactagcgtcgtagaatttattctggcagatcggggtttctttcgcgcttgccagaagcacgaccttcgcctcgctaataggctggtggcgccaccaatgatgcgacctgtgattgcggctgccagttggcgtgtggccagtattagaactccacgcgaactggcagattggctgggggtgagcttcggggagctgtcctggtttgctgacctccgaggtctggaacacaagcggaaccatggacggctacgccactatcactaccgccctttggctaagcggttcggccaggttagactgattgagagtccgaaacctagactcaggcagatccagaggcgtgtgctgaccgacatcttagaccacatccctcttcatgacgccgtgcacggatttaggaggggacgctcgattaaaacgttcgcagccccccacgtgggacgtagagttgtactcaagatagacctgcaggattttttccccagcatcagcgcagccaggatccaggccatcttcagaacaatagggtaccccgaagaggtagcagaccttctggccggtctgtgtatgaattccgctccgaccgacgaatgggaccacgagttttcaggatcttcagggagacaggtcaggcagttccgctggctgtactcccaaccccatctgccacagggcgctcccacaagccctgcattggctaatctctctgcctaccacttggattgccggttaaccggactatcccggtctgccgccgcgacttatacccgctatgctgatgatctcgcatttagtggggcgcgggattttgagagagtggccatgagattccacaaccatgtgtgcgccaccgtcatggaggaacgatttacggttcatcatcggaaaaccagaatcatgcggcagggcgtgcgtcaaaggcttgctggactggtcgtcaacgaaagagtcaacgtgccacgggtggatttcgatcgactgaaagcaacactgacaaattgtatccgccaaggccctcagtcccaaaacaggcagggccatcttgactacaggggccacctccaaggtcgcatatcattcgtggagatggtgaatcccagcaaggggcatcgactacgcgctttattcgatcagattgattggtga

SEQ ID NO: 12479 - RNA, 1335 nt, synthetic construct
  source 1..1335: mol_type = other RNA
atgaatttttgcaacgtaactgctagagctctctcagcagcctttttggccggcgactttgatgtcgacggtcttgtggtacgtggatcaagagtcctgggaaagagacggcgctggttgaggcccttggcacgacgagcagtggagacgttcgccggacgaccaagaccacgcagggtcacccttgcggagttcattcttggtgatcctggctttctgcaggcatctcgacgacacggtctacggccagctacactgcctactgcaccctctatcatgtgccccgtgggcgccgctgaatcttggcaaattcccagcatccgcagtgctggagaattggccgattggctcggggtcaccattggcgagctcgagtggttcgccgataggagatccctggaatataagtggaatcatgggaggctgaggcattatcactaccggcctttgacaaaaaggtccgggcaggttcggatggtggaggcaccaaaaccaagactgaaggccatccagagacgtatcctggctggaattcttgaccacatccctctgcatgatgctgctcatggtttcaggcgcggacggagcataaacacctttgcatctcctcacgccgggaagagggtggtgctcaagatcgaccttcacgatttctttccctccatcaggctagcccgcattcaggcgctgtttcggactattggctacccggaagaggtagctgacctgcttgcaggcctgtgtaccaatgccacaccgcccgacgtttgggaagccgacacgatcagactggccgggggccaattgcaggaggcgtgttggctgtactcccagccacatctccctcagggtgctcccacaagccctgccttagccaatttatgcgcataccggctagattgtcgcttacatgggctggcacagagtgcgcacgctgtgtataccaggtatgccgacgatctcgcgtttagcggcgacagagacttcgagcgggcagctaaaagattccacctgcacgtgtgcgccactgttatggaggagggattcagtgttcaccatcgtaaaacccgcataatgcgtcagggggtgaggcaacggctcactggactggtcgttaacgaacgcctgaacgtgagccgcagacagttcgactgcctcaaggccacactgaccaactgtatccgcttcggcccacagtcccaaaatcgttcaggccacggcgaataccgggcccatctcgatggtcggatatcgtttgtggagacaatcaaccccgccagggggcaccgcttaagagaactgttcgatcgaattgaatggcctgagcgggactga

SEQ ID NO: 12480 - RNA, 1323 nt, synthetic construct
  source 1..1323: mol_type = other RNA
atgagcactcgtaatcataccgccaacgctcttgctcgcatcttcttagcggggaaatttgagtcagacgagatggtagagagggcctcacacctacttgcgaagaggtggagatggctcaggccgttggcccgacgagtagtagccgcttacgatggcaaacccctgccgcgatccatcgctctgaccaagtttattttgtccgacctgggcttctcccgggcgcttgaaaaacatgaagtgcacgttgtgcacccacttataaacgtcccaacaatgaacccaattgctgtggccaacacttggcgactcccctccatctgcaccatcaaagaattggccgatctactgtctataactgtgtctgaactgaactggttcgcagatcttaagctgttcgagtataagcgcaataggggcgctctgcggcattaccgttataggccagtcacaaaacgctttggaagaatacgcctgattgaggctcctaagccccggctgaaggtgatccagactctcattttatcaaccatcctgaataatgtgcctccccacaccgccgcccacggatttagaagggggcggagcatcaagacctttgcagagcctcacacggacaagatggccgtgctcaagattgacttaagcgattttttccccagcatcagtattgctcgcgtgcaaagtctcttccgcgccctgggctatccagagttggtcgctgacacactggcaggcttgtgtagcaacgcaacccctctggatgtatgggacagtcccaaagttgactctccggccaaaaacatcaggcaggtcagatggctctacgctaatcctcatctacctcagggagcaccaacgtcgcctacactggcgaatttatgtgcataccggcttgattgtaggctgagcgccctcgccgaatctgtcggtgcagtctacactagatacgccgacgatctcgcattttccggggatgactcttttgcacgtgtggccaagcggttccaaattcatgtgtgcgcaactgcgatggaggaggggtttagagttcatcacagaaagacacgtatcatgcgaaggggtgtgcggcagaggattgctggactggtggttaacaaacatctgaacttggccagaaatgatatagatcgcctgaaagctattctgaccaactgcatccggttcggtgcccacacacagaatcgcagtgagcaagacgacttcagagcacacctctatgggcgggtggccttcgtcgaatccatcaatccccgcaagggctcaaagctcagacagctactggaacaggttgaatggtga

SEQ ID NO: 12481 - RNA, 1380 nt, synthetic construct
  source 1..1380: mol_type = other RNA
atgtctctgcgggccagactggaaagtctcggctattcagcagcttgtctcattgcgatgtcgtcacccaagcgaattgctgaacctttggccgcagcctttctggccgggccattagaagtcgaggggatggttgcccggggtagccagttacttggcaagcgctggaggtggctttctcccctcgccaagagaatgcaccgctactttggggggacaactcggccacgtcaggctagattaataaatgtcatgctctgtgatgaggggttctatcgcgcgtgcactaagtacgagctgcagctcgtcgaccttcaggcatgccaacccgccatggcaccctctttggccgccttgagctggaacgtaccggcgttgtgcacaaccaaacagctcgccgattggctgggactggccgtgtctgagctggaatggttcgcagatatgaggaggtgggagacaaaacccgcctctatgcagactcaacactatcgctacagagtgctgtccaaaagaaatggccggctgcggcttattgaagcgcccaaaagcaggctcaatatgctgcagcgacagatcctgacacacctccttgaccgattccccgtccattccgcagtgcacggatttcggcagggaaggtcaatcagaacgttcgccgttcctcatatccaccgtccggtggtgctgaaactggatctgagggatttttttccaaccatacggattgcacaattatccgcactgttcaggacggcaggttatcctgagcgggtggccgatctactggccggtatctgcactaacactacgcctaccgaggtttgggacgacgaaggcctggctgcttccccaagcgagattaggcgaatgagaatgctctacgagcagccccatttacctcagggggctccaaccagcccaaccttggctaatttgtgtgcctacagactggactgtagactggctggccttgccgaagcgagtgggggtgtatacactcgctatgccgacgatctagcctttagtggcgacgagaggttcgccaggacagcagaaagattcgctatccacgttatggctaccgtcatggaagagggattcgaggtccatccgcgcaaaacccggctaatgaggcctggcgtatgccaacgcctaacaggcctcgtggtgaaccagcatctgaatatcgctcgtagcgaccgggatcggttgaaggctatactgaccaactgtgtgcgacacggccctgcaacccagaaccacgagggacatcgagactttagatgccaccttcgtggacgcgtggcttttgtggaatccatcaacccaacatggggcaagaagctccgcggactgttcgaccaaattgtttggtga

SEQ ID NO: 12482 - RNA, 1314 nt, synthetic construct
  source 1..1314: mol_type = other RNA
atgtgttcatacgtgtctatcgcacggaatttggcagcctccttcgtggctggccagtttgagtcagatgccatagtcgaaagaggtgcgcaacttctcggaagacgttggagatggctcaggccactcgccatccgcgtgatcgagaagttttccaaaggccctaggccctcccacgcttctgtcgtccagttcattctgagggatcacggtttcatccgggcctacgagaagcataatctgcaactcatcgacttgattggtgaagccaccgagatgagtcctattaagaaagcacaaccttggacagttcctataatcaataatattgccgagctggcagattggcttgggataacaatgggccacctggagtggttcgccgacctgaattctctagaatacaaatgcaaccgcgggcgacttagacattaccactatagaccgttggccaagcggttcggctcggttcgccttatcgaggcgccaaaagcgcggctgaaagagatccagagaaaaattctgagcgggctgttggaccagattcccgctcatgaggctgctcacggattccaacgcaaacgaagcgtgaagacttttgccgcttgccacgtgggcaagtcagtggtgttgagaatggatctgcatgactttttcccctccatcactttaagccgcgtacgggccgtttttcgtagtacggggtatcatgaaagtgtgtctgatctgctggccgggttatgtactaactgcgcccctctcgatgtctgggaaaatctggtaccttcaggccccggccgacagtcgatcatgttatacagccagccccaccttccacagggagcaccaaccagcccagctctagccaaccttatcgcttatcggttggattgtcgactgtctgccctagcacactccgcaggagcagtttatacccgatacgccgacgactgtgctttctctgggggtcccgagttctttaggatagtgaagaggtttgcttgccacgtaggcgccgtcgtgatggatgaggggttttccgtgaacttcagaaaaacccggattatgagagaaggagtgcggcagaagctcgcgggactcgttgtcaatgaaaagacaaactttccacgtgcagactatgaccgcctgaaagccaccctcgtcaacagcattaagcatggcccggaaagtcagaacaggacacagcacagggactttagggctcatctgctcggtcgcatcagcttcattgagatgctgaaccccaatcgcggccggaagctgaggcagctgttccagggaatagcatggtga

SEQ ID NO: 12483 - RNA, 1134 nt, synthetic construct
  source 1..1134: mol_type = other RNA
atggcaaggtttattctcagcgatagaggctttctgcgggcttatgagcgccacaatttgcaactggttgaactcctcacaactgcaccagtcatgcttcccctgcctactgctgaagggtgggaggtaccacagttacctgaagtgaacgaccttgctgattggcttggagtcagtttggccaccttacactggcttgcggacacaaggtgtctcgagtccaagtggaatagggggaagctgcggaattattactaccgccccctagctaaaaagcagggaactatacggctcatagaggtcccaaaaccgagactaaagggatgtcaaagacaaatcctgacaggtatcctcgatcatatccctccccatgacgctgcacacggcttttgccggggccgttctatcaaaagcttcgctgacaagcacgtcggtaagcaggtggtgctgcgactggatctgcaggactttttcccatctgttcacggaggccgcgtgcaggccgttttcagaagcctggggttccccgcatcagttgccgacttgctggccggcatttgcacgaactcgacccctcgcgatatctgggaatcattgcaatttccgcagcctcagctgcgactgacccaatggcagtacgataacgtccaccttccacagggtgccccaacatcccccgcactggcaaacctgtgcgcctaccgcctcgactgtagactgagcgctttggcgaggaccgtgggagccgattacacacggtatgccgacgacctggcgttctcaggcggacaggacttctctagagccgtacggaggtttcatgtgcatgcatccgcaattgccatggacgaggggtttcatgtgcatttccgaaaaaccaggattatgagacggagtgccaggcagcgtttggccggtcttgtggtaaaccagcacgctaatattagcagggctgagtatgatcgcctcaaagccactctgcacaattgcgtgcgctctggccccagtgatcagaaccgaaccggccatacggatttccgggcttacttaaatgggcgaatctccttcatagaaatggtgaaccctgcgcgtggggcccacctaaggagactctttgacagaatcccctggtga

SEQ ID NO: 12484 - RNA, 1365 nt, synthetic construct
  source 1..1365: mol_type = other RNA
atgacccatgctaggccagatagcctgggggtcctcgaccgtttcccgatgactcattctgaccagaccatcgcaagattccttgccgcagcctttgttgcggggccccttgtcgccgacgaaatggctactcggggggcaaggatgctgggacgtaggtggcggtggttgactaggctcgctctgagggtaagcgaagagtttcagcatggccctcgccctagaagagctacagttgaagaattcttgttgggtgactcagtttttcacaaggcctgtgagcgccacgaattggagattgccaattactccattaccgcacaaatgtgccctgtggatgctgcaagaaactggcccgttcccccactttgtaccttcgcggatactgccgactggctgaacgtgcggtccagggagctggagtggttcgcagacttgaggggccttgctgctcgcgcctctcatcagaagcttcggcactaccactaccggacactgtccaagcgcttcggtcaggtccggctgatagaggctccgaagttacgattaaaagagatccagagacagatcctgcgggaaatactggatgccatccctgcgcataatgcagcccacggcttttgtgctggccgctctatcaagaccttcgcagcaggccacgtggctacgtcggtcgtactcaggatggatctgcgagatttctttccaagcattagtcgagcgcaagtcgaggccgtgttcagatccgtagggtatgctgagagcgtggcgaatgttctggccggcctctgcacaaattgcgcccccgatgatatctgggacggagtggaggtccctgtgcagcagctgcgaagtgtgatagcccgctatgccagaccacacctaccacaaggagctcctacaagtcccgcactcgcaaacctctgcgcctatcgcatcgactgtcggctagccggcctagcagaatcagccggggccacttatacgagatacgctgacgaccttgcgtttagcggaggtgacgaatttcggcgttcagccaaaagatttagccagcacgcatcagccatcgtgatggatgagggtttcgacgtgaaccaccgcaagacaaggattatgcagagtggagctagacaacggctcgccggcatcgtggtgaacgcccataccaatgtgccgaggaaagattacgaccgactgaaagctattctcgttaactgcctgaggtctgggccccagtcccagaatcgtgatcaacacgccgattttagggctcatctgaacggccgcgtcgcctacgtggagctgattaatccacccagaggaaaaaagttacgcgaactgttccggcgaattgactggtga

SEQ ID NO: 12485 - RNA, 1323 nt, synthetic construct
  source 1..1323: mol_type = other RNA
atgaatgaggcggcaatcgccaaagcgttagctaccgctttcttggcagacactatgactattaccgctatggaagctcggggcagccatgttcttggccaatcttgtgattggattagaccactagccgcccggatcatggctgcctttcccggaggtgtgaggccacgtcgtcagagggttgtggagatcatacggcagtcacgtgctttcctgctcgcctgcgaagagcatgactttcatgcactgaatcccacgttgctcccaaccaaaatgcaccccgcacagtcgatccggacctggaatgtgccttccataacgagcactgatgccctggcaagatggctggggatttccccagcacagctcgattggttctcaggccgcttccgcaggtcagcatctgtgcgtattgggagtctgggccattatagataccggcttttacagaagtcatccgggcaagtgaggctgattgaaattcccaagtggagactcgccgaactgcagcgccaaattttgacacgaattctgaaccacatccctcctcacgccgctgcccatggctttcgccagcagcactccatccacaccttcgtcgcccctcataccggccaggcaatggtcgctcgaattgacctccaagactttttcccctctatcacacttccgagggtggcggccgtgtttagaacggtcggttaccctgaggctgtagcagacgcattagccgggctgtgctgtcaccaagtcccggaccacgtttggcactcggaagcggggaatctgggtactagcagccgcaaccagctcagactgctgtatcgacagccacacttgccacagggcacacccacctctccagcgatcgccaacctgtgtgcttaccgcctggattgccgacttaccggtctagcccagagtgcccgcgccacttacacacggtatgcagacgatctcgctttctctggagatgacgaatttaggcggagcgccaaatccttcgtactgcacgcctgcgcgtgcgtaatggaggagggatttacagtgcacttcagaaaaacccggataatgcctgccgctgcccgacagagactagctgggctcgtggttaacggcaagactaacgtccccagagaggacttcgataggctgaaggctatactgacaaattgtatcaggtccggacccgatagccagaaccgcgaacagcatgtcaattttcaagcagtgcttagcggaagaatcagtttcgtggagcatatcaaccctagtaggggaaggaagttgcggacactttttgagcagatcgtgtgggcctga

SEQ ID NO: 12486 - RNA, 1380 nt, synthetic construct
  source 1..1380: mol_type = other RNA
atgcagtccaacagggtgttgattcgcaccatcgctattaccttacttagaggagactggcaagttgaagcgatggctatcaggaccgccaagctgctgggcaagcgctaccggtggatatctccactgatcaagagactagaccagcagttcggcagtagcagaaggcctaagcagagcgagctgattgactttcttcggctcgaccgcggcttgtgcagagccttggaaaaacacgaaccagagatctttgactggcttcaagaggccgacgtgatgcagcctattccaagtgccgaagcatggcagatccccagtattaccacagaaggggagctggctgagtttctgggggccgcaacgtcggacttaatctggctcgctgacgaaaagtcactgcactccaaaaatactaaaaagtactcagggcactaccatcatcacctggtaaacaaaaaaaactctgttctccacttctgtaaccctcatgatctggatgctatcgccaatcggctcagaatccctagcgagagcatcaggctgatcgaggctcccaagcgccggttaaaaagcatacagcggaacgtgctaaacgggatactggatagggtcccccctcacaggtcgtgctgcggttttaggcagggggagtccattgttgattattcacgccctcacgtgggcaaatcaatcgtgcttaagatggaccttagaaatttttacccgacaattacgctgaaccgcattatctctatctacacatctttgggttttccggagactgtctccaggttacttgcacatctgtcaactaccgtaaccccccccgaaatatggcgtaatcataagggtgcatcccagctgcgatatctggagtccctgtatacttgccggcacctaccacaaggagccccatcctccccagcgctcgcaaatctggtggcattcagattggattgtcgactcgaaggcctggccaaacatgtgggggccgattatacacggtacgccgacgacctcgcttttagtggaggagatgaattccgtaggattgccaagcgcttcagcacttctgtgagtgccatagtaatggaggagggcttcggagttaatttcagaaagacaagaattatgcccgcggcttctcgtcaacgactggtcggcctggtggtcaatcatgggttgaacgtgcagaggcaggaatacgatcggctcaaggctatcctgaccaattgtatccgacacggtcccgaatctcagaaccgggataaccacccgagctttcgacgttatctcgagggaaaaatcgccttcgtcagcatgattaacatagagaagggcaataaattgctcggccttttccgcgcaattagctggtga

SEQ ID NO: 12487 - RNA, 1131 nt, synthetic construct
  source 1..1131: mol_type = other RNA
atggcgaaccagtccggacctcaggacagagatcgcgtaaaaccacgtgtcgtttcatggaggccccggggcacagaaatgcgtccagtaagtgccgcttctcagtggcatgtccctgaaatcaggacaccgagagagctggcagcgtggttaaatgtgagctttaagcagctggactggctggctgatattagatcactcgaatatactccgggcagaggacggtcccgccattactgttatagagtgttgtctaagcggtttggcgccgtgcggttgatcgaggctcccaaatcccgcctaaaagccatacagcgacagataagcagtgagatcctgtcacagatccccgtgcatgagtcggtgcacgggttccggaggggtaagagcattaacacttttgccgcccctcatgttgggcgagcatgcgtcaccaaaattgacttggaagacttcttcccaactgtcacgcgaagttgggtgagagggatctttcaaagcgcaggctaccctgacgccgtctctgttcttctagctggactgtgcaccaattctgcacctcacgacgtgtggcaggacatgcgggagcaactgccaaggcaacgactgcgctacatcgaagccctgtacgccacaccacatctccctcagggtgcccctagcagccccacactcgctaatctcgcggctttccgcttagattgtaggctgtccgggctcgcccgaaaaatggagctcacttatacccggtatgccgacgaccttgccttttcaagtgatagccccgcgactcgggatattcacagacgcctgccctatatctacgctattgtgatggaggaaggtttcagaattcacttcaggaagacgagggtaatgccctccgcaggacgtcagtttttgaccggccttgtggttaacgatcggcttaatatcaccaggacagactacgatgttctgaaggcaatcttaaccaactgcgtcaggcacgggccagatggacagaacagggatcgccgcaacgacttccgtgctcacctctccggccggatagcatttgtggaatctgtgcaccccgagcgcggcaataagctgagacagctgttcgagagaattcaatggccaacctga

SEQ ID NO: 12488 - RNA, 1332 nt, synthetic construct
  source 1..1332: mol_type = other RNA
atgcataccatccagttctatgctatcaacttagcgggcgtatttgtagacggcccatttgatgtggacgccctggtcgagcgaggcagccaaattctctccaaacgcggacgctggctgcggcctcttgccaaaagattagccaagacatttggagacaggattagaccacgtaaatccgatgttgtgtcctttctcctagctgatcaggggttccgaaatgcttaccagaatgggagatttaaatttagcagcctgctgcgcccagcaccagaaatggtcgctcctgccgttacaaccacctggcaagcccccctcaatctgaggactcctcaggatctctcacactggctggatcttaaacccggggagctcgcatggttctctgatcggaggcagctggaagcaaagcaaaacaagcccaaacttcaacactaccggtacagactgctgcccaaacggccaggagagttccgcctcatcgaagcacctaagccccgattgaagaccatccagagaaggattctgaaggatatactgaaccacctccccccacatgacgcgtcacatggtttccgttgtggaagatctatctcctcttttgcacgtccgcatattggccgggaggtggtgttgaaaatggatttgcaggactttttcccttctatcagggccgcccaggtgcaggcaattttcagaagtctgggatatccagattgtgtggccgaccttctcactggattgtgcacaaacagtgcgcctactgagatatggaacgcattagaccacgctcctcctgccaagatccagtacaagatccggcgatatgccagaccccacctaccccaaggtgctccgacgagccctgtccttgctaacctctgcgcctttcggatggacagtcgacttgctgggctggccaggaagatgaacgcctctttcacccgctatgctgatgacctagccttcagcggcgactgtgaattcgctagaatatgcaggcggttctcagtacatgtggcggctattgcaatggaggaaggttacacggtgcactaccgcaaaactaagataatgcgaaaaggcgtgcggcagcggattgcaggcatcgttgtcaataagaggccaaatatcctgaggaaggactatgacagactgaaggccattctgtcaaattgcgttcgcacaggtcccgcctcccagaatcgcgaagggcatgacgacttccagagccacttggcaggcagggtgtcgtttgtggagatgatccacccggatcgcgggcgtaagttgagggccattctggagcagatcgattggaccgtcagttga

SEQ ID NO: 12489 - RNA, 1329 nt, synthetic construct
  source 1..1329: mol_type = other RNA
atgcatagtgtgacacatagcgcaaatatattggccaccgcctttgccgctggtaggtttgatcctgaggagctagtgcagagggggagccaagtagtggcatcacggggccgatggttgaggccactggctgtgagacttgcggaggcgttcgccggaaaaattcacccacgaaagagcaccatcgttgcatttttggtggccgatgccggattttgtcgcgcctatcacaatgaccgtgtgcagatcgcgaacctcttaggccccattcccgaaatgatccctactgccacagcggctaactggcaaggttgtcttgccctgcccacgcctcacgatgtaagtagatggctaaatcttgctcctggggagctggactggttcgctgacagaaggcgaatggcccacgcccagtctaaccccaagctgcagcactaccgctaccggttactgcagaagcgcccgggcgagtaccgtctgattgaggcccctaaacccaggttgaaagcaatccagcggcgcattctcagtgacattctcaaccacgtgcctccccatgaagccgcccatggatttagacgtgggcggtctatcacctccttcgctgctccacacgtgggcaaacaggtagttcttaagatggatctccaggacttcttcccgtctacccgggcagcacagatccaatccatattccgttttcttggatatccagacacggttgccgacctgctcaccggcctgtgcacaacttcggcaccccaggatatttggcccactgctgcgccaaggcctgctcaaccaacccagagacagatgaggcgctacgcggagcctcatctgccgcaaggagctcctacatcacccgtcttggccaacctctgcgcctataggatggacctccgattctctggtctggcatccactgtgaacgcttcctacaccagatacgctgacgatatggccttttccgggaatcaagatttcgccagagtctgccagcgctttagtactcaggcagccgcaatagcaatcgacgagggctataccgtccattttcgaaagacaagaatcatgaaacagggcgcctgtcagagggtggctggaatggtcatcaacagaagactgaatatctcacgcaaggactatgatcggctgaaagcagtgctgacaaattgcgctcgacacgggccagatagccagaaccatgatgcccacaatgacttccggtcacacctggaagggcgcgtcagcttcgttgaacagattaatccagaaaggggccgccggctgcgggctttactagaacggatagattggagcaagtga

SEQ ID NO: 12490 - RNA, 1398 nt, synthetic construct
  source 1..1398: mol_type = other RNA
atgattccccatgccgagagggactcactagtcatcccaccatcaaccttcttcttaatgcgtacgtccaagaagaccctggcagcagcacttgcgacggcctttgtggctgggagcttcgaagtagacgatttggtggaacggggctacggagtgattgggaaaaagcccagatggatgcaaccgctggcagagcgcctacatgccgcattcccatgggatatgaggccccgaagggcttctgtggagaggttcctgctgtttgattacggcttccatcgggcctacagacgctccaaactgactgtggcatctaggatcggttcaagtcccgtaatgaatcagggcgttgtcgccagtgggtggaaagcaatccgccccctgacaactccagctgagctggccgactggctggatgtgcctctgagacagctcgactggtttgctggggtgggcccttataaacgggtccccacggagatgaagcttcagcactacagataccgggtgttaaaaaaggttgacggcaacgtaaggctcttggaggctcctaaggcgcgtcttaaaaggatgcagcaaaagattctcacagaaattctgaaccatgtgcctccgcacgctacttgtcacgggttcagacggggcaggtctatcaccacattcgcaaagcctcaccaaggccaggccgtggtcgtcaaactggacctgcgtgactttttcccctccattagagccgctcagatacacgccctttttttgtatttaggctatcctgagcccgtcgcccacctcctgacaggactgtgcacaacctcggccccagaaaccgtctggcgagaaatcggagcgagccctagaaacaatctcacccaggaacaaattagacgctatgctcgcccgcatttaccccaaggagcgcctacaagcccagcgctcgcaaatctgtgcgcttaccgactcgactatcgactgtccggacttgccttggctgccggtgcgacctatactcggtacgccgatgacctcgctttctctggagatgctgtgtttcggcgagcagcacagaggtttgtggtgcacgctaccgcaatcgtactagaggaaggttaccaggttcatcaccgaaagactcgcgttatgaggcagtccgtgcgccagaaaatcgccggattggtggtgaatcaacaggccaacgttcctagaaaggactttgataggcttaaggccactctgaccaattgtgtccgtcatggcccagagagccagaatcgggccgatcacgccaactttcggttgcacctccgcggtcgcattgcttttgttgaatcaatcaaccagaaacggggggagcagctgagaagtatattcgcccagataacatggccacagagcgcctga

SEQ ID NO: 12491 - RNA, 1314 nt, synthetic construct
  source 1..1314: mol_type = other RNA
atgcactccaggaagctgctcgctgccactctggcgtccgccttcgtaggtggacccgtggagacagatgcgctggtggagcatgtgagagtattgctgctggacaaacggaagcaaaggtggctgaagcctcttgttaaaaggtttgtgcaggcttcaagtgtggggccaaggcccaggcaacctcaggtggaggcattcctgctggctgactacgggttcctgaaagcatatcacaagaatcacattcgcttatcaggggcgttggccccctcacccgtaatgagctccacaatagaaagcattacgtccagcgatcgcatctctcttattactcctgccgagttagctagatggctcgacctgccaattagagagctcgactggttcgcagaccgccgtggttgggaggctaaacatgcaaacgcaaagctgcagcactatagatacctgacctttgccaagccctcaggcgagactagactcgtcgaagcccctaaaagcagactaaagggcatccagcggcgtattaatactgacatcttgaatcatgtacggcctcacgaagcggctcatggctttagagctggacactctgtgcgtagtttcgccgaaccacacgtcgggaaacgagtggtgctgaagctagacttacggaatttttttccctctataagggccgcccaaattcatgccatctttagaagcatcggatatcccgatgcagtcgccagtttgctcaccggcctttgcacaaacaccaccccaagcgaaatatgggaggaaagacttcctcttgccctcgacttccctatgtatgaacgcccccatctgcctcagggcgctccaacatctccggccttggctaacctggcagcctatcgactggatgcccgactcggagggttggctaaaagtgctggcgccaactacaccaggtacgccgatgatctggccttttccggtaatacgccattcgaacgggtcgtccgacgctttgctgatcacgtcgcagcgaccgttatggaggaaggtttcttcgtgcatcaccggaagactcgaatcatgccgcaaggggttcgccagaggatagcaggagtcatcgtgaacgagcatctcaatgtggacagacggacatacgaccggctaaaggcagtgctcaccaattgtatccggcttggcccggattcgcagaacgtggatgcacacgagcactaccgccatcacctggagggacaggttagctgggttgaatccatcaacccacagcgtggccagaggctgcgcgagttatctaacaggattatgtggtga

SEQ ID NO: 12492 - RNA, 1341 nt, synthetic construct
  source 1..1341: mol_type = other RNA
atgctgaatgaccctgagtcccccactaaacgctggcaaatgctcgccgatatactccttcactgtcggtggaccagcgccgatcatctcgccttggggatgggcgcgatcaaaagacagcctaacgctgtgaggaatatgatcgccgcgattcaccaggccttcccatgggtgccatcgagaactcagctcgtgaccttcctggccagtcgatcagaccttttaaaggggttgcgctggaagagactgccagacatccaatgtcagcggaggctgtaccctacaacgatgcagccgactaggtttgcacagcagacatgggaaccaccacccctgcccaccctgggatctgtggctgacgatcttctgcgcctccccgcaagcctggttgaatggttgagtaatcctcgggtacagcactatgtcgtcagtgttatcgccaagcgaggttctgcagggtccgcaggtaccggtgcagcgactggaaggattcttgaacagccaaaaaggttgctgaaggccgcccagcgggacattctgcgcgagattttaagggacgtcccagcacaccccgctgctcatggctttgtcccgcaccggtctgtggttacatttgctaaacctcataccggacgcccagtagtggtgcgcatggacctggcaaacttctttacaagcatccctgctgccagggtgaacgccgtgttcaggagcctgggatatcctctgcccgttgcccatcagttaacaaatctatgcactacggcctgcaaattggacgctgtcgagggcttagccgactattccgccgcggagcgagttcgcttggagaacctctacggtcggcctcatcttccccaaggcgcacccacttctccagccctagccaacctggtggcctatagactcgatgcacgtctctcaggcctcgcaagaagagtggggtgtgagtacacacggtacgctgatgacctgctgttctcaggggataggcgcctactgcgacaggctcagtcccttgtcgtgcaagtaagcgcgatagcactggatgagggattccaggtccagcaccgtaagacccgaattatgacacaggccgtgctccaagcagctgctggcgtggtactgaaccagcacactaatatcgatcggagggattacgacaacctgaaggctaccttgaccaactgcgttcggcacggccctgctacgcaaaatcatctgcaacatccgaattaccgtgaacatctacttggcagaatcggatgggtgcaccacctcaaccccaccagagggtccaagctgatgcgtatttttgaaagaatacagtggcccaattga

SEQ ID NO: 12493 - RNA, 1335 nt, synthetic construct
  source 1..1335: mol_type = other RNA
atgcagacaccccacaccgtagctgaaacactcgccgaagcattcctgcaaggcgagttcgccaccgaatccttggttcagaggggtgcacaggctctacagggcactccaccaagatggctaagaagattggcctctagggcggtgcaaacatacggtctggggccacgaccagcgttacctgccctctcaagattcatcgcacacgatgccgctttccagtcggctatgcgtggaaggaggcccgtcgtagccagagcatggctctgtgtccccgaaatgtttcctatcgcagctgcgagatcttgggaggtacccccgctgtgtactctgggcagcctggctgaatggcttgacgttcctgtcggacgccttgatgcactgagtgatgtgaaatcacttgagcgcctgcaccctcgggaaagcctgagaaactaccgctacagggtgctttccaaaggcggcgggcgtgtgcggttaattgaagcccctaagcctctccttcgggccatccagcgacaaattctcgccgagattctgcgggctgcccctgttcacgacagtgcacacggtttttgccatgggcggtcaaccaagacattcgcgacccctcatgtggatcagagtgtggtcatctcactcgacctcaaggagttttttccctccatcagcgccgcacgtgtggacgcactgttccggtccctcggatacccagcacgagttgccgccgctcttaccgccctgtgcgtcaactgtaccccgagctgggtatggaaaaagctgtctggggatgccctgactaggagacgaattgaattggagcggctctatggctttgcccatctgccacaaggggcccccacttctccagctctggccaatctgtgtgcttacaggctggactgccggctagccggcttagcagccgtttgcggcggaaactatacccggtacgctgacgacctcgcctttagcggtggagagagattgcgccgttctgcggccaggtttcaggtccacgcctccgcaattgtgatggaggaggggttcaaagtcaatcatcgcaaaactaggatcatgagccaaggcgcttgccagaagttggctggagtggtggtgaatcgcacaacgtctctaccgagacgagacgtggatcagttgaaggctatcctgacgaattgtgtgcgctttggccccacaagtcagaacagggagggacatgctgattatcgagggcacttacgggggcgcgtggcgtatgttcagttcctgcaccccggacgcggtgctaagctgagagccatattcgagcagatagactggaacgcatcctga

SEQ ID NO: 12494 - RNA, 1392 nt, synthetic construct
  source 1..1392: mol_type = other RNA
atgccagatgatcttgcagcagcacggcgccttgccttggcctttctcaccgcagagtggaacccacagtctatggcagaacacggcaggcgcgtattagggcttaagggcagccctaaatggatcctccggctggcggagcaggtctgtaggcagtatccagcagcccctcctcccacgcagctagagctgtctcgcctcctggccacttcaggcagactgcgccaggccattagacggagggaacagtccaaccagccactggacagcgggacactgctgctcccacctatgcccatgcgccctgtggtgggcttaccagcgggatgggaactaccgaacttaactagtgccggccagttggccgcttggctcgatataacccctgacgaactagactggttcgctgacgtgagaaggctgcaacgagataggccaccgggacccgccagacactaccagtacagatggatcccaaaggcgggaggacgccaacggctcctggaatcccccaaaccgagattgaaacaggtccagcgaagcctgctgcatggcctgcttgatcgaatccccccgcatcctgctgcatgcgcttttagaaggggccactcccttgcttccttcctcgcccctcatgccggacgcaggattctgctgcacgttgacctgcgccatttttttcccagtatctcatcagcgcgggtacacgctttgttccggaccgtggggtatccagaggccatggctaggtctttgacaggtctatgcacaacttctacgccaaggcaggagttagaccgccctcaggatcgtgaggccgaagctgccttgcacagactgtatggttcgccccacctgcctcaaggtgcacccacaagccccgcactcgccaacttgtgtgcccgtcgtctcgacgtgcgcctgaatggactcgcccgcagaactggcgccgactacaccagatatgctgatgacctgctgttctccggggggcacgagttggagagaatgcttagtcggtttcgagtttgggtgtgtgcgatcgcaatagatgaaggcttcaccattaggcataggaaaactcgggagcttccccggagtggcaggcaacaagtggcaggagtcgtcctcaacgaaaagctgaatcagccccgggccgaatacgaccgtcttcgagctaccctgcataattgcatccgtcacggggccgcctctcagaatcgaaatgggcacccacggtttcgggagcatctgggaggtaggattgcttgggttaatatgttaaacccaaaccgaggggctagactcaagcagctgttccagcagattgactggcctgaggagtcaacaggtagcccccccgcagatagccaaccggctaagcctgattga

SEQ ID NO: 12495 - RNA, 1386 nt, synthetic construct
  source 1..1386: mol_type = other RNA
atgacagatgtcagggccgttgccaggggcttggccacagtattcctgtcaggggaatggactagagccgggatcacccaacgggtgcagacggctttagagcagcgggtgaagtcccgcgccgtcgatcttctagtgggacgcattcttcgggcttgcggagaacagccccctccaccaaccttgcataaacttactaagttgattctatccgaccccgtgtttcacaagtacattgctgaggaggacggctatccgagaaggctaaacctggcccacctgccaccccctgttatggctcccgcacctgctataccgtcagactggcagctccctaccattctgactcctggggcactggctgactggctggggttaagttcccccgagctcgagtggttcgccgattgccacggacgggaaagacaacgtgcccgggaggcccttcgccactacagatatcgatggatccccaaaagaaccggcggccgcaggcttctcgaaatccccaagcagcggctgaaagacctgcagagaaccattctgcagtggatcctaggccgtatcgaaccccacgcagccgcacatgcctttcgtcgaggccggagcatagcctcgttcgcccaaccccatagcgccaagagagttgtgctgcgaatagacttgcgtcatttctttccatccgtgcagccctctcgcatcaagtcactcttccggactgtaggctatcctgaagcggtggcgaggctgttatgtggtttgtgtactaacagtgtgcctgacgacattttaggcgtggcagaacagcagtttgccacaaatgagaggcagcccgtcgagagactgtacgctgcagcacacctcccacagggagctccaacttctccggcccttgctaatctggccgccaggcgacttgatgggagactcagcggcttagcgacagctgtcggtggggattacacccgctacgctgatgatctggtcttttctggaggcagggctctggagaggtgtctgccacgatttcggacattgctcctcgcaattgtgctggacgagggattcagcataaggcaccgcaagaccgcagttatgccggccggtgggcgacaacaagtagcaggtatcgtcgtcaacgaacatccaaacttgaaccggaaagagttcgatagactcaaagccatcctgtataattgcgcacaccacggacctagaagtcagctgacaggctgcctccctcagccaaatgagccccctaccgaggcgacgctggaacagctgcgctctcatctcacgggtaaagtggcgttcgtgcgcatgatcaatccagctaagggggaacggctgagcaagctcctgagggagatcgactgggttggatga

SEQ ID NO: 12496 - RNA, 1347 nt, synthetic construct
  source 1..1347: mol_type = other RNA
atggatgatagttttcggcagttcactgctaacttggctgagacactcgcccgcggtacctggtctttagacgagctactcaagagggccgatcagtccttaacagagacaagtagccgtgcatggataataagactgaccgaacgaaccatggtggcctttcccggacgccagagccctcaacactgtctgctgatgcagttcctggcacatgacagaggactgagacgagtttggaacaattgcgaacgcgacgagcgcccattccccgaaatcgacttgaccaaactggtaccgcccgttatgcagccagcctccgaggtgatagcagcatggcccgtgcggccactcgtcactattcaggatgtatcacagtggttgggcctgacgcttggcgagttagattggtttgcagatcgtactcgcagaaaaagcagggtgccagaaggccccctcagacactacaggtaccgctggatcgccaagtcttcgggtggacagaggcttctcgaaatccccaagccccggctcaaagaactgcaacgaaaaattctggcagagattcttgacgctatcccaccacaccctgctgcacatgccttcaggagaggtcggagcgtacgtgggtacgtcaccccccacgttggccaacaggtcgtgttgcatatcgatctcagggaattctttccctctattagggcttcacaaatccacgctctgtatcggacggtgggctatccggaacgagttgccgctatgctgaccggtctgtgtacacatattacccctcgtgacgccatacctctcaatggagagcagcaggcgtctaattcaaactggaaacgcctggggagtcctcacctacctcagggagcccctactagtcctgcccttgcgaacctggtggccttccgcttggactgccgattggcgggactgagccagaaagtggaggccgtctatacaaggtacgctgacgatcttcttttttctggcgggaaggaactggctcggtgcgcgtcaaggttccggctactggtgacagcaattgcccaccacgagggctttgagattagagcccgcaagtcccggacgatgcattccggcactagacaacaggtggccgggattgtgctgaacagacagccaaatatcccacgggaagagtatgatgctctgagagcaacattgtacaattgtcagcggcatgggcccaccactcaaaatgtcaatcagcacccgcacttcagggaccatcttttagggaagatcaactactggtccaacatctgccctgagcgaagcaggaagctcagactcctgtttgaccagatcgtctggccatga

SEQ ID NO: 12497 - RNA, 1329 nt, synthetic construct
  source 1..1329: mol_type = other RNA
atgcatgactttgaggatgagttcccaacaccggatgccgaaagcgtcgcccgggtgtttcttgcgggagctttcagcccagagtcctgcacggctcgtctcaccgtggtgttcggcagagttcaccatcgccgcattgaacgcctggtccggctggtttttgcagtgttccccccccatagtgccgtgcccacattgagacgattgacactgttcctcctgaggtttgagtcatacttccccgaccagttccgcatatcccctccgagagacttaaccggccacagaacgatacctgcagaggccatcactgggagcctaccaatactcaacaacattcgggaactagctgagtttctcgacctgacgcccgaaaggatgctgtggctcgccgacccgcacggtttcgaaaccaaacgtcctagggagagacagaggcactaccggtacagatgggtggaacggaccgggagaaccccacgacctctggagattcccaagcagcggctgaaggccattcagaaaaagatcttagccgaaatcttgaacaagctgcgaccacaccctgccgcttgcgctttccgcaaagggcagagtgtgagagatttcgccaaaccccatgttggccggagggtggttatacggtttgatatcgccaatttttttcctagcatccttcagccccgagtccaggccacattccgggcagtaggttatgtcgaagaagtcgcttttctgctaagtgccctgacaaccaaccggctccctactgaccaactgcacgccgaggcgactggttctggagcacgacacttaagacagcacctcctctctgcccatcttccccaaggcgcgccaacatcacctgcactggccaacctctgtgctttccacctggataggaggttgaccggcctggcagcaaggttctctctgagttatactcggtacgcagacgacctgttgttctccggaaatctgtccgacgctgaaatttatcgcttccgcattagggccttggccattctcatcgatgagggatttgaggcgagatcatctaagtccgcggtgctacgtaaaggaagcagacagcaggcatgtggcgtaattcttaatactaggctgaacatcgccagggaggattatgacgctctgaaggctactttacacaattgcatccgccatgggccagaacttcaaaaccatgagggtgtcgcagattttcgcagcgtgttgcgaggccgtatcgcatgggtacactcgcttaatgtggctaaaggggagaagctgcttgctatgtttgagcaaatccattggaatacctcatga

SEQ ID NO: 12498 - RNA, 1278 nt, synthetic construct
  source 1..1278: mol_type = other RNA
atgtccgagagaattcggatggtcatggcggctcggcgacagtccaggtggcatgaccagctcgccaagcgtgttcacgacgagttcgccgctgtaatacctcgcccaacccgcgacagattggctgagtttattctgttcaaaggtcgcataccccgcagagtgagggcacccgagcacagagatggacctctgcgaaatacttctctcctgtctttaccagctcccgccatgatccctgctgatgccatcgccgcacgtgtcgcccttccagctattacaactcaaggccagctggccgactggctgagcatatcaccctccgaattagactggttcgcagatcccgccgctctattggcccggtggggagttgcagatcgcggtaccctgaggcactatagaaccagactgctgccaaagccaaggggccggtggaggctcgtggaatcccctaaacctaggctcaaggagatccagcggaagattctggcagacctgcttgatctagtgccagtccatcctgcggcccatgccttcgtgaggggacgaagtatcgtgaccggggtaacgccacatttcgggcgcgacgttgtgctgagtatcgatctgcgagagttcttcccatcagttcacgctgggaggattcacgcaatgtttaggacactcggctatcccgaaagagtggcaagtttgttaacaggattgtgtaccacccgaactcctgcagacagattggcccagggtgcattctcgacggcccagagacagctgtaccagagccttcacctcccccaaggagcccctacaagcccagccctcgccaaccttgcggcttggaggctggactgcaggcttgaaggccttgcgcgaaggtttggcgcggcctacacacggtatgcagatgacctgatatttagcggggattccactgtgcatcgggcactgccgaggctacggatgtgggctactgcgatcgtcttagatgagggctttgctatccaacgccgtaagacccgggtgatgccgtcaggtcagcgtcaaaccgtgggagggctgatcctcaatgcccgtgctaatatccctcggcgcgagtacgaagccctcaaagccactatctttaactgcctgacatacggcccctctagccagaaccgggaacagcaccccagattctatgaacacctgagaggccaaattgcctgggtcgctgcctcttcaccgcccagagctgcacgcttgctcgaggagtttcagcgcattgactggagccggtga

SEQ ID NO: 12499 - RNA, 1341 nt, synthetic construct
  source 1..1341: mol_type = other RNA
atgcctagcgagtttatcaggaagctatcttgggtattactcgccggcaggtgggaacgtggggaactggaaaatagagggaggctggccttgcgaagggctacctgtcccatgtggatggtgcagctagccaaccgcctgattgtaacttttggcgacaatgtcacagtgcctcagcggagacagttagagctgttcctgtcctgggacgcccccctgcaaaagagaatccgtacctgggatcgcaatggctccttcccgaagttagtagttcctccacagaggatggctcctgcagctgaccgctttattgaatctagactcccagagctcacaacaacttccagtctggctgcctggctgtctataagccccagcgagctggattggtttgctgaccagcgccggtgggaacgcaggcaagtgaacgaggcagcacggcattacagatatctctggattcccaaatctggcgggatgtgtcggcttctggagagcccaaaacctcggctcaaagccatgcaaagggagatactcgactgcattctcgcgaaggtgcccgtacatgacgccgctcacggattctgcagaggccggtctgtgagaacttacctcgagccccacgtgggtagagatatcgtcttcagtgtggatctgcggcagttttttccaagcgtgcgcgtgtcacagatcaatgcaatattcaggacagttggctatccggaggaggttgcgcgtatgttgacgggcctttgcaccaattcaaccccagaaaacgttctgcactccaagagggttccagatgccggagtcgagaacagccgcatgcttagacgctacagagatgtccatctgccccagggaacgcccacctctccgatgctcgctaacctggcagcattcaggctggatagaaggcttaccggactggcctccaagtttggcgcgtcatatacccgatacgcagatgacttaacattctcaggagacagcgattttcgatgcgccttggaacggtttaaaatcttggtgtatgccattgtcatcgatcaggggttcgaaattcgacacaggaagactagagtcatgacacagggtcagcgacagcttgtgaccgggctggtccttaataaccgcttgaacgtgcctcggaattcatttgacgtgctgaaagctactctacataactgtgtgcggttcgggccttccagccaaaaccgggaggccatcgacaacttctcggaacacctggccggacgcatcagttgggtggacagtgttagtccagcacgtggtgccaaattgaaggctctcttcaatgagattgactggtcccgatga

SEQ ID NO: 12500 - RNA, 1257 nt, synthetic construct
  source 1..1257: mol_type = other RNA
atgccaagccgacggccgtctcccagctatatagccctctgcctggcagtggcttgggagcataagaccggaagaaacgacgaactgcttgaggacgcggtcgctgtgctaggactcactgatagacctagatggctccgtcacctatgtagacatctggcaggtaggtggggcgatcctcttcgcagaccatcgcggggcaaggttgtgcggctgctgttagcatctgaatcattcatcgccgcggtgggggctgttccactgcaagataatctggcccctgccccctattggaccacaatcctgcccgcctggagttggaatttgcccgagtttccatccactggggccctggctaactggttgtccgtgtcaccagcggacttagactggctcgcagatgttcgtgggctcaaccctagaagccccgaccctcagctttggcactaccattattccgtccggccaaaaagtgacgggcgatctaggttgatctctgccccgaagttgcgccttaaacagcttcagagacaaattctgggccagattctccagaggatcccagtccaccccgcagcccatgcttatgtgagcgggcgctccatggcaacctgtctagcccctcatgtcggccgggatgtcgttctgcacctcgatctggacagcttttttccatccatccaggcttcacaggtgcgcgcggtctggacatatgtaggctacggtgcttccgtggccgctatgctgaccggcctatgcactgagaacgtacctgactctgtgctgagccgcctgaatgcgagcaggcaggcagttgacaggttccgggaacgtcatttgcctcagggagcacccaccagtcccgctctctcaaatctctgcgcctaccgcttggattgtaggctttcaggactggccggccactttggagccgcctacacacgatatgccgatgatctgattttctctggtgacgctcacttccggaggcgcctgtttgatttccggacgacagtgggcgccattctgcttgatagcggatttaacctgcaagggaggaaaacgagagtgttaccggcaagtcgaagtcagcgtgtggggggattagtcgtaaaccgccgattgaatattccccggagagagtacgacgacatgagagcaatcctccacaactgcgctaggttcggtgctgaatcccaaaatcgcgaacgacaccctcactacagggagcatctcctgggccggatagcctactga

SEQ ID NO: 12501 - RNA, 1356 nt, synthetic construct
  source 1..1356: mol_type = other RNA
atggatgagcccgagtttagggagagggtggtactggatgcacttgcccggaccctgctgccgttggctgatgatgtatcagtcgcagtccgagcggctagacaactgctgggctggaaacctgaacggtggtttcgcacactggttgcaaacgtgctggcatggcccgagatgagggcaggtcagatgactgcaggcgaactcgccgctagactctccggcatcccatctttgatggaggcacttgatgaaggaaagggggtggttctggatctgtccgcaatccctcggccccgcatgaggagaagcccagtagctggaatggggcctattgtcagactagagacagttggggactgcctggactggctgggactcggtttgaatgaactggactggctcaccgaccccaagggttggcttcctgcagccggacagagtcgattggcccattaccactgccaatggatccctaaaccagctggaggggtgcggcttatagaggcccccaaaagaagactaaaggccatccaacggaagattcacgaagagatcctcagacacgtgccaccgcacgaagccgctcatgcttaccggccagggcgaagcatggtgaccgctttgaccccccataccggccaggaaacggtgtggcaccttgacttaacttccttcttttggtctattggctcaggccgcgtgaggcgattcttcagacgcatcgggtatccagagggcgtggccggtgtgctgactggactgtgtacttctcgtgtcgccccgggcttattggagcctgctccactctctgagcgcgaaaagcagcagctgttagcaagacatctcccacagggtgccccgacaagccctgctctgagcaacctgtgcgccttccgactggactgtaggctttccgccttgtcggcgcggtacgacgtcagatacacacgctatgccgacgacctggtcttcagttgtggccctaaactgcgaaggcggctccctggattcaggaataccgttctcgcgatcctaatagatgaaggctttcagatacgtcgccggaaaacaagggtgttacgccggggacaaagacagcaggtggggggtctaattcttaatgaaacgctcaacgtgcccaggagcgagtatgacaccctgcgcgccattctgcatgattgcggcaggaacggacccgtcgttgcgaatcgcgaccagcacccatcctttcgggagcacttacaggggagagtagcctggattgctcacgtgtcacccgggaggggacgtaagctcaaggagatgtttgagcgtatcgattggagtgggagtgaggaacccactggcgccggctga

SEQ ID NO: 12502 - RNA, 1317 nt, synthetic construct
  source 1..1317: mol_type = other RNA
atgacataccgcgcttttctcaggtccctggctttcatactggatcaaggcttttggcatgaggaggccgccctggagcaggtcttggacgtgttacctacacggcagcgacaggccaagtggccaagacgcttgattggcagaattttcactacctttagccgctacacccggccctcattcggagagctctcgagattcctgcagggcgataaagagctcaaggccgacctgagaaggctgacagcaatacctctaattgtatggcgaccaggggaccagacgcgtcctcatcctgtgctccgtgtcagtggcgatctgcccatccttaagagcgtgagggatttcgcaaatttcttgcgcatgccggttaatagcctccaagctctggctgatgttaactctcgcgaggccaggaccttagacgcacggcacagacattataactaccgttggatccaaaagaggagtggcggacagagactcatcgaaatccccaaagagcgtctcaaacacgcccagagccagctgctcgaatgtatcttacgccacgtacccgtgcatgaggccgccagagcctacagacgaggactaagtcttagagatgctgtcgaacaacatgtcgggcagcgcattctgctcaggatcgatctgcaagactttttcccatcgattggggtgggaaaagtccgacaggtgtttcgccacctgggctatccatctgtggtcgctatgcacatggcagggctgtgcacaaatgtggtacctcaagctgttcttgaaacaacctcctctaatcacaggctgagccacgtgtaccagttgccacatctgccccaaggagctcccacctctgctgtgctgtccaatctggccagttacaggatggacgcgcgacttactgggctcgccgcatattggagcatgcagtacactcggtatgcagacgatctgcttttctctggcgactccctttcagctgcgcaggttagccgtcttcggacccagatactggccgttgcctccgacgagggtttcaggatcagacggtataagactaaagtcatgagggcgggaaggcagcagtctgccttgggtctaactttgaattcacaggccaatacgatgagacgagactttgacaacttaagagccctactgaacaacgcggtgcggcacggtctggaatcccagaatcgcgataaccacccgaagtttctcgaacatctcgcaggccgggtggcatatcaccgctccatgaaccctaagcggggggcacggctggatcggttactgtcaaggttgaccaacgaatga

SEQ ID NO: 12503 - RNA, 1308 nt, synthetic construct
  source 1..1308: mol_type = other RNA
atgaatggggagattttacgggcggcaaggattgctgaggctttgctggctggcccctgggacctcaagagcttgacgggaaggcttaagactacttttcacgcagtagcccggtcaagatggcccagacaaaccgccgtagagttggtggcagaatttccagcccctccacgagccatcagattggcattctggataacgaggaacaggcaccttgcgccgcggcagaaagatgtgccccttgcggatcttccccggcctcgtatgcgaccccatccagcagcagcttctctgctcgtgccagcgctgtgcacccctggagatatcgctgcatggctccgcttggacccgggtcaagtcgacggattagccggggccggcgttcctgaacgtaggagacacgcccgcgcacgcaattacgcatatcgatggttgaagaagagtgacggcagggtgagactgattgagtcccccaaatggcgcctgatggccgtacaacgccagatcttatcggatctcttagaccacgttccaccgcatcctgctgcccacgcattcgtgcgcggtagatctctgcagaccttcctgagccctcacgtccgacgcaactgggtcttacgcctagatctggctgactttttcgctacaatagcagcaaaccgggttgtcgaggtgtttcggttcctgggctaccctgaggcctccgctcagtggcttactcgcctgtgtgtgaacgccgctccaagcgacgtgttgtgcgatggaatcggtcacgccgccgatgctcatgtgcagcggcttagatcccgcctgtctggactccatctcccacaaggcgctccaacatctcccgcgctagctaatctgtgcctgtttagatttgaccagcgactcgccaggctggccgagtcaagagggctgcagtatactagatactgcgatgatcttgtgttctccggggacagagaaaccaggagtgacgtcgtggatctgcggcgtacactctttatgattctggccgacgaaagactgtcagtccggcacgccaaaacacgtatcatgcccgccgggaggaggcagaatgtttgtgggctaaacctgaatcacggcctcaataccccccgagccgcattcgatcaactgagggccatactacatcggtgtggcacaaagggactcaccgccgaggaacagcaggactccagccgtttccggcagcatctccagggcaggatcgcgtgggttagtagcattaaccctcatcggcaggccaagctggtgaaactgttcgaagctatcgcttggtga

SEQ ID NO: 12504 - RNA, 1371 nt, synthetic construct
  source 1..1371: mol_type = other RNA
atgggtcagcagagcaggcggcttgccgaagcaatcgcccagactgttttaaacggcccctttgcttttgacgcaattgtgagtagactcaagagaatcaccccagggccttgtctgagagggtggaaacaaagggtcgcccgttccgtgctagaccggtttggtgagggtggaggcgtgccatccctgttcactctgcgacagtaccttattgacagtggcttgctcatagatgtggaggcagatgactttcccgaggactggatcgacgagacagaaacaactattatccgcccggatcgggtgccccacgctgtattctgtccacgcatcgcggccttccagaacctcgggctgcctgagtggaccaccacaagagagctggccgattggttcggcctgacagatgggcagcttttatggctttccggaggccggcggtccgatggaaaatctgccttcgagaggtatcgcctgaagtgccaaaggtcatcctcaggaaaggtgcggtgcttagaggtgcccaggtcaatgctgaaatctattcagagggaactcaatagagacttgctcactcgcatccccatccatagctgcgcgcacggtttcgtgcctgggcgatctatccactcttacgttgaacctcatgtgggccaggacgtcatatggaaaactgacctggcaaatttcttcccaagcattacaagatccaggatcgaggcccagtttagactgtttggatacccagatgctgtcgctcgaacccttagtgggctgatgaccgtcagacaggatcggaccaagatagaggaactgtcccagcaatttcccagggatcagttccgagacttagccagcctccttacgcaatctcacctccctcaaggtgcacccacatcgcctgccctcgccaacctggcagcttaccgactggactgccgcctgtcgggactagctactaagttccacgcgaattatacgcggtatgccgatgacctgacctacagcggcggacagcggttccagagaagtttggataccttccgcgtgcatgccttggctattattgtcgacgaaggatttcgtaaccggctccgcaaaactcgtgtaatgatgtcttcaagacgccagacggttgcagggttggtgatcaatcagacacagaatgtaccgcgcgaggagtataaaaccctgaaggctatcctgtttaactgtagactacatgggccggcaagccaaaatagggacggcattcctgattttcaggcccacctgaggggccgtattgaatttgttcgaagcgctaacccagagaggggcgaaaagttgatggccatgttcgaggaaatagaatttcatgcggaaacctga

SEQ ID NO: 12505 - RNA, 1341 nt, synthetic construct
  source 1..1341: mol_type = other RNA
atgaatttgttcctcgacgcgttggccacggtcgtcctttccggaccattcgatcagaaagctatttgcgcccggataagaaagagtctggtcgtgcgttctgatgcgcctctggaagtgaagctcaccactcggtgggttacccccctcgtgaaagctttcctgtccgccgtacccgctagacctaggcatcggcaggtggtaagctttctgagtacccaacagctgagtgcccaggccgagtatttttcgatagagacatcccggtgtagcccgcccctttttttgcccttaaaacctcagtttgcagagtggggcctgccacagtggcgcacaactggacagctggctgatttcttgggcatatctcccgttagactcgactggctgtgcggccgttaccccgttagagatagccaggaaatcaggcagcgctatcaaatcaggtggcaaagatctcggacggggaagctccggatgatcgagatcccttgcccacagcttatgcgtatccagcgccagttacttcacgacgtgcttgacaggattccagtccatgccgctgctcatggctttcgggctaagcactccaccctcacctgtgtgtccccacatgtggctcaggccgtcgtatggaaactggacttggcatcatttttcctgtctatcccgcgctgtagagtcacagggttattccgaatgctcggatatcccgaggcagtcgccgaggatctgggttggctgacaactaacgcagttccgtcaaaagttctgcaaagaatgaaggcaaagattggcactgaccagttccaggagctagaacgatttgccgctgcaggtcatctgccacaaggggcaccttcttcacctgccttggccaaccttattgcctacagactggactgtaggctaaacggactggcaaccgcatacggcgcgcattacagcaggtacgcagatgacctgctgttcagcggcgattataggttcaaacgatatttggccggatttaggatccaggtgctcgcgataatcctagacgaggggttcctgattcgtcgacgcaagtccaaggtgatggtgcacagccgacgccaacaggcccttgggatcgtgattaatcagcaccctaacctccctcggcaggaatacaaattactgcacgctattctgcacaattgcgtggtgcagggtccacacagtcaaaaccgcgacgggcacctggattaccatgcccacctcgctggtagaatcgccaatctacgcaggcttaaccccgcgagggccgctaagctccagacaatgtttgaacagattaattggcaacggttcgattcatga

SEQ ID NO: 12506 - RNA, 1272 nt, synthetic construct
  source 1..1272: mol_type = other RNA
atgtcgagcgatgagcttgcgactatcctgttgtcgggcgcttttgaacaggcggcttttgaggaaaggctcgtgatggcagtgggggcaccaaagttctcacgtaagttggcggggcgcgtgattaggcattttggttcaggatcccgccccagcgtcagaatgttagccgagtggttagagagtgaccgacggtaccagaaaaagcagaggagaggtgaactgcagctgagcggccagatactccccgccgaaatggccccagacatgcgcgtagctgccgactggaaaattccgtctatcacgacgagcggagatcttgctcactggctcgatttgcctgtcagccagatggagtggttcgccggagactataactctgtgcccgctgatactaaactgtctcactacacagtgcaaacagttgttaagaagagcggcggctttcgggtgctggaaaagcctaaatggcaaatgaaacaggtccagcgctacattctgcacggaatccttgatcatctgccccctcatccttgctcccatgggttccagaagaaccgatccattctgagttacgttcaaccccatatcgggcggaaaatgctgatcaagatggacctcaaagactactttcttagtatcgagcggtcacgagtcagagcactgttccacttgcttggctaccctccactagtgtccgtccagctagccggctgttgcactaatagactccgcttagctgatgtgccaagtggagtggcacagcgagacaggtataccgtaagccacctcccacaaggtgctcccacctcacctgcactcgcagataggctgctgtatagactcgatctgaggttgcacggactggcccagaaaatgcacatggactacaccaggtatgccgacgatttcgccttctccacaaacgactctgttagaaggccccaagtggaggccttcctaaatctggtcgaccagatcgtgagagaagaggggctgcagttgcacaagaccaagacatctgtgatgcatcattctcagagacagcgtctggcaggcctggttcttaatgagaaacataacgtagctcgcggggaatatgatcggctgcgcgccatactgcaccggtgtggacagaatgggttggacgccgaaaataagaacgaccacccgtccttcttacaacacctcgagggtcgggtggagtttattcggcagaccaacccacgtcgaggcaagaagctgcaaggcatgctcgataaacttgtctga

SEQ ID NO: 12507 - RNA, 1338 nt, synthetic construct
  source 1..1338: mol_type = other RNA
atgaagattgatccagtattcctggacatggcgagggtgttgctcgcgcacccatgggatcgggcagctgttctcgcatgcgggcacaagctgctgggcagaaagcccaaatggtgggccgctgcagtcgagaagtttgtcgcatggttccctaccagacctccaacagccgccagacttgcccggctgttagccgcacaccccaggttggctgccctgagagataaggataagctgccacagcctcgggccgatctcttacgcgaggcactacaataccaagttgaccatctgagataccctgacttaccaaaactcgccactcccgcccaactggctgactggctgaatgtgcccgagcctgtgcttcgatggctggccgatatcaagtgtctgaacgctcggcaggctcccgcagtgcagaactatcggtaccactgggttgccagacggcggggtggtcataggttgatcgaagcgccaaaggagatattaaagaggctccagaggcagattctggaccgtatccttgacctggtgcctccgcacgatgtagcacacggatttcgcgctggcaggagcatcctcactcacgccgctccgcacacagggcagatcgtcgtgatcaagtttgacctcaaagactatttcccatcggtggccggtaaaagggtgggatccctcttccgctggttgggataccccgacgaagtggcgtggttgctgacctgtctttgcactaccattactccggcagccgtggaagcaacagcacctgcaggggccgacgatgtatctctcacctttcagacactgtaccgaagaagacatctacctcagggcgctcccaccagtccagctgttgctaacctatgtacgttccgactggatcggcgactttcaggcctagcggccaaactgggcgcccgttacaccagatatgctgacgacctcctgttctcaggagatgccgtcttcgcgcgcaaaaggcgatcttttattgcctgcgtttatcgtgtcatactcgaggaagggttccagcctgcattccgcaaaactcgtgtgatggcccgctccacacggcagcttgctacaggtcttattctgaacgagacgctgaatgtgccacgccccgattttgatgaactcaaagctatcctgcataatgcgatgaaacacggattagcctcccaaaacagagctggccatccccattttgtggacagcttgaggggccgcatagcttttgttagccaggccaatcccagaaggggggccaagctgaagttgaagttcgaggcagtcctggagaatgaaaaacgcccggccagtacctga

SEQ ID NO: 12508 - RNA, 1290 nt, synthetic construct
  source 1..1290: mol_type = other RNA
atgacacccaccactctctggctcaaaaatctcagcactcttcttctggaggaggaacggcaactagatgcttggctcgcccttatccggaaagtgattcctggaaagccaaggaggaactttctgataatcacaagggaagtttggaaggttgcaaagactcgcacagtactcgagaatcgggaacttcaacaaattttccgcgaaaatagaaggttttggaactggcagcggaaatggtacgcaacccggactcctctacccccagccttgatcgtgggccctgccacaccagtgttggatacctccgcttggcatcttcctgagttagccacggtgggcgacctggccgacttctttgccttacagcccgacgatctgggctggctcttgtcacccaaggcccagcattaccatgaacagtggttgcctaagcgcaagggcggccgtcggttacttgagtcccccaaaccgctgctgaagcaggtccagaggaccctactgagagagctgctggacaaggtgccaccccacgaatgcgcaacggggttcagagccggacactcgattgttgacttcgcacagcctcacgctaacaagagcatcgctctgaaaatggatctcgcaaacttttttccttctctcggtcgctcccggattaaacgtctgttcatgtcactcgggtatcgtgagggagtggcactggcgctggcggtactgacaacccaccgatcagcaagtcccgacctgacattcactgagaaggagctgtacagcaggtatcatctaccccagggggctccgacatcaccagcccttgcgaatctggctgccttcaggctggattgccggttggctggtctggctaagtctgccggtgccagctatacccgatacgccgacgatctgctcttttccgggactgaagaactcgcgcgaggtcttcacaggtttgagaatagagtcattatcatcacccgagaggagggcttagaaattaacttcaggaaaacccgccgaatggcagctagtcaaagacaggcagccgctgggttagtctttaaccagaaattgaatgtgccgcgcagagagttcgacaccctgaaagctatcctgcataactgtagaaagcatggcgtcagttctcaaaatcattctcaccaccctgactttcaggctcacctgcgcggaagaatagcctggatagcaagcctccacccagtgaggggagagcgcttgagagccgccttcgaggaactggattggtccaagccaaacgcacaggaatga

SEQ ID NO: 12509 - RNA, 1434 nt, synthetic construct
  source 1..1434: mol_type = other RNA
atgtccgattacccaaccgccgtcggcttcgagctcacacagcactccgacaggctagcctcagcccgacttgagctgagccctcgtaacgagcgaatcgttcaccgcgcatccttgtcacctgtgtttactatggccccacggcctgtcgtaaaacggtctgtgagcgccgcagagctgaccaagcttctggctgcctccctaagtgcaagatggctgggcgacactgaatccgtgagccgaagattgcgcaaacttactggttctcgcgcgaaatgggtgcaggaactggccgtgtcactgaaccagcagttcggcaaacaagggtacgccagtggagccgagataattagacacttaagaaataacccctacctgcagtctgcgcggaagaataacaagctgtttagactccccgtagcagaggccattagcgcacctgagagcgatagcccaagtatcgagacggatacccagctggttgacttcctgggcctgccgtctcttcgggcattggaatggttgctcctgccccatctgcgcaggcagacaaacgtcgaccattatacccgcagaactctgcaccagaccaacggtaagaccagattaatcgaagaaccaaggcctgtgctgaagagggttcagcgactgattctgactgagatcttgtctcacgtgcccatacatgacgtcgcacacgcttacaggcctgaacggtcggtatttacttgcgctgctccacataccgattgccgtgtcgtgctgagaatggacattagggatttcttcgggaccattacgctcaggagggtggccgcccaattcagacggtgcggctacccgaggccgattgcgttcacactggctcggctctgcacggctgctaccccaattacgagcgagtcaacagaaagggagcaacacctcaccatccctcacttaccccagggagccccttcgagtcccacccttgccaatgcggtggcttttcaactagatcgccgactcgccggactcactcgcgcagttgacgctaattacacacgctatgcagacgacttgctgttctccgggggccaatgtcttgctagccgggtcgatcgcattgcgacaacagtagccgtcatagcaatggaggagggttttcagatcgcacatagaaaaacaaggacaatgttttccgggcaccagcagcgagttttaggcctcactgtgaaccagaagctcaattgtgaccgtcgccagtatgagctgctaagagctatcctgaccaattgtttgcggcacggatgggaatcacagaaccgggattctcatccaaactttgccgaacatcttcgtggtcggatcgcccagatcgtgcaagctaatcccaatagaggacagaggttactccatctgtatgaacaagtgagttggaacgatcccgggtga

SEQ ID NO: 12510 - RNA, 1395 nt, synthetic construct
  source 1..1395: mol_type = other RNA
atggctccccccagcgtggccaaaagaaccgtaactgcctcacaactggcagacctgatcgcatccgagctcgcaacccgatggctgggagacgtggacgaggtgacaagacagatctctaagctgaccgggtccagagctaagtgggtccgcactttggctacctctgtgacacagcagtttgggaagacaggccatgccacaagaatccaactcctcaggagtttaaggaacgaacctcacctgaggaacgcacgcaaaaagaagaaatccttcaatgttcccgtgttaagtacaactcaaccaactagttctctttttcccaccattgaaacagacgatcagctggtggacttcttgcagctgccttctctcaccgttttggactggctccttgttccacattttcgcagacagactcaagtcgatcactataccaggcgtgtgctgagacggagggatggcactacacggctgattgaagaaccacgaccactgctcaagcgaatccagaggctcatccacagcgaggtcctggtggatgtggtcatacatgatgtagcccacgcgtaccggggtgaacgctccatcttcacatgtgcagcccctcatgtcggccaccaggcagtcttaaaaatggacctccagaatttcttcggaaccataactctgcgccggattgccgcccaattccggaggtgcggattccctcggcctattgccctgacccttgggagactgtgtaccgcaccgccggtgagtgtggtaagccctcagacgggcaaaggcttcgtacaggttaacctcattaattcaggttcagccaactccggaggcaatctgaatgccgtgcgtatgccagctcacttgcctcaaggcgcccccacatctcccacgctggcaaacgctatcgcttttcagctagaccggaggcttctgggtctggccaacgcggttggcgccaactatacacgctacgctgacgatcttttcttttcaggcgaccgcggatttgcgagccggatcgaccgatttgctaccactgtcgcagttattgctatggaggaagggtttaccgtggctcataggaagacccgcaagatgttttcggggcacaggcagcagttattgggtcttacggctaacgagaaactaaacagccaccgtcagcaatacgagcagctaaaggccattctgacgaattgcgtgcggcatggatgggagagccagaatagagaaaatcaccccaatttcgcggatcatttgcgcgggcggatcgcccagactttgcaatgcaacccaaacagagggcagcgtctcatgcgactgttccacgagatagcctggaatgagacacagccaagcagaccctcccctgataaaccggatccctga

SEQ ID NO: 12511 - RNA, 1338 nt, synthetic construct
  source 1..1338: mol_type = other RNA
atggctgccctcagcctcgttcctcttcggatggacgagaaagcagctgtgaatcgggccgcgtttatcaaggtcctggccttcgagcttagtcggacttggctgggatcacgccagcgcataagacaggtgttgagacggatgcttgggcgaatgcccgcctggtgtgaagaattgtcatccatggtgcatgaggagttttctgccgctgcttacgcgaaccaactgcagctcagacgcttccttggaagggttgccgctcttcggtcagtgtttcgcaaaggacgcaatctcaggattcggactaccgccctgggtcgtgctactgcatatcggtggcccgttccacaggcaagaaatgaagctgaactacaggacctcttatgcctgaggtcaaccgtggctctggattggctaatcaaaccccacgtcgtgagatccacaaacgtagatcattataggcgcaaaatgatttgtaagcacgatggccagatcagactcatcgaagaaccaaggcccctgatgaagagagtccagaagaccatacataggcacctgctggctgctatcccagtgcactcggctgcgcacgggttcatctgtggccgctctattttctccgccgccagccctcattgtgggaagcgtttggtattgtgtatggacctggcaaacttcttcgggagcatcgaccggcgcagaacgagtgccctgtttcgactgtgcggctaccctgctcccgttgccttcctcctgggatgcatttgcaccgccccggagtctaattctccagatatgcctggtggcgagctggtgaaagtaagcaggttaccccaaggcgccccttcatccccatctattgctaatgcagtcgcctttcggtttgatcaaaggctggccggattagcccattccgtcggcgcggactatacacggtatgccgacgacctcacctttagtgggaacgagcagttcgtgaattccgcaagtcggttgattcctttagtgggcgcgatcgcaatagaggaagggtttgcagttaaccacagaaagacaaggagattttacgcaggccaccgacaaacggtacttggtttgacagtgaacgtcagccccgcagctgcaaggcagagctacgagtctctgaaagccctgctcaccaactgcgtgcgacatgggccggagagtcagaatcgcgataacgtcgataatttcaggagccacctccgaggccgaattgcctacgtgggtgcacagcatgccagccgtaacaagaagctgctggaactgttcggaagaatccactgggaccaatccactccacgtgacctacagtga

SEQ ID NO: 12512 - RNA, 1281 nt, synthetic construct
  source 1..1281: mol_type = other RNA
atggagagcagcttgaccagaagccaactggccatgctgataagtagggatctgtcaaggcgttggctcggcaactcctccgtaatacaccgacggctccgtcgcattacaggctcccgtgctcggtggactgaccagctagcggaggctctccatctacaattcgggagggccggccatgcccaacaagttcccctgcaggtttggctggacggccatccagtcatgaaggccgcattccgcaaccgccagacgttacgcgttgacgtggcaacagccaaccagatcaatcgcccgggatataggtggcccgtacctgccgcagctaaccttctggaactgacggacttattgtgtctgcgcactccacgggccatcgattggctcgtcagacctcacctccggcggagtacatccgtggatcactatgtccgacggcgtatacccgggagacaagggcgaggccgatggttacaccagcctcgaccactgttgatgcgggtacagaggtgtatcgctagagagatactcaccgaaattcccctgcatgccgcagcccatgcatataggagaggactgtctgtgagggactgtgctgctccccacgtgggacatagagtggtgctgaagatcgatcttgagaatttttttgggactatttctctgagacgtgtcacagcgttgttccgcgccgcaggttaccccgatgaagttgccgtgaccttaggtagactgtgcaccgtccctgcaaggacaccttctggcaccgaggactgcaggatcgctgggacgtgtctgccacagggaggtccagcctcaccagcaatctcaaatgctatcgcgttccaaatggaccgacgccttgctggactggccagctcagtgggagcgagctacactcggtacgcagacgatctacttttctctggcggccccgacctggccagtagaatcgatagagtggccaccaccgtgtgcgtcattgccatggaagagggatttcaggtgcagcacagaaaaactagaaaaatgtacagcggtgacaggcagcggttgctcggcttgaatgtgaatacacagcttagtactgaccgctccgactttgaactcctgaaggctatcctcaccaattgccagcggcagggttggcgctcgcagaacagggatcagcaccctgagtttaggctgcacctgcaggggcggattgctcacattggccagacaaacccggggcggtatcagaaacttgcccgcctcttcgatgcaattgattggacctga

SEQ ID NO: 12513 - RNA, 1305 nt, synthetic construct
  source 1..1305: mol_type = other RNA
atggctgaaaagacacttgaccccgctctcgttagtcggcgccagttttgtcgacagctcgccggctgcatgtcccgctgttggttagggaacgatgctcacgtgcgcgaaagactcgaacaagtgctggactgtcaggcaacttgggtggccgagctggccaagtccttgagcgcgagcttttctgagattggttatgcaaataggtttgccctggagtcatggctaaggaaacagccgacgatcaagctcttcttcaagggaaaaaagagtcggcggctcactgatgaagtccagagagctctggcctcacgcaaccataggtggcctgttcccccgttagattccgacgacgatctatgtcgtctgcttgagattgcgtctcttagggaactccagtggctggtgttgccacacgtaaggagaaatactgctgtggaccactacaagaggacatgcctgaagaaaaaattgggcggatatcgttggatagaggagcctcgtcctaaattgaaggccgtgcaaaggagaatgctggaatctgtcctgccagggattcctctgcacagcgcagctcatgcttatagaacaggttgttctgttcagtcttgcgctgagccacatgtggggcagagagtcgttctcaaactggatctgcgggactacttcggcaccatcagcattttcagagtcaaagccttatttgccaatgcaggctatagttggcccatcgcccttaggttggcccagttgtgcaccgccccagcgagaatggacgacctgagggatgaagccagatcactgaccagaacacgactcccccagggtgctcctactagtccctccatagccaatgctgtggcttaccgcatggatcgacgcctggccggacttgcagctagcgtgggagcatcgtacacgcgctatgccgacgatctcatctttagcggggacgataacttcgccgcccgagtagatcgattcgcaacctcagcggcagcaatagtcattgaagagggcttcgccatccagtttcggaagactcggaagctatttcatggggctgagcagcgcatcctcggggtaacagtgaacgaaaaactgaaccttaacaggagggccttcgagggcctgaaggccgaacttcacaattgcgcccgccggggatggcgaacccaaaatcggaccgagcacgcggactacagagctcatctgcgtggccggatcgcatacgcacaatccttaaacccaacccggggtgcaaaactgctgcaattgttcgagcaggtgaagtggaatgagtga

SEQ ID NO: 12514 - RNA, 1389 nt, synthetic construct
  source 1..1389: mol_type = other RNA
atgaccgcccgccgcgagactagaattgatataggaagggctaggctcgtgcgcattttaatcgctagactgaaccaccggtggctggaaacgcctgcacaggtactgaggctgacacaggggctgttcggttcgcagcattctctcgagaaacagctcgccacccaactgagtcaggctcacagagaaaaccggttaagcactcagcaaccgctgtcccggtggctgttgagaaacgaacttctgattcgctatttccgcaaaaagcagacaatctctatttgcaagtccatcgtcgattccatcgaaaagagcgagcacgcctatcggtggagggtgccagccgtcgatgatgaagtgcagctcgccaagttcctactgcttgggagctcacaggttctgcagtggcttaccttgccccaccggagacgtagaaccgacgtaaaccattaccgtcggcgcgccattcccaaaagagatggcaccctcagatggatagagtctccatctcccatcctcaaacgtacacagcgtatcattgctgcagacttactgccacacgtgccgctgcacgatgccgcaatgggttttagacgagggcacagtatccatgactcagccgccagacacgtcggcaaggcctcagtcttgaggctggatctccaggacttcttcggcagcattcattttggccgcgttcgaagtctttttgcatacgccggttactcctctaaagttgcttcaacactggcaatgttgtgtaccgcgccaagtgagacagcgccactggacacctcacccccctgtataactcctcttagcaacagtgctagaacttctacacgcagcgccttgcctgaactgcctagccggttgccccaaggaacacccaccagccctgcaattgctaatgccatcgccttccgaatggacaggaggctcgacgggctagcaaccgcagcaggagctaattatacccggtacgctgatgatctggttttttcctttgacagcccatccgtggctttcgctaagcggtttgcgacttctgtggcggtgatagcaatggaggagggcttcaagatgaactttaggaaaacgcgtttaatgaggcgcggtaatcggcaacgggtactgggaatgacagtgaacgagaagcttaatgtgtccaggcaggcctacgaaactctgaaggcaatcctccataattgcgccaagcgcggaccccggtcccaaaatcgaactgaacaccctaatttcagggagcatctcagagggcgaatcgcccacgtcgcttcgatccatactggccgaggcaacaaactaaccgcggtgtttgagacgattgactgggacgatgatgccccagactataggcagcctgactga

SEQ ID NO: 12515 - RNA, 1293 nt, synthetic construct
  source 1..1293: mol_type = other RNA
atgtccagtcacacagtcaccatagacgtggatttgaagcggtttgctggcctgctccataggcggctgcaatacaggcacctgccagctcccgcttccgttcgagacgccatacagcccttgttcggcagggataagaaactgtgcgaagacctggtgcagcagattgtcgacgcacagcggaatccacagcctctgcgtcatcctcagatgctaacatggttatccaaaaatccggctgtgaagaagagattcagacaccgcaagcgcataaagatccagcagtcccttgtgatccaaattgagagtgacggggtgtatcgctggcccgtgcctccaatcgccaatgaaggtcagctggcagattttctgagtctgtcaacgccacggatcatcgattggttaaccctgccacatcgacgccgcagcacaagtgtggatcactatacaagggttgcctctaccaagcgggacgggaccattaggtggatcgagcaacctgcccccacccttaagagagtccagagactgattgcccagcaaatcctctccactatacctcttcacgatgccgcctcaggctttcgggccggtcattctgttcctgactgtgctcgccagcatgtacggagatctttaatcatcaggatggatatgcggcacttctttggttctatacacgtgggcagggtcagaaacctcttcctcatcgccggatatccgccgcaggttgctcgcaccttggccttcctatgcaccgcacccgcatcgattgaccctgatgcagatgagcttctgcgacgtagccggctacctcaaggcgctcccacaagcccagccattgccaacgcggtcagcttcgccatggataggcgcatcagcgggctctgtaaaactctcaacgtgacatacaccagatatgcagacgatctgattttctcatgcgaccatttcggcttgtctcaggcaaaacgatttgcgactactgtggcggtaattgctatggaggaagggtttcaaatcaattttcgcaagactgcgtttatgcgtcacggcaacaatcagagagtactgggactcacggtgaaccagaaactgaactcagccaggaaagagtacgagactctgagggccatccttcacaactgtcgtcgagacgggccagctggacaaaatcggcatgaccaccccaagttcagatgccacttgcgaggaagaattgcacacattgcaagcgtcaatccccataggggagctaaactcatggaacagttcgaccagatctactggtga

SEQ ID NO: 12516 - RNA, 1335 nt, synthetic construct
  source 1..1335: mol_type = other RNA
atgcctcccgccacctactcccttgatcaggtagccgccgcttttgccaaagctgcagttgtgggggtgtggaagcgcacagccgtgctggaccagtggcgcaagctcatcgaacccttgccgaacggactgaagtcagtggccatgcaactaattggacagttcgcacacgtccccagtcagcaggttgtagcggaatttctccaatcaaacagaatgtttcagcaggcctacgccaaaaaccttgtgatgcggagggtggggtggtgtgatcatcagatcgtggatgccgccctagctccaaaaagcaggcacgtgaggaactgggaccttccggaattaacctcccccactgatctcgcctcactcttggactgccccgagaaccttctgtggcagctggcagatcatcgtcgctgctattggctgcgacagagccattatcgcttacggatgtctcgtaaacgctctggcggcctcagattaatcgaggcccctaagccaaagctgaagacagtccagagaagaatctggaaaaggatcatcagatggattcccgcgcaccaggctgctcacgggttccaaccgcgaaggagcatccgttccaacgcagccttgcataccggccaatcggtcgtaattcgaatggacctgcaaaatttctttgcatctgtgagcggtgcccgcatcgccgcaatctttcgcaccgccgggtaccctgaaagtgttgcgctgcttctggcccggctctgtacgtcgaaggtgtcaagattcgtgtggcagatgctatgtgacgaaaaccaggctgctgacctgcacggcctcgtcgaccaggtcagtgtctggcacctgcctcagggtgcacccactagcccagccctggcaaatctcgccgcttttaggctggatcggaggttgacgggactggcggcgtctatgagctctcggtatagccgatacgctgacgaccttatattctccggtccaaccgacctcgccaaaaggtcccaagctttcgtggcaaaggtcacagagattatggtggaggagggctttttgcctaatactaggaaaacacgtataatgcggccatccgttagacaatctgtttgcggactgaccgtaaatcagaaggtcaatagtaatcgggctgatttcaagcagttgcaggctattttacacaactgcgttactctgggacctgccggccagaatagagctaatgtggcggattttcgcgcacacctggcagggagaatacagttccaacggttcattcatcctcagcgggctgccaagctggaggcaatgttcgtgcgaattaaatggccatga

SEQ ID NO: 12517 - RNA, 1353 nt, synthetic construct
  source 1..1353: mol_type = other RNA
atgccaccagaaccactgcctgagtgtatgattgctgccgccgctgaacagttggccggatggcttcagctgaggcttctccccgaggcccagtcactggaagctgccctggaaagtggtctgcctggctccatctctgataggaagccgctgttacgtcggctgtccggcatcaaagagatcgccacgatgccggaggcggatctcgcgaaaatcatcgcggccgacccatggtttcaggcccatggcgcgaggagcgcacgtcattggcgccatcagacaagagtgcgggaaatgaccccacggtgggaggggttacccattctggctaccgaaggcgacctctgcctgtggctagggggtttgaggcccgcagagcttcactggctcgcccaaacagagcgcggagatcacgacccagccggcaagttggcccactacgtccaccgatggattccaaggcggcatggcgcaccccctcgattactggcatcccctaaacccctgctcaagtcactgcaaagaaaaatcctgcgggacctgctcgatcacctgcctctgcacgaagccgcccatgggtttcggaggggtaggagcataagatctttcgcccacccccacacggctaccgactgtgtgctccggctggatctggcagattttttccccagcatccgtttcgggcgagtcgcagccctgttcgagactgctggttatccgtcacccgttgctcggctgcttgctggcctgtgctgccacagcgcacctagggctgtggtgagatccgctggcctacctcgagccctcgctgatagactcttgcgaccccatcttcctcagggcgcacctactagcccggccttatctaatgctgttgccttcagactcgacaggcggttagctggactagcggcagcggcaggagctcagtacactagatacgccgacgacttggcattttccgggggccgcgatctttggcgaggtgctacaagattcttggaccgcgccaccgcaattgttctggacgaggggtttgaggtgaacttcagaaagataagggtaatgcccgcctgtgctcgccaaaggatagccggcgtcgtggtcaacgagaagaccaacaccgtgcgcgagacatatgacgcactcaaggcagccctacaccgttgggagacacgcggcctcccagaagacgatgccctttttcctgaacgccttctgggacggattagtgcgctggctcagttgaatccagaaaagggagccaaactgcggcagcgctatgatagagtaagagagggaagtggattccatgaaatgggatcgcccccaacttctggggggctcttgtga

SEQ ID NO: 12518 - RNA, 1041 nt, synthetic construct
  source 1..1041: mol_type = other RNA
ccccatccggctgtgatgacagctcgatgggaaggtctgcccctcctcccctcgctgagcgatcttgccgactggctggagatcgcgtccctgagcgagctccactggcttgcgggcattgatagaggacgggaagcacctccatccagagctgtgcactacacttatcggtggatcctcagaaagaatgggtcacctccacggctgcttgagtgcccaaaacctaagctgaaggcgattcagcgcaagatcctaagacagatccttgataaggtccctctgcacgatgccgcccatggattccgtcttcgccggagcataaggaccttcgccgtaccccacacaggacgcgaatgtgttctacgagccgacctggctgacttcttcccatcaatcaggtttgggagggtggccgctttttttgagacgagtggctaccccgcatccgtggctaggttgttagccggcctctgttgccatgcaccctctaaaaggggcattcgggcagccaagctgtctccattctcagccgccaaatggctgcgtcctcacttgccgcaaggcgctcccactagccctgcgttatctaatgcaatcgcattcaggcttgatcgccggttgagtggtctggcacaagcctccggggcccattataccagatacgccgacgacctggcatttagcggcggaagtgatctgtcacgaggtgctgatcgatttctcgccctcgtcgctaccattgccctggaggaaggattagaactgaactatagaaagtccagggtgatgcccgcatgcagcagacagcggatagctggggtcgttgtgaacgaaaccccaaacacgactcgcgcaatcttcgatgagctaaaagcgtgcctgcacagatgggagacaaagggcttcgacgcatgtgctgctgacgacccagagttttctgaccgcttgctgggacggattgccgccttggcccatctcaatcctaggaaaggtgagaaattgcgacagcgctttgaaagactcaggggggctcgtcagtga

SEQ ID NO: 12519 - RNA, 1155 nt, synthetic construct
  source 1..1155: mol_type = other RNA
atgaccactgccatccccaggctgcttgcacaggcattcctaaacggcaagctccagcgggctgggatgattaaaagaggagcggaactcctgggccagaaatggaagtggcttggcccgctggccacaaggttcctgaaagagttcgggggcgctaaaccacgcttaggcgacgccgtccgattcctgcgacacgacgaagggctgtgcgttgcgcgtgctgggttacggatagctaaatggactccatctaacggggtggctgcaatgcggtggaagttaccagaaatggagtctcctgcagcattggccgaatggctgggcctgacagacgcagaggtggcctggtttgccgaccgcaaaaatatcaataagggtaaaagttcccactacacatattgcgtgtttgaaaagcccggaaagccagcccggctgattgaagcccccaaaacacgaatgaaggagctcttgcgccggctgctaacggacgtatttgagaagatccctgttcatgctgcggcccacggattcgttgcccgccattcaattaagactttcgcagccccccacgctggacaaccatgtctgctcaagatggatctggcaaacttctttccctcgattagccgggccagggttgaatccctcctcatcacagcagggtatgatgagagagtcgctgagctcctggctgggatttgtaccaaccgcgccccacgtgatgtagcaccggatcccatttataccaggcctcatctgcctcagggcgctcctactagccctgccatcgcgaatctttgtatgtttagagccgatcgtcgactgcgaggacttgccgagagtgctggagccgtctacacccggtacgccgacgacttggcatttagcggcgcttctgtgggtgacaggagtgcgttgaggatcgtcaggagaacccaccttagaatcgtgcggagaacccaggcagccgagccagtgaagcatgagagccctaggttgagacattcccgcgctggcagacccgtgcaatgctcctcaatgcgcacggattcacaccagatagctatcaggataattcgcgtgtttggttgctgcggatgtgccgtgtgggtcttccacgatgacagacaacccccgcagcggatcatgggttga

SEQ ID NO: 12520 - RNA, 1323 nt, synthetic construct
  source 1..1323: mol_type = other RNA
atggccacccatagacatattgcaaaggtgatagcggggactgctgccgctggtcaactgaccgaggatgagatagttgccagggtcgccggcgtcctgggaaagagatggcgctggttgcggccacttgcacggaggatggaggagagatttgccggtcggaccagaccgagagagagcgctgtgcacaggtggatcatcgcagatgacggatttcaccgcgcatgtcgacagcatgcgatagttatcgtagaagaactgccgcatcgcccagaaatgcggcccccaaccggcatcgctatgacctggaacgtgcccacaattactacagtctacgacctggctcactgggccgacctcccactcgacgaactggagtggctggcagaccggcgaggcagagaaccttctgccgaggctaaataccggagatatcgatatagagtgttaagcaagggccagtctcggttccgcctcattgagacacctatctacaggctgaaattactgcagcgacacctgctttctggcatcttggaccatttgagccctcacgacgcagcccatggattcagaaaggggaggagcatccatacctttgcagacaatcacctcggaagacaagtggtgctcaaaatggaccttcgggattgtttcaccactattgacttcggcagggtttcccatctgtttcgccttgcggggtacccggaacgcgtagcagatactctcgccgccattacgacaaatacagtgcccgatcaagtttgggaggctgctagcggcgcgcatgtgttttgccccagtgaacgcctgccttcaatctatgcttccccccaccttccacaaggggctcctacttcaccagccatagccaacttgtgcctgtacaagcttgatctccgtctgacaggactggcgaaagcatgcggcgcctcatattcccgctacgccgatgatctggctttctccggggacgcagatttcgccaggtgtgtgcagagggtacgacaccatatcgccgctatcattcaggaagagggattcgaagtcaatcacagaaagacgcgtgtgatgcgcgccagtactcggcagcgtattacgggtattgtggtgaatcagcaccggaacatacccaggagggagtatgatcagctaaaggctatcttgcacaactgcatttctcggggcctccagtcgcagaatcgtgataaacacaccgactacagagcccacctagcagggcgcgtcgcctttgtcgaggccgtttcccctagtaggggtcagcgattaagggacatgctgaaccagatcgatccctga

SEQ ID NO: 12521 - RNA, 1347 nt, synthetic construct
  source 1..1347: mol_type = other RNA
atgaaacgcgtcgcggagtggttcgcggtgcttttctccagagctgcaacaatcggcgagatgaagggcgctgctgctaggctgatcgggggacagccacgttgggttgccccaatgctccggcgtgctgaagccgatgcccaagtgagggacccccctagtgagttggtgggactcagcttccagtcttggatgcactggttgttgcatgaccgaggcttcctcgcacgcgtgtctgatccttttgcggccattcaccgcgggccggctgaatcaatgatgttgcctgccgccgcagctatggattggcccgttccccagatccttaccgtaggggacttagctcattggcttgatatctccccagccgagctgcactggttagccaatctggatgctagttggaagttgaccggacgcgagggacgacattatcagagagtcgcacatcagaaaaggtttggggaagtccgcataattgaagccccgcggtatcgcctgaaagtggttcagcgacgaattctgcatggtctactgaatagaattcccgctcacgacgctgcccacggtttcgtggcaggacgatctacccggacttttgcagagatgcacgcccggagccgcatggtgctgagaatagacctccggaacttttttgtgacaatcagacgcttccaaatcgccggcgtgttcgcactggcgggttatccagctgatgtggcctacgtgctcagccgcctgtgctcagctcaaatgtccgtccaggaatttagcgacctcgttggcagccccctcgagtttcggagggccagtggtgccccatcacttgcgcaaaccagaaggctgtacactagacctcacctgccccaaggcgcacctacatccccgatgctggcaaacctgtgcgtttaccggctggattgtaggctgtctggacttgccgccgcagtaggcggtcggtatagcaggtacgctgacgacctagccttctcggcagacctcgacgtgcggcagtccaagcgtctgtgtacccagatagccgccattgtgatcgaggaggggttccaggtacatgatcggaaaacaaagaggatgaggagagggacgaggcagcgcattgccggagtggtcattaacgagcatcccaatgtcactcggcagcaatacgaccagttaaaggcgatccttcacaactgtgcacgatacggccctgaatcacagaatagagatcagtgcgcagattttagagcccacctggaagggagggtcgctcacgtagggatgctaaacccaacgaggggcgcaaagctcaaacgtttgctgcagcagatcgactggggcagatga

SEQ ID NO: 12522 - RNA, 1017 nt, synthetic construct
  source 1..1017: mol_type = other RNA
atgaagttccctgtccctaagattaggaccctgctgcagctggccaatctcttggagatcgaaccggaacagctgcgctggttagcaaacccttgtggtaggagaagtgctcccgacagctggagccgccactatcgatcacactggattagaaaacgaagtggcggctggcgcttgattgaggcgcctagatcccgactgcggtacgtccagcgcatcctgctggacacaatctttaacgccatgcccccacatgtccttgccttcggcttctgcaggaaccggtcagtgatagacttcgtgaaaccccacgtaggaaaggacgtctgttggaggtttgatctcaccgattttttcacgtcggtgactacagggcgggttgcagggcttctgcgcaatagcggttacccctgcgatgtagcgaatagcattgcgatgctcaccacagtgcaaacttccccgcggatcctatccgtggagcatccaagggccacattttcagtccagtcccccaagcatctccgtcggcacctgcctcagggtgctccaaccagtcccgccatagctaatttatgtgcctatcggcttgacgcacgtctgtctggcttggctcggagcgtgggaggtgtgtgctatagccgatacgccgatgacatcctgttctccggcgattctgaccttgcccgccaatcaggacgtctccgagcccatgttggagcaattgctatcgaagaggggttcgagatcaattacagaaaaaccaggctagcacgcgcttctcagcggcagtttgctgccggaattgtgcttaatgagaagctcaacgttccaagagaaaactttgatcgcttgaaggccatactgcacaattgcgtgaggagtgggccaacttctcaaaacagagacaaccaccctgcattcagacagcatctcgaagggagagtgcagtgggttgagatgttgaacaggggccggggcgagaaactgaggaaattactggaaagaatcgagtggtga

SEQ ID NO: 12523 - RNA, 1338 nt, synthetic construct
  source 1..1338: mol_type = other RNA
atggcaacgcagagattcgttgcggactatctcgctagtgcatttgtgtgcggccggtgggagtgcgatgacctggttgatcgcggcgcagacgctcttggtaggaggtggagatggttaagacccctggcccaacgtgccctccacactttgggccatgataggcgcccttcccgtttccaggtcctgcgctttctgcgccaggatgagggcttgagacgcgcttgccacaagcacgatgtgcgtgtcggcgggctccagagaaaaccacccgaaatggccccaactgccggacacccagtaaactgggacgttcctcctttagtgaccgtgggagagcttgctgactggctggatctcaagctaacagaactggattggttcgccgaccgacggggacttgagaggaaagtgccgagaggcccactgagacactatcgctattactggctctctaaaagaataggtgggagcgccaggttgatcgagtccccgaaacagcgtctgaaggctattcagaggtgcatcctccacgaaatactggaccggatccctccgcatgaagcagcccacggcttttgccgcggccgttctatcagaagctttgtggcacctcatgctgggcagtccatcgtgctccgggccgatctgagagactttttcccttgtatccccaggcggcgagttgcaggcgtttttcgaacagccgggtacccagaggaagtctcacagtgccttgctgcactgggtaccaatgaagtgcccgacgacgtatggcgaagcttcccacaatatggaaacgtggccgaccggtggaggcatcagaggctctacgggcagccacatcttccccagggtaccgcaacatcacccgccattgccaatctctgtagttacagacttgattgtcggctggccggtttagcccggtcattcaggggacggtacacacgctacgcggacgacctactgtttagtggaggccgagtgctggctcggtctattggcaagttccaccgggtagtgtatgcgatcgcgatggatgagggattcgagataaaccctaggaagactcgcattatgcgccaaggggtcaggcaatgtgcggctggtctgaccgtcaatcggcatcccaacatccccagggacgagtttgatcgattgaaggctattttgtacaactgtgcaagacggggacctgggaatgagaaccacgcccgcctgccagagttccgcctacacttggatgggcatgtgagcttcgtcgaatccgtcaatcctgcccgaggccagaaactgagatcgctgtttgaaaggattcaatggcccgctacctga

SEQ ID NO: 12524 - RNA, 1338 nt, synthetic construct
  source 1..1338: mol_type = other RNA
atggtgaaccaggaccttgtggcaagcgctctggccgcagcctttgtcgggggtagatggcaggttgacgaactggtagcccgtggagctcgcgctttgggtcgcagatggagttggctgaggccccttgccagcaggctcttacacgtgctgggagaggacagtctgcccagcagatcccaaatcgaacggttcttgctccaggacgccggctttcagagagcctgtttagagcacgctataagggtgggcggaccaggtcggaattaccccatgatgtctccagctgcgggcagtcctgcctcttggggagtccctcccttagtgacagtgggtgagcttgctaaatggcttgggctagaaggcaagcagttggattggtttgcagatcgcaggtctttggagcgaaccacccctgccggacctttgcgacactataaatactactggctgagcaagcggttaggagggtcggcacggctggttgaagcaccgaagtggaggctgaaaatgctacagaggagagtgctgcgtggcattctggataatatccctccccatgccgcggcacacggtttttggcgcggacgatccattcgctcatttgcggctgcccacgtaggacaggctgtcgtgctgaggatggacctgaaggacttctttccatccatcgccaaggcccggattgttgcagtcttccggaccgcaggctatcccgaagatgtgtgccaactcctcgctgccctctgtacaaaccacgtgcccgacgacgtgtggcaacgcttcccgcagtatgggggggctgccgatagatggagacatgagggcctgtatgcaaggccacatctcccacagggtacgcctaccagccctgccctcgcaaatctatgtgcctatcgcctggattgcaggttgacagggctcgcccatgccgtaggagggaaatacacacggtacgctgatgacctgttgttctcaggcggcgaagcgcttgccagatctctgcgaaggttcgaggcgactgcttgttcagtgataatcgatgaggggttcgccgtcaacttccggaaaagaaggatcatgcggcagggggtgagacaacacgctaccggccttgtgctgaaccgccacgtcaatgttgcacgtgacgagtacgatcgtctgaaggcaactctccataactgcgtatgccagggcccaactgggcagaacaggggaggcgttcgtgactggcgcctccatctgcagggccgaatcgcttttgtcgagtccattaatccagaccggggccggcgacttagaagactgttcgatcggattcaatggccccgcgattga

SEQ ID NO: 12525 - RNA, 1344 nt, synthetic construct
  source 1..1344: mol_type = other RNA
atgagctcccggaagtcaattgcacgtaggctgactgtagcagtcctggcgggccgtttcggaaaggactctatactggaaagaaccctgccactgatacagggctcccccacatggctgaaacgatttgtggaccagttgatccggcggttcggcaatcagaggcctaagaggagctacgtccttgccttccttttgtcaaatagagagttcatcgacgccagtctgaacgaagactttgatgtgcagccatacttgcttccatccgagttttctccaagccctgggaatttcgaagccattgacgtcattcgactccggagcagcggtgaagttgcggcatggctcaagctgaatgagaacgaattatcctggttcgcagacagacaccagctcgaaagactctcaacggtcgggcctctgcgacactataggtacttttggaaacttaaacggcacgggagatgccggttgattgaggcccccaaatttcgcatgcgggagattcaacggaggctgctacgggagatcctcagcaggatccccgtgcataacgcagctcacgggttccgccggggtagaagtgccaattcccatgccgccccacatgtgggtagatcagtggttctgaaacttgatctggaagactttttcccttctgttcctcctatgagattgacacgactcctgatgcacaccggctaccccgaggatgtagcggagatcctgacagccctgtgttgcaatcacgtgccaagcgatgtgtttgactcttttccccatagggatgattggaagctgaggagacgcgccaaacaactatattgtaggccccacatcccccagggagctcccacttctcctgtgattgctaatttatgcgcataccgcttggacacccgactggctggtcttgcccagagtgctaacgcgacttatacgcggtatgctgacgacctgctgttttccggcgatgaccaattctcaagaggcattgataggtttagaatattagccgctgctatcgcaatggaagagggattcgcagtaaaccaccataagacccgtgtcatgaagcgttcgattaggcaagaggctgttggactagtgctcaacgaaaagatcaatactcgccgcgatgagttcgatcgacttaaagccacactgcaccgctgtatcctcaaggggccagaggctgtgaactgcggacagcatgcccactttcgccaacatctcataggccgcattcagcacatcgcccagagctcgcagagtcgccataccaagctcatggccttattcgaccagatcaactggtccgatccgcagtctccgagtacctga

SEQ ID NO: 12526 - RNA, 1326 nt, synthetic construct
  source 1..1326: mol_type = other RNA
atgaatacccccgaaagtgccgccaggagacttgccgtggccatactcgccggaaaattcgagaaggaagccatcttacagagaactctcccaataatctctggaagcatcacctggatgaagcgtctggtaaaccagatcatcaagcgcttcgggaatcaacggccaaggcgccgcgaccttgtcacatttcttctgcactcgcgcgggttgtctaacgcaagcgagcaagaggattttcaaattcgcgcctatgaccaggccgctgattttttaccatccccaggcctatttgaaaatgtcggggtcttgcctctcaggtccgtgggagagattggtgagtggttcggtttaggtgagtcagaactgctctggtttgccgaccggagacagctggaacgagtgctgccagacggccctctgaggcactatcgataccactggaaactgaaaagacatggaaaatgcaggctgatcgaagcacccaagttccgacttagagaaattcaacgcaagcttctccgtgaaattctgaaccagatcccagttcacaacgccgctcatgggttccgcaaaaaccggagcgctcagtcacacgctgctgcgcacgtgggcaaggctatcgttctcaaaatggacttggaggattttttcccctcaattgcacctgcacagttggtgcgtatcctgatgcacgtcggctatcccgaggacgtggctgaggttctgactgccctgtcctgtaatcacgtgccttacgaggtgttcagcagtttcccccacatggcagatggccggcagaagagacatgcccagcagttgtattgtcgaccccactttcctcaaggcgcaccgaccagcccggctattgccaacgtgtgcgcctttcgtatggacagacgactcgccggactggcaaggtctgctaacgcggtgtacaccaggtacgcggatgatctgctgttcagtggtgacgaaaagtttgcgcggtcaataaatcatttcaggatctccgtcgccgcaattgcaatagaggaggggttcacaatcaaccatcataaaactagggtaatgaagcgaagtgtccggcaggaagctgtgggcctcgtgctcaacgagaagttaaatacgcggcgggatgagttcgacagattgaaggctattctacatagatgcgtactgagggggcctgccgctgttaatgaaggacgccatgccgatctgcggagccaccttcggggcagaatccagtacgttgcacagacaaatcagggcaggcacgcgaaactatctcgcctgtttgagcagattgactggtccgattga

SEQ ID NO: 12527 - RNA, 1440 nt, synthetic construct
  source 1..1440: mol_type = other RNA
atgtcagtggcgagattcatcgcgcgagcaacacttagatggcgcgccgatcccctcacccataacgggactcgatggtccacagtgcccctgagcaccctgatggagttcgctaatcaggtcgcccgccaacttgccatcgccattcaacagggacggattgaagaggaagctttggtccaacgcatccgcgaacactgcctgggacggcagaggtggttacgcagctttgccaggcgctttgtggctcacttcggtgaggggcgacggtggagacgactaaggatggagcggtttatcctaaaagacgcaggcttcagacgagccgtcgccatgagccagctgtctctcaggagtggcataaatccagccccaggcatgtgtcctgcagcaggagccccggagcactggaagcttcccgagctcgctaccacaggtgatctggcccggtggctgaatctggagcccggagagctggcctggttctcggactccagaacccaggaacagacgctgccagaaggccctttgaggcactatagataccattgggtgctgaagaggggtggcagtgctcggctgttagaatgtcccaaacaacgtctgaagctttttcaacggcatgtgttattccagctcttaaatcggattcctattcacccagctgcacatggcttccaggcaggaagaagcgtacagtctttcgcccagccccatgtcggccgggaaatagtgatgaggctcgatctgcaggacttcttcccctctgttatgaagagccgcgtgctggccatttttctcactgctgggtacccagaacccgtagcggccatgctggctggattgtgcaccaacgctagtcctttcgccgttctcagttcctgtccggccacggtacacccaacccagagatgccaccttaaggatttgtaccgccgtcctcatctgccacagggtgctcctactagcgccgctctggccaacctggctgcctttcgtttggacctccggctgcacggcctggctaaagctgcaggagctgcctatacacggtatgcggacgatcttgtgttttccggggactcagcgtttgcaagaatggtcgagaggttttatatccaggtttgtgccatcgcacttgaggagggatttgcggtgcagactagaaaaaccaggatgatgcgtaggtctgtttcccagagggcagtgggcctcgtcctcaacgatcgactgaacacacctcgcagggaattcgactgcctaaaagctatcttgcacaattgcgtggtgcaaggggttgcagcacagaaccgtgcagatcatccacgctttaaggagcacttggccgggcgaatagcctacatggagtcaatcaatccgggccgcgggattcggttaagaagagatttcgacaggattatctggcctgaccccacttga

SEQ ID NO: 12528 - RNA, 1329 nt, synthetic construct
  source 1..1329: mol_type = other RNA
atgagactcgccgcaaagatcgcccatgccctcgcgacagccattctgaacggcactctcacaaccgaaggggtttacaagaggggtgcggccgttttaggctgcagatgggcctggcttcgcccactagctaagcgcatcatagcacattttggcgaggggacaaggccccgggtgtttcgtctggaaaggtttattctggccaacggcggcttcctaaaggcttgcgagaaacaccagctgacgctgcggcccgatgcccatttcgaacccgctatgtgtcctgcagctggtccacccaggaggtggaaggtccctagaattaggactcccggggaattggccagatggttgggggtggagttcaaccaacttctgtggctggctgattgccgcacacaggaacagaaactgcctccaggccctttgagacactactgctatcactggcaaccgaagcgagatagtagcgcgcggcttatcgaatcaccaaaaccgaggttaaaaaccattcaacgccaggttttgcacgaaattctggaccgcattcctccacacgccgctgcccatggtttcagagccggaagaagcatacgctcctttgtgaaaccgcatgtgaagcgggaggtagttttgaagctcgatctgaaggacttctttccacggatagccagggcacgggtactggcaatattcctgacggccggctatcccgaagcagtcgccgaactgctcaccggactctgtaccaattctgtcccttccgaggtgatcaaagcttgtccagcagccaccaacccccttagggcacgagaggctaagcagctctaccaaagaccccatctgccgcagggagctccaacctcccctgcattggccaaccttgccgcataccgactggactgtcggcttgcgggcttagctaaagcagccggtgccaggtatacaagatatgcagacgatctggtgttcagcgggggaaaacccttcgctcgtatggtggaccgtttttacatccaggcctgcgccatcgccctagaggaaggcttcgaggtgcacactagaaagactaagattatgcggcgttctctctcacagcgagctgctggcatcgtgcttaatgaacaccccaacgtccctcgccgggagttcgacagactcaaagctgtcctgcacaattgtgtcgtgcatgggccagcgagtcagaatcgggacggagtggctgattttcgggcccacttagcgggacgcgtagctcacgttgaggtgatcaatcctgcacgagggcgaaagctgagggagggatttgagcgcatcgagtgggagtga

SEQ ID NO: 12529 - RNA, 1161 nt, synthetic construct
  source 1..1161: mol_type = other RNA
tcgcgtactgctctcaccagattcattctcggaaatgctgggttccaggctgtttgcgaagaggaccctgatctgagcctgagtggctcacggcactttgttccagcgatgactcctcagaactcccgtgctgcatcttggcccgtgccaccacttgtggccctacagcagctggctgactggctgggcatcacgcctggcgagttggcctggttcggagacttgaatagcttgcaacgctccgtgccgaacggaccgttgtgccattatgggtaccactggattagaaaaaggggcggttctttccgcctagtggaatcaccaaaagctcgactgaaacagctgcagcggaaggtgctgcacgagctggtcgataaaatacccccccatgacagtactcacggtttcagacagggcaggagcatctgcagctttgtaaaaccccacgtaggcaaacgggtcattctcaagatggacttgcaggactttttcccttccatcaccaggtggagggtcaccggcatcttcctttatgccgggtatccagaggaggtcgcaaggctccttgcagggatatgtaccaacgaggcccccccgcaagtcttaaggagcctccctgcatgtgaacggcaaagggcctggcagctggaatccctgtaccagataccccacctccctcagggagcaccaacatcaccaggcctggctaatttatgtgcctacaagctggattcacggcttgccggactagcaagagcagccggagggacgtacacacgctatgccgatgatctgctgttttccggtgacgatgcctttgcgaggtctgtgaagagattttacatccatgccgcggccattgtgcttgaagaggattttaccatcaatttccataagacacgcattcagggacagtctgtgcgacagcgagccgctggcctcgttatcaacagtcacgccaatatccaacgcgacagctttgacaatttaaaggcgacactgcacaacgcagcccgttttgggcctgcaggccaaaacagagggggcgtggcagatttccgggctcatctgggtggtcgcattgccttcgtggaaatggtttgcccccccagaggggaaaagctccggcgaattttcgagcagatcgcttgggagggatga

SEQ ID NO: 12530 - RNA, 1356 nt, synthetic construct
  source 1..1356: mol_type = other RNA
atggaacggcccccactgtcctcctccagctttcataggctgaggcgctactgcctcattctcgcgcgcgcattccttgctggtccctgggagagacagggactggtcgagcgtggtcgcgcaacggtccaacggaaagctaaatggttggactctgccgctaagcgtgcaatggaggcctttccaacctgtgccgctctgcgagaggctaggttggcggatcatctagcgggcgacccagacgtgcttaaggctgcgactagcggccgagttccccttcgcccacaagctcttgtcgacctgaggcctgagatgaggcctcctcccggaccgtctgctgcatggagcgttcccgctatcgcaaccccagcggagcttgccgccttctgcgatgtgagcccggttcagctggagggattagccgattgtcaggggcgggaaagacggacacctcgggaacccctgcgaaattaccgttaccgcgctttccccaaagcatcaggtggctttcggattatcgaggcccctaaacccagactccgccggatgcagaggctcctgttggatgaaattctggccaaaatccctgctcacgaagccgcacacgggtttaggccagggcgctctgtgatgagtttcgtagagcgacacgtgggaagacatgtggtattaaagatggatctggcggacttttttccctcgattaccgccgctagagtgctagccatcttcatgaccgcaggctatcccgaggacgtggcaaagctgttagccggcttgtgtacaaacgccgtcccgatgcacctggagaggcttctcggggggacaccagtgggagactggcgatccaggaagctgctggctggcccacatcttccccaaggagcgcctacaagtcctgccctcgcaaacctggccgcatatcgcctggatttgaggctcgatgcattggccagatccgccggtgcccattacactcggtacgccgacgacatggtgttcagcggagacgaatctttcgctcgatcagcaggccgcttcgccctcagtgtatcagccatcgcactggaggaaggcctcgctgtgcgaaaccggaagactcgggtgatgagaagaggcgtccgccagagagctgcagggattgtcctgaacgaaaggcctaaaataccaagggatgactatgataagctgaaggccacgctccacaattgcctacggcatggcccggccggacagaatagagatgggcacatggacttccgggcccacctgttgggcagaatcgcctatgttgctcgtatccaccctggtagaggggaacgcttaatgaggagttttgatcgtataacctggtga

SEQ ID NO: 12531 - RNA, 1326 nt, synthetic construct
  source 1..1326: mol_type = other RNA
atgagcagttcccgccatccccacagaaggtttgcgttggtgcttgcacgtgccttcctggccggtccctgggaacacccagagctggtggggagaggccgaacagccatcgggagaaaggggcgatggctggacgcagttgctaggcgcctgctggtcgcctttccttcacctgctgccttacgggcccgatggatcgcagaccatctgctggccgatccacagtttcttaaggccatagggaaagctagagtgccactccgtgcagagctgtcaccagtgatgaggccggctccaggagaaccagcctcttggctagtgcccgccattaccacccccgctgaactggctgcattctgcggcgtcacaattacccagctagagggactcgccgattgccaggggagggagaagaaagcccggagggagcctctccggaattatcggtaccgcgtcgttgcgaaacccagtggcggcagtcgcctcgtggaaagccctaagcctcggcttaaagcaatccagcggaggcttctcgacgagatcgtagcccgcataccaccgcacgacgctgcccatggctttagaccgggacggagcgtgtcatcatttgtcgccgggcatgccgggcgacacatagtgctgagaatggacctggcagacttcttcccttcgataactagcgcccgtgtcgaggccatctttatgactgccggctaccccgaagacgtggctaggctgctcgctggactgtgtacaaacgtggtacccaggcacttggaagacggggatggcgctgatcgggctacgggatggcattctagaagactgctggcggaaccccatttgccacaaggagccccatcctctcctgcattagccaacctggccgcccaccacttggacgtgcgactagacgcactggctagagcagcaggtgcgcgctatactcgttacgccgatgatcttgtgttctctggagatgatgctttcgctcgcagcgtccgccgcttctccattcacgttgcagcgattacattagaggagggttttgcagttcgacaccggaaaacccgtatcatgcgaaggggtgtacgccagagagcagcgggcattatgttgaatgtcaggcccaatatccccagggaagactatgatgccctcaaggctattcttcacaactgtgcgcggcatggccctgagggacagaacagggccggtgtttccgatttcagagctcatttgctcggcagaattgcttacgtgtccggcatccaccctcaaaggggtgcacgcctcaagcggaccttcgaccggatcgcatggtga

SEQ ID NO: 12532 - RNA, 1350 nt, synthetic construct
  source 1..1350: mol_type = other RNA
atgggtcggcctccactcctgagtacccaaaatgccgagttcatcgtgcgcgagcttgctaacgcattcgtggagggcgtgtgggatctggacggtctagttgctagaggggaacagactctggggagacgtccgaggtggctcagacacctcgctaggcgcttattagccgcctttaacgatggtaggcgtccaccggcagctcagatcgcaagattcatccacaatgatagagggtttgatcgggtcagggagaggtatgaactgacaatggagtggtccaggaggcctccccctgtaatgtcgccaggaccaggagaaccagaaagttggcccgtgcctgcaattgtgactccagaagacttggcagaacggctgggtctgaccagatctgagctggattggttcgctgattcacaggctcgcgaaggccgcggatctccagagaaactgcggcactatcactaccgatggcaggccaagcggagtggatccgctaggctgattgaggcccccaagcctaggctcaaagcgattcaacgcaggttgctggacgagatagtcgccatggtacccccccatgacgctgcccatgggtttcgacttgggcgatccgtgcggacatacgtcgagccacacatcggccggacaattgtcctgaagatggaccttcgagacttttttccgtctatttctgctgcctggatcaccgccctgttcctcactgcaggctaccccgagccagttgcacggcttctcagcgggttctgcacaaacagcgtcccccctgacatttgggccgaccccagatgtcccatccaaggccccgagcactggcgtctcagacgtttacaccgacagactcatctacctcagggagcacctacctccccggcaatcgccaatttgtgcgcctatcgactggattgtcggctgcaggctctcgccacgtcagtggaggctcggtacacccgctacgcggatgaccttgctttcagcggggatcaacgattggccagggccgtcgaacgcttccagacccaggtaggcgccatcgcgctggaagagggctttgtggtgcagcatcgcaaaacaagagctatgagacaggccgttcgccaacgggttgcaggcgttgtgctgaatgtgcgccctaatgtccctcggccagactatgatagactaaaggccacgttgactaactgcataaagcagtcaccccagagccagaatagagacggacacgcagactttcaagcacatcttaggggcagaatagcgtacgtggccgcgttgaaccccaaccgcggacagaggctgcgtgctctcttcgaacagattgcctggtga

SEQ ID NO: 12533 - RNA, 1338 nt, synthetic construct
  source 1..1338: mol_type = other RNA
atggtactgtcagcaagcagccttccgctgcgtctggcacgcaccttactcagtcggcccttcacatggcaggccgtcgaagaggcactcgttgatgctagggggggaccagaccccggcttgactagattggtgaccgtgctgttactgcgactgcgcgctctgcgcacacgagcaaggtctagggccgcactgcatgagctggtggactatctcgataactctcggcgggtcgaaagactatttggggaggtcggcccggaactagcagaacttcccccgccaaccatgctgccccttccaggtgcccccaaacgatggcaggtgcctgccattacgaccgtggcccagctcgcggattggctcagagtgcagcctgacgaactgctggctctggcctgcagatggcggcaggatagagagcatagagatgatcggctgcaacactaccaccgtaggtggcttccacgcaggggaggtcctcccagattgttggaggctcccaaggcccggctgaaagcggtgcagcgtcgcattcttaccggcatcctcaatgctgcccccccacatagagccgcacatggtttcgtacgaggacgtggggtaggcacttttgccgctgctcatgttggagctgcgtgcgtcctcagactcgacgtggctgatttcttcgcatccgttcgcggagcacgagtcaggggggtatttttggcgatgggttacccaatagatgtcgccgagctgctggcatgcctgtgtactacccgcacgcctgatcgtgtgtgtcatcggggcctgcacgacttcggcacagtaggcgcagtgctggccacacgattgagggccaggcacctacctcaaggtgcccccacttcccctgccctggctaacctggtggcgttccacctagacgcccgccttactggattggctcggaggtttggggcacggtatagcagatacgccgacgacctactcttcagtggagtgggtgccttcgtgagaggcgcaaaccgcttagccgtgtatgtcgccgccgtgttattgcaggaagggtttgcagcggcccaccgcaagacacgcagaatgcctcagggagtggctcagcatgcggctggcctcgttctgaacgtccacggggctgttccacggcgagagagggagaggctcgaagctgtcctggttaattgtgtgcgccacggccctgcctcacaaaatagagtcgggcgggtggactttgaggctcatctcagaggccggatcgcccacgttgagcaccaccatgcaccacacgccgctaggctttggaggtggtttgaccggatcgtgtgggaatga

SEQ ID NO: 12534 - RNA, 1320 nt, synthetic construct
  source 1..1320: mol_type = other RNA
atgcccttatccgtcgagcagcacgcccgggatgtggctaggacgcttgtagctcgcccctttaccgcaccggctattgaggccgtcctggttgttgagtgtgggcgaccagatcctcggttggccaggctggctaaggctctggcgctacgctttggaggactgcgacggcccagagcacgcgaagtggcagattatctggtcagacgccgaagatacgccgagacagcggccgcatgtgagatgcagctgcaagacttgccaagaagatctatgctgcccttaccaggagccccagccacatggaaagtaccggctatcgtgacaaccaccgaactggccgccttcctgcgtgtcggtgctgaggaactcgcagcctggtgcaggaggtggcgaaggagtccgggcagacctgatcctagacacgagcactaccactgtcgttggctcccacggcatggtgccccaccacgtttgctagaagtgcccaagaccgcactgaagcgcgtgcagcgcaggatcctcaccggcattctgcaggctatacctccccatccggtcgcccatgggttcgtgagaggtcggggagttgcaacattcacagcgcagcacactgacagggactgcgtgttgcaactggacatcgaggatttctttggctcgatacaggaaaggcgtgtgagggccgtttttgtcgccgccgggtatccagtagatgtggcagcagcccttgcaagactctgcacaacccatacgcctccccgcgtcttagccgaactggtgagcaacgatagagcacggcggttggccacgcgcttagccatgacccatcttccccagggcgctcccacttctccagctctggccaaccttattgccttccggtgcgacctcagacttgccggtttggcgcgtaggtttggcggtgggtacactcggtatgctgacgaccttctgttctccggaggccccgagtttgccgctgatgctcgaaggtgtgcgactcacgcagcggccatcctggagactgaaggcttcgctgtggctcaccggaaaactagggttatgagacgtggagtagcacaacgagccggggggctcgtgctaaacagacatggagctgtgcctcgggctagcagagaaaggctggaggcaatcctcaccaattgtgttcggcacggccctgcgtcacagaatcgcgcaggggtggtggacttcgccgcacatctgcaaggcagggtcgctcacgtcgcccaccatcaccctcctcacggagtgcgcctcctacgactgctcgctcagattgactggtgccgctga

SEQ ID NO: 12535 - RNA, 1311 nt, synthetic construct
  source 1..1311: mol_type = other RNA
atgaatcggcctgacttggctgctgcccttgtcgcgaggagaatagtggctggcactattgaacccgccgcggtgacagaagcccttgtcgagactggtgggctgagattgaggcgcgcacggccacttgctcgccagattgttcgacagtttggtggagtgctgcggcctcgttggagggacgtcgcaaggctgctggctggcaaccgtatgttccggcgacaatgccgaggttcagctgcagccggagctgctgcacctcctaccatgcggccagctgctggagcaccccaacagtggcccgttcctcctctcacaacccctggcgagctagccgcatggttacgcctgagtcccgaggagctcctgttccttgctgccagatggagagagaggttaccgtcggagccccgcgtcaggcactatcactacgcctggcatccaagaagacacgggccccccaggctattggaagtcccgaaggccaggctcaagtgggttcagagaagaattctgagggggatcctcgatcacatcccgccacatgcagccgctcatggctttcgccgtgggtgtaatatccttagctacacttctacccatacagggcgggcatgcgtgttgcgcatggacgttcaggattttttcccctcccttcggagaggccggatcgtacgaattttcctgaccgccggctatccagaacctgtggccacactgctggccgatctgtgtaccaccgcgaccccagccgaagtgctcagaccactggccgctcccatatctgctcgggcagcacagctacgggtcgcactgagaagcagacacctgccccaaggagcccctacatccccagcgctcgccaacctgtgtgccttcggggttgatgcgcgcctggcaggattagccaggaggtttggcgctacctttactcggtacgctgacgatctcctgttctcaggcgatgccggattcgccaggtccgccagacggtgtgaggtacgcgtaggcgcgattctcttggaattaggcctgacggtggcccaccgtaaaactcgagtccttccacgcagtgtgtgccagagggctgcgggtctggtgctgaacgagcgacctgggttaccgcgtcgcgaacgggacaggcttaaagccatcctcacgaattgcgtgcgccacggtcccgcttctcagaacagagccaatctgccagactttgccgcacatctgcggggacgagtggcacacgcattggccacacatcctgctagcgcagcccgcctcctcgcattgtatgagaggatcgtgtggtga

SEQ ID NO: 12536 - RNA, 1320 nt, synthetic construct
  source 1..1320: mol_type = other RNA
atgagcttgctgtctagggacgtggactccctcgtcgatgcatttgtggctggagagtggaccgaacctagtatgctgcatcggtgtggagtgattgtcgacggcaaacctaagtggttgcctttcctgattcaacgagtattgaaacggttccccggtgtgcgcccaacaaggcgagccttaaccgatttcctctacgaggacagacgcttggccgccgcatcagagcggataacaacattaaccaatcacattaggatgaacagtgaattcgactgtcaacttacctcccttaaatcttctgtgcgacctacctggactactgttcggcagctggccgattggtttgatcttccggtcgaacacctgctgtggttcgcggacagctcccaaattggccgtcaacatccacacggccccctctgccattatcactatagatgggtagaaaagcgacgttcagggagacggctgatcgagtcacctaaaccaggcttaagacagatgcagcgcagactgctgaacgagtgtctccggcatctgcccgtgcatgatgcagctcacgggttctgcaagggaaggtcagtagacactttcgtgcagtcacatacgggtaggcaggttgttctcagaatggacctccagaattactttccctccctgaggccctttcgtcttatgcggttgcttatgctcgccggatatcccgaggtggttgcccgcactttaagtaacctgtgcaccaataccacaccaagctccgtcctgagagattactcgagcatctctctcagcaatagcgacagacatttgacagtgctgcttaggcagccacactttccacaaggcgcaccgacaagccctctgatcgcaaatctgctctcctataggctggatgctcgactgcagggtttagcccagagcgctgggattcactactcgaggtacgcagatgatcttctcttttccggcgacgagaggtttcgccgctgcgtcaaacagttccggatccatgtggccgcgatcgtgattgctgaaggcctcaacgttaaccaccggaagtctcgcatcatgctgcagagtcggcagcagcgtgctacgggtctagtcctgaatcagcacccggcggtgtcccgaagagactttgatctattgaaggccatactgcacaattgtattcgcttcggacctcagactcagaaccatagtgggatcgacaacttcaggatgcacctactggggcgcatccagcacatggccagataccatccctctagagctcagaagctaatgcactctttcgagcaaataaccttttga

SEQ ID NO: 12537 - RNA, 1305 nt, synthetic construct
  source 1..1305: mol_type = other RNA
atgaaggtgtctcacttggctgatgccatgcttgctggagtctgggtgcagcaggagattacggagagagtcctgcaggtagttaagactccgcggcgctgggttccctctttggtacggagaacaatcttagccttccccgaccatcgtccattgaggagcgtgctctgccagttcctgatgactgatgatagtcttcggtcaagggcatgcgacgacgaatttgaggtactggcatattcaggcaacgatgagtttgataaccatcgatttgatgactcggctcgcagaccagtgcgctggcagacatttggacaactggcagaatttctggacctggagatctcggagctctcttggcttgcagacctgcgaggtttacaacgaaccgcccctgacgggcctctgaaccattaccaccgaagatggcagctccgacgcagggctgtccctaggttaatcgaatcaccaaagccccgtctgaaaagcgttcagcgccggattctacagtgttgcctgagtaggctcccactgcacagcgccgctcacggatttcggaagggtcgctccgtgagtacgttcctccaacaccacgccggccagtcctgtgtggttcgactcgatctccatgacttctttgggtttcttagcccaatacggctgttgcgtctcctaatgatgtttggctattccgagagcgtcgccaggaccatcaccgcgatctgctctaccacaactccagaacataccatcgagcggatgccccagaatttcgtggataggagacaggctactaccctgcagcgtctgcggtcacgtcatttcccccaaggcgctcctacatcccctgccattgcgaatctgattgcatggaaactggaccaaagactgactggactcgcgaccaccttcggggccacgtactccagatacgcagatgacctgctgttttccggggacgaagatttcaggagacgggcgcagtggttcacaacatgtgtcgcagccgtggctatggacgagggttttgaagtccagcaccggaaaacccgcataatgacaaggagtgtgcggcaacaggcttgtggccttgtcctgaaccacagaccgactgtgagcaggagagaatacgacgtgttgaaggcaactttacacaacgccgtgaggttcggacccgagtctcagaatagaagccgccactctggcttccggcagcatctattggggaggattaattatgttcgccagtggaatcctgccagggccgtgagactcatggcccttttcgattccatccgctggtga

SEQ ID NO: 12538 - RNA, 1296 nt, synthetic construct
  source 1..1296: mol_type = other RNA
atgccatccaggatccaccacgcccgtcggttagctactgctctggccgcaggcagtatggcgaaccatgacgaactgattcatcgcgccgctcccctgatgggcgatattcggaaggcccggtggctgaaagcgcttgccagaaatctgtcacttgagttcgcagaggcgccaagaccgacgattaggaaaattacagaccgcatcctccacgatcctggattcacccgggcctggatcttagggaaggcccggatcggtattggtttcactcagcctgaaatggctcctgcaccaggaattgccgtggcatggggcgtgcccgcaatcacaacgctcgctgagctggcagatttgttacgtctccatcctgacgacctgggatggcttaccgccagaaattcatctgagcactataggtacaggtggcaaattaagccaaagtctggaagatacaggctgatcgaaagtccaaaggagttgctgaagggtgctcagcgcagggtactacggaaaatactgaacttaatcccgccccatgaagctgctcacggctttcgccctggcggatcaatccgaaactttgtcgaaccacactccggcaagcctatgctgctcaggtttgatctcgaagattttttccctagcataacctcgacacgaatctttcatattttcctgaccgctgggtatcccgagaacgtggctcaggcactgaccgcaatatgcactcatagcactccctcacagactatcggggagaaaccactcaatagccacgagagatctcgactaacaacccggcatctgccccagggcgcacctacatcccctgctctggccaacctgagcgcgtaccgcttggattgtcgattgcttggtctggcacagagtatcggggccacctacacaagatatgcggatgaccttcttttcagcggggaccagaagttcgctcgcaaatctaaaggactccaggccatgattgggggcataatcttggaggagcgattttccataaatcacagaaagacccgcgttctgaggcaggcccaaaagcagcacgccgcagggttgatccttaatcagaaaccgaacatcgaccgtagagagatcgatcaattgaaagccattctcactaactgcattaggtttggaccagagtcccaaaacagaaataatcatcccgactttgccgcccacctggctggcaaactcagctggatccgcttcattcagccccaaaaggccctcaagctggaaagtctattcgaacggatagactggcccgcctga

SEQ ID NO: 12539 - RNA, 1293 nt, synthetic construct
  source 1..1293: mol_type = other RNA
atgccttcacaagcccagcacgttcggcgactagccgcagcactcgctgctggacccatggatgaccgggaggctatgctggcacgtgtgaagcctctggtgggtgacctgcggaaggctagatggctggagccactggtgcggaacttaagtctggaattcggagaggcccccaggcccgctatccatcacgttgccgggaggattctagggcatccgccttttgtcaaggcctggatagccggacaaggacgcatcctgcctctccccgtcacgccacagatggctccggctatgggtgcccctagggattggcagatccccgccattactaacctcactgagctcgcagacgaattgcgccttcacggagatgacctggggtggttgatagcgcacgggcaggctgaccactacagacaccggtggcaggcaaaaccaaagagcggccgcttcagactcatcgagagccctaaaactctcctgaagtttgctcaacggcaggtgctcaggaggattcttgacgctattccaccccatgaagccgcccgaggcttcagacccggcaactcaatccgagatttcgttgaaccccacaccggaagagagctgctgctgcgctttgatctcgaggactttttcccttctttatgtgccgcgcgagtgctgcgtattttcctcaccgcagggtatccagaaaccgtagctcgtgccctgacccgccttacaacaagagcaaccccacattccaccctggaggagaaaacccttgcctgggccgagaggaggaggcttgcaacaccccatttgccgcagggagcaccaacgtccccagctctggccaatttaggcgcctttcggttggattgccgccttgcgggtttagctgaagcggcaggcgctcgctatacacgttacgccgacgacctgctatttagtggaggtgccgatttcgcacgccagtctagacggttcgagacagcagtgggcgccatcatattggaggaaggctttcgccccaatcatcacaagactagagtactgagacagggccaaaagcaacacgccgccggcctggtgctcaatgacaaaccaaacatcgaccggcgagactttgatagactgaaagccgtcttgactaattgcgtgcggcatggccctgcgagccagaacagggaccatcacgcggactttgccgctcacttgcaggggaaactggcatgggtcaggttcattcaccctggtaaagaagaaaagcttcaggggattttcgataagatcgattgggattga

SEQ ID NO: 12540 - RNA, 1356 nt, synthetic construct
  source 1..1356: mol_type = other RNA
atgacgcctaccgaggagcgctggatcgcatccctggccaaaatggctctcgctggagaatgggaagccgccgccttgcttgagcgaggacaagtatggctcgggtctaggcctaggtggtggctccggcttgtgcaccgcctattacgtcagttcggaccgggtacccgtcccaggctgtctagagtggaaagcttcctcaggcgggacccctggctacgtaaggttctgctcaagggagatttaaagggggatgcaaatcccccagaacctgttcagtgcgcggcaagagggcgccctgctacatggaagctgccttccttcactcgccccgtggagctggccagctggttacgtgtctccgtgggcgagttggagtggcttgctgatgcacagggttggcggtctggggaagcctgcgaaagactcgggcactatcactatcgctggctcagaaaacgggacggctcagcaagactgatagagtcccccaagcagcacctgaaactcattcagcgaggtctgcttgacgccgtcgtgagcgcaatacctgcgcacgaatcggcccatggattccagcctggaaggagtacactgacccacgtcgggccacatatcggtcgggaggtggtgctaaagtacgacttgcgggatttttttacacgagtaacgcgcccacgcgttcaggccgtctttcgaacagctggctacccagaggccgtggctgctttgttggcagccctgtgtacccacagaacccccgcgaggatctggaggcagttcccaggcttcgagactgatcctctgatccgagctcgggcccgtaattggcagtgtcctcatctgcctcagggcgctccgacctctccagctttagccaatcttgttgcgtacagactggactgcaggctagcagggcttgccaaagcagccggcgcgtcatacactcgctatgcagatgacctgttgtttagtggcggtagcgaacttgctagaggcgccgagcgctttgggatcatggttggcgccattgcactggaggagggcttcgaactgaacactagaaagacccgggtgctgagaaggggcgtagcacagagggctgtcggactggtgctgaatgataggatcaacgtgcccagggccgagtacgaccggctgaaagccattctccatcactgtgtccggcaagggccggcaggtcagaacagagaaggagtgcccgactttgctgcgcatctggccggacgagtggcttatgtcactcaaacaaacccacagagaggcgcccggctccaacagtggttggatcaaattgactggagtcgctcatccgaaagcgccgccgctacatga

SEQ ID NO: 12541 - RNA, 1338 nt, synthetic construct
  source 1..1338: mol_type = other RNA
atgcagactgcccgcgacgccgcgagaaccattgctcagctcctactctcaggcccgtttgatgagcctgcagtctgggaacgattgcgtcccttggctgggaggcgtcgctggttgagattttgtattcggcggatgctgacagcctggaaaggcactggacatccctcttcagcgtggatcatcgacttccttctaagtgatgcccgctttcaggctagttggccaacactccggacccctgaacccaggatgtcacccgctgcaggtgcaccattgcagtggccagttccatcgctcggcacacccgatgaggtagcgacctggctggcggtgagccacagagagctggaagctcgcgcagatacctggggcagggaagcaaggactcctgctgggccaatgcgcaacttcgattactcctggagagggaagcggtccggtgcagccagactcatcgaggcccctagaccccgtctcaggagcctgcagaggaaagtcctgcacggggtgctggatgcaattcccccacatgacgctgctcacggtttccggagggggaggtccgtggctaccttcacagccccgcatgtgggtaaacagattgtggtgcgcatggacctgcgcgactttttcgccagcattcacagagcgcagatccaagcgatttttgctacagccggctaccctccagccgtcgctaagctactggcggcactttgctggaacgctgcccctgacgatatttggttggatttccctggaacgttacccgacgaccttgggcggttaccggcagctagactgtatcgcaggcctcacttaccccagggagctccgacttctcccgccgtagccaacctgtgcgcctaccgtcttgattgcaggcttgccggtcttgccagatccgccggagctgcttataccaggtatgcagacgacctgctgttctcaggagacgcagattttgcccggacggctcggcgatttaccctgcatgtcgccgccatagcacgcgaagaggggttcgcagcccaccctaggaagaccaggctcatgcgacagggcgttcgacaattcgccgccggcgttgttctgaatgaacggcctaatgtgccacgacgggactacgagcggctcaaggccatcctgcaccgagcagccagaatcgggccaagtcccagcgccggagagacattgatgacttatcgtgcacgcctggctggaaaaatagcctgggtggcttctatctctccccggagaggcgagaagctgcaagcagtgtttgaacaaatcgattggggcagaccaaatgtcggccatagcctctgtgagtga

SEQ ID NO: 12542 - RNA, 1290 nt, synthetic construct
  source 1..1290: mol_type = other RNA
atgctgaaagcccgacacattgaatcactgacccggggagtggcagcagcgttactcgcaggaccgtgggaatgggaggccatgttggatagatctgctgacgctcttggcagacggtggcggtggaggagaggcctaataagggacatgctgttgcagcatccttcgcctgtagcctacgaagcactggtgcaggccatcgctgcgaacccccatttccgcggggctatcaacgatcggacgcgaccacatatcgtgcactggtttccatggccaacaggtatggcccccagatatccagcctggcatctccccgtcatcagttcagtcggtgctctagccgctctactcgacctgcctgaggagaagctgcactggctcgcagactgtgaacatcggcagggccggcccgacgaactgttacgtcgccattacagacactattggctgagaaaaccgtcaggcggatggcgcctggtggaggaaccacactaccttctcaaacaggcccagaggggcattttgcacggcgtcctggatcgtgtacccccccatcccgctgcctgtgcattcgtccataccagaagtgtcgtggactatgccgccccacatgttgggagggagttggttttgcacctcgacctgaaggagttcttcccttccattcctgcatctcgagtacacgccatgctgactaccctggggtaccccaccgaagtggctagactggtgacagggctgtgcacatccaccgttcccggctatatttgccgtcagaggccagggggtaaaatatacagcgctcctcacctccctcaaggcgcacctacaagtccagctttggccaatctcgccgcatatcggcttgacgggcgattagcgggtgccgcagcatccgttggagcatgctatactcgctacgctgatgatctcgctttttctggcgacgagccttttgcccgtagcgtgaatcgctttcaagccatggtctggaggatcgtagctgaggaggggtttgatatccatcatagaaagactagactgatgcacaagtccgtgcggcagcgcttatgcggactggtggtgaacgatcaccttagcatcgatcgcagggtgtacgatcggctcaaggcgattctgacgaattgtcttaggcacggtctggaatctcaaaaccgcgacggccacagcgatttccgagcgcacttgtgtggacgggtcgccttcgtggagcaggttaatccggccaggggagctaggcttcgcgaccttctgaagcaggtggcctga

SEQ ID NO: 12543 - RNA, 1440 nt, synthetic construct
  source 1..1440: mol_type = other RNA
atgaggcgcaaaagtgccggctgcgccctgaggaatgattgttcacgctccacctgtcacgtggattcaagtagccgtccgttcctggctatgcatgcctctcggttcgacacagcgagaatgatagctgaagctatgcttgccggacccccggaacggggtggaatgttagagagaatcaagaccgttttaggagcggccccatcctggagccatgaacttgtcgaccacgccattgcccactttgggactcactgggctgacgtggataccgacctgctcgcaagcgccctggccgataccagtgcttttatgatcgcctggtatgggcgcgataggcccgttgtgatgaggattgtcaggcgaccccccgtacagagactgctgccagcccgtcttgcaggagccgatgtgccacagtggcctacctgtggcgatcttgcacggtggctaggggttagcgcacccgagctggactggctgagcgagagatggagagtcgatgctcgtggtagcgggtcccctctgcatcactacacatatacaggctacgataagcgccggggcggatgtaggctcatcgaaattcctaagggtcggctccgggaggcccaaagacgcattcttcacggcttgctagatagaatccctccacatgatgcagcccatgggttccgcaaaggacggggcatcgtctccttcgctgctcctcacgccgacagggatgtggtcgtgcggttcgacttggccgacttcttcgtgtcggtgagagctgcaagggttcatgcgctgtttgtaacgctgggctacccagcagaggtggctaggacgctgacagcgctgtgcacaaaccgggttccatctgcacgcctgttggaggctgacctcagggatcggttcgactggaccggcagacagaggtatcgcaacaggcacctgcctcagggggcacctacttctccagctcttgccaacttgtgcgcctttagactcgacatgcgtttagcagcactcgctcgctctttggacgccacctatactcggtacgcggacgacctggccttttcaggaggcggtgccttggctcgagaagcaggtcgactgcaggtcagagtggccgccatcgctctcgaggaggggtttgcactgcagctccgtaaaactcgcgtgatgcgaagaggagtaagacaacagctagctggcgtcgtggtgaaccggcaccccaatctcgcgcgcgacgaattcgacgtgctgaaggcaattttgactaattgcatacgccacggacccgcgtcccaaaacagggcagctcatcccgactttcgagcatacctcgccggcagggtagctcatgctcgagcactgaatgccgctcgaggggccaagcttcacgccttatttgcccggatagcctgggatgggtgctcattcggcgcgtga

SEQ ID NO: 12544 - RNA, 1263 nt, synthetic construct
  source 1..1263: mol_type = other RNA
atgcacgctagtagatttgacactgctagaatgatcgctgaggcaatgttggctggaccgcccgagaggggaggtatgttagagcggatcacaactgtccttggggctgcacccagctggtcccacgagcttgccgagcatgccatagcccatttcgggactcactgggccgatgtcgacaccgacctgcttgccagtgccctcgccgatacttctgccttcatgatcgcctggtatggccgtgatagacccgttgtgatgagaattgtcagacgtccacctgtgcagcgaccacttccggcacgattggcaggggccgacgttcctcagtggcctacatgtggtgacctcgcacgatggttgggcgtgtcagcgcccgagctagactggctgtcggaaagatggcgggtagacgccagaggaagcgactctccactgcaccattacacatacaccgggtacgacaaacgccggggaggctgtcgcctgatcgaaaatcccaagggacgccttagagaggctcaacgtcgcatactgcatgggctgctggatcggattcctcctcacgatgcagcccacggcttccgcaaaggtcgtggcattgtgtctttcgccgctccacatgccgacagggacgtagtggtccggttcgacctggctgatttcttcgtgtccgtccgcgcagctagggttcacgcactgttcgtgactctcggttatccagccgaagttgcccggacactgaccgcgctgtgcacgaatcgagtgccctccgcccggcttctcgaagctgatctacgcgataggtttgattggaccggacggcagcggtatagaaaccggcatctgcctcaaggcgcacctacctccccagccttggcgaacctgtgtgcgtttcgcttggatatgaggctcgcaggcctcgcgcgctcattagatgcaacatacacgagatacgccgacgatctagcctttagcggcggcggggcattagctagggaagctggcaggcagcagctcgctggtgtagtggtgaacaggcatccaaacctggcccgagacgagttcgacgtcctcaaggccattctcaccaactgcatcagacacggacccgcaagtcagaatcgggctgcacaccccgactttcgcgcctatctggctgggagggtggcacatgcgagggctctgaataccgctaggggggccaagttgcacgcgctgtttgctcgaatcgcctgggatggatgcagctttggcgcctga

SEQ ID NO: 12545 - RNA, 1350 nt, synthetic construct
  source 1..1350: mol_type = other RNA
atgcatgctagcctcttcgatactgttcggaccatcgccgaggctatgttggcgggtgcaccagaaagaggtggagtcgtggaccggatcgcggcagttcttggagctgcacccccgtgggcacacgatgtatctgatgacgcactagcccgctttggggcgcaatgggcagacgtggacacagaccgccttgcaggcatgttagcagacgcccctgccttcctcaacgcttggtacggccctcaccggccagtcgtgatccgagtggtcaggcggccccctgtacagaggccacttcctccccgcttagccggttgcgacgttcccctgtggcccacatgtggcgacttggccgagtggctgggagtgtccactgccgaacttgattggttaagcgatcgttggagagtggacgcccgaagcgctgacacacctcttcaccattacacctacaccgggtatgataagcgtagtggaggctgcaggctgattgaaatgccgaaaggacggctccgggaggctcagaggcgtatcctgcacggcctgctggacagagtgccaccccatgacgccgcccatggtttcaggaaagcccgggggatagtttcctttgcggcgccacatgccgaccgcgatgtagtcgttcgattcgatctcgccgactttttcgtgtctgtgcgggcggcccgtgttcatgctttgtttgatacgttgggctaccctgtggacgtcgctcgcacactgactgcactgtgtacgaaccgggtgccgtctgcaaggctgctagctcccgatctccgggataggttcgactgggccgccaggcagcgctatagatatcggcacctgcctcaaggcgctcctacctcaccagccctggcaaatctctgtgcgtttcgctttgatatgagactcgctgccctcgctaggtcgttaggggctacatatactaggtacgccgatgatctcgctttctcaggaggcgacgtactggctcgtgacgccgagcgactggagagaagagtggcggctatagcactggacgaagggttcgcccttcagctgcgaaaaaccagagtgatgcgacggggaactcgccagcagctagctggggtcgtggtgaatcgccacccaaatttggctagagatgctttcgatctactcaaggccattctgaccaactgcatcaggcacggcccagccagtcaaaacagagccgcacacaccgactttcgcgcccacttggccggcagagtcgctcatgccgcagcactgaatcccgcaagaggggccaagctgcaggcactgtttgataggattacctgggacacatgctcccccggtgcctga

SEQ ID NO: 12546 - RNA, 1350 nt, synthetic construct
  source 1..1350: mol_type = other RNA
atgcactctagcctgagggacacaacacgcacgatagccgaggctatgctggccggcagtcctgagcgagacggagtggtggcacggatggctgcagttttgggcggagcacccgtgtgggctgacgaagtggccgatgcctccctcgctaggtttggagcccattgggccgacactgccatcgatgcccttgccgccgtcgtagctgaagcacccggatttgttcgggcttggtatggcgaccctcgtccggctgtgatcagggtagtcagacgccccccggtccaaagaccattacctgcccccttggccggttgtgaggtgccaccttgggcaaccccaggggatctcgcagattggctgggcgttagcgtgcccgcccttgattggttgtcggatcattggagggtcgatgctagatcaggggccaccccactccaccactatacctatgtggcagtcgataaacgaagcggaggctgtcgccttgtggaaattcctaaagggcgactgcgcgaagcccagaggcgtatcctccacgggctgctcgatagaatcgcaccccacggtgcggtccacggtttcagaaaaggccacggcattgtttctttcgcagctccccatgctgggcgcgatgtggtcgtgcgttttgacctggccgactttttcgtatctgtgcgggcggcacgcgtccatgctttgttcgctactctggggtacccggtggaggtagctcggactctgactgggttgtgcacaaacagggtgccctccgctagactgcttgccccagatctgcgggacagattcgactggattggccgacagaggtaccgcgaaagacaccttccccagggtgcccctacgtcaccagctctggcgaatctgtccgcctttagattcgatatgcgcttagcggcactggcccgaagtctggatgccacctacacccgttacgcagacgacctagccttctccggagggggagctctcgcacgtgacattgagcggctacagatccgggtggctgccatagccctagaggagggatttgccctccagctgcggaagacccgggttatgcggcgaggagccagacagcaattggccggcgtcgtggtgaacaggcacccaaatctcgctagggatgagtttgaccgcctgaaggctattctgacaaactgcatcagacacggccctgccagccagaatagggacgcgcatcctgacttccgggcacatcttgcaggtcgcgttgcccatgcggctgcgttaaacgctgccaggggcgcaaagctgagagcactcttcgaccggatcgcatgggacgcccatgatgcgggcaggtga

SEQ ID NO: 12547 - RNA, 1350 nt, synthetic construct
  source 1..1350: mol_type = other RNA
atgcacagctctctgagggacacaactaggaccatcgccgaggcaatgttggcgggacctcccgagcgtgatggtgtggtcgcccgaatggcagctgtcctcggagaggctcagccgtggactcccgagtgtgctggcactgccctggcaaggtttggcgcaaactgggccgacacggacacagacgctcttgcggctctgctggctgaagcaccagcctttgtgagagcttggagcggtgaaaggcggccagtggtgatccgcattgtccgccgccccttagttcagaggcccctaccagcacctcttgctgggtgcgatgtacctcagtggcccacccccggtgatctagcaggttggcttggagtgagcgctcctgagctcgactggttgagcgatcattggcgggtggacgcacgtagtggggctacacctctgcatcactatacatacgtggctgtagacaagcgcagtgggggctgccgactcgtcgagatccctaaagggcgtctgagggaggcgcagcgcagaatcctgcatgggctcctggaccgaatagctcctcacggggcggtacacggcttcaggaagggacatggcattgtgtcctttgccaccccacatgccgaccgcgatgtggtggtgcggttcgacctggctgacttcttcgtgtcggttagagcagcccgcgttcacgccctgttcgctaccctagggtacccggcagaagtcgctcggattctcactggattatgtaccaaccgggtgccgtcagctcggttattggccccagatctccgagatagatttgattggataggccgacagcgctatagggaaagacacctaccccaaggcgccccaacatccccagcccttgcaaacctgtgcgctttccgcctcgaccttagactggccgctctggccagatccgtcgatgcgacgtacacccggtatgccgatgacctcgcgttttcaggaggcggcgccttagcccgagatgttgcccgtttgcaggtgcgggtggcggcaattgcccttgaagagggcttcgccctgcagctcagaaaaactagggttatgagacggggcaccaggcaacaactggccggagtcgtggtcaataggcaccccaatctctctcgggatgcctttgaccgcctgaaggccatcctgaccaattgtatcagacgtggacccgcatctcagaaccgcgacgcccaccctgattttagagctcacttggccggcagagtcgcccatgccacagcgttgaatgccgcacggggggttaaactgagggcactgttcgatcgaattgtatgggacgcaggaggggccggtcggtga

SEQ ID NO: 12548 - RNA, 1350 nt, synthetic construct
  source 1..1350: mol_type = other RNA
atgagggcatcactcagcgacacagtcaggacaatcgccgaggccatgttagccgggttacctgaacggggcggagttgccagtagaatagccgctgtcctgggagacgcacctccatgggcgcatgagttagccgatgcagcgattgcacgttttggtcctaactgggcagacgccgacattgacgcactggccaggttcgtagccgacgcacctgggtttgttcgggcatggcacggagacagaagaccgggagtgatgagagttgtcagacgcgcgccagtacagcggccacttccagcaccactcgccgctagcgatgtgccccagtggcctacgtgcggagacttagcagcctggctgggcgttagcgcctcagagctcgagtggctctccgataggtggagagttgacgctcgctcatctgggtcgcctctccatcactacacatacgtggcctacgataaaaggcgtggcgggtgtcgcctgatcgaaatccccaaggggcgattgcgggaggctcaacgacgagtgcttcacggactcctggatagagtgcccccgcacgatgctgtacacggcttccgcaagggacggggtatcgtaagctttgccgcaccccatgcggacagggatgtggtggtgcggttcgatcttgccgacttcttcgtctctgtgcacgcggctcgtgtccatgctctgtttgacacgctgggctaccccgctgaagtggccaggaccttgactgctctgtgtactaaccgtgttccctctgcccgcctactggctcccgacttgcgagaaaggttggattgggccacccgccagcgctataggaatcggcatctcccccaaggggccccaacttcccctgctctggcaaatctttgcgcttttcggttcgatatgagattggccgcgcttgcccgcaccctagatgctacatatacccgttatgctgacgatcttgcattctccggcggcgctgcattggcaaggaatgcggagagactggaggtgaaagtggctgcaattgccctcgatgaaggttttgcactgcagctgcggaagaccagagtcatgagacgaggggtccgccaacaactagccggcgtggtggtgaacagacacccaaacgttgcccgcgacgagtttgaccggctgaaggccattctgacaaattgcatccggcacggtcctgctagtcagaacagggacgcccatccggattttcgggctcacctcgcaggaagggtcgcccatgccactgctctgaatgccgctagaggcgcgaaactgcacgccctgttcgggcgaatagcttgggacgccggtggcttcgatacctga

SEQ ID NO: 12549 - RNA, 1350 nt, synthetic construct
  source 1..1350: mol_type = other RNA
atgtatgcacctcttagcgacaccgtccacaccatcgccgaggcaatgcttgcggggtcacctgagccagatggtgtggcagcccgcatcgcagccgtcacaggtgatgccccgccatgggctagaccactggctgatgccgctacagtgaggttcggccctcgatgggcagacttggacattgatacgttggccagatttgtggtggattcacccggcttcgttagagcctggtacggggccgataggccagctgtgattaggatagtgagacgtcctcccgtccaaagacctctcccattgcccctggcagggtgcgatgtaccacactggcccacctgtggagatctcgctggatggctgggtctggacgccgcagaactggattggctcgccgacagatggagagtggatgccagggggagtgaaacaccactccaccactacacttacatggcgtgtgacaagcgcagaggcgggtcgaggctgattgagatcccaaaaggccggctgcgtgaagcccagcgaaggatcctgcacggactgttggaccgagtccctccccatgagtctgcgcatgggtttcgtaagggacgcgggatcgtctccttcgctgcacctcatgctgaccgcgatgtggtgattcggtttgacttggcagattttttcgtttccgttcgcgctgctcgagtgcacgcactttttgacacgcttggttatcccgcagaggtagcccgcatgctcacagccttgtgcaccaacagagtgcccagcgctcggttactggctcccgacttacgcgaccgcttcgattggacagggaggcagcggtataggaaccggcacctaccgcagggcgctcctacatcccctgcccttgctaatctgtgcgcgttccggttcgacatgaggctagctgctctcgcgaggagtctcgacgccacctatactcgctacgcagatgacctggccttttctggcggagccactctcgcaagggccatcgaccggctgcaagtgcgggtagcggctatcgcctttgatgagggctttgcgctgcagttgaggaaaaccagagtcatgcgccgaggcgcacggcaacaattagcgggcgttgttgtcaatcggcaccccaacctcgcccgtgacgagttcgaccttcttaaggctatactgactaattgtgtgcggcatggcccggccagccagaacagagatgcacacgccgacttccgtgcccatctggcaggacgagtagcccatgctgctgctctgaatgccgcaagaggtgccaaactgcgggccctattcgaacgcattgcctggggagatgctgaagccggaacctga

SEQ ID NO: 12550 - RNA, 1356 nt, synthetic construct
  source 1..1356: mol_type = other RNA
atgtacagcagcctgtatgacatcacccgtacccttgccgaggcaatgctcgccggacctccagaaacagatggtgtggctgccagaatggccgctgtcttaggggacgcacccccatgggtgcatgctgtcgcacgggacgccatcgagcggttcggtaatctcggaaagcagtgggctgcaatcgagcccaatgatctgtcactgcttgtggctagcgcccctggcttcgttgctgcctggcattctgatgcgaggccgaccatcgtcaggattgtactgaggcctccgcaacaacagcccccaccacctgcccttgatgcacccgacctgcctcgcctgcccactttaggagatttggccgattggctgggactgagcgttcctgaattggactggttggctgatcgttggcgcgtggccccgagatcagagacacccttacaccattacacgtatcgggcctttgacaagagaggagggtcctgtcgcctggtggagattcccaaaggccatctgcgggaggcccaacgcagaatcctgcacgggttactggacagagtgcccccacaccatgctgcacacgggtttcgaaaaggcagaggtatagtatcctttgccgcacctcacgcagaccgcgatgtggtgattcgctttgaccttgctgatttcttcgtcagtattcgggcagccagaatccacgctctctttcggacgctggggtaccctctggaggttgctagggcactgaccgcgctgtgcacaaacagggtgccttccgccaggctgttggctccagatctgcgagacaggctcgactggtcgggacgccagaggtatcggaacaggcatctccctcagggggccccaacatctccggctctggcaaacctctgtgccttccgattggacacccggctcgctgccctagctcactctttggatgccacatacactcgctatgcggatgaccttgcctttagtggtggcgccgtacttgccagagccgctgagaggcttccagcacgtgtcggcgcaatcgccctagaagaaggctttgcactccagtggagaaagaccagagtcatgcgcagaggcgttcggcagcgactagctggtgtggtggtgaatcggcaccccaacctcgcacgagacgaattcgatactctgaaggcgatgttgactaattgcgtaagacacggccccgcctcacagaatcgggtggctcacccagacttcaggggatacctcgctggacgcgtcgcccatgcgactatgctgaacgacgcgcgaggggccaaactacaggcgattttcgatcgtatagtttgggacgccggcgatggcgacgcatga

SEQ ID NO: 12551 - RNA, 1338 nt, synthetic construct
  source 1..1338: mol_type = other RNA
atgaacgcgagcctgtatgatctcactcacacactggccgaggctatgttggctggaccacctgagcccgacggcgttactgcacggatagcgtccgtgctcggagacagtcccccttgggctcgcgaggttgccgtgaatgccatcaattctttcgggcccagatgggcagacgctacaccacgggatttgtcttttgtgatagcggacacgtccggattcgtgaacgcatggcagtcagacaaccctccgaccatcgcaaggattgtgctgcgaccccccgaacaaagaccacctccccaagccctagccgccctagatcttcctcagtggtccaccaccagggatctggctgattggcttgggctggccatcccggagttcgaatggctggctgaccggtggcgagttgaaccccggtcatcggggacgcctttgcaccactatacttacaggacatttgacaaaagggacggcggatgccggctgatagagatcccaaagggacatctccgagaagcccagaggcgcatcctgagagggctgctggaccgcattccgcctcacgaggctgcccatgggtttcgaaaaggcagaggcattgtctcatttgccgaaccacatgtggactgcgatgtggtcatccggtttgacctcgcggacttcttcgtgagcatcgatgcaaagaaggtgcatgcattatttgccaccctgggctatcctctagaggtcgtgcgcgccctgacagccctctgtaccaaccgcgtcccaagcgccaggctgttagcagctgacctgcgggacaggttagattgggccggaaggcagcgttacagggagaggcacctcccccagggtgcttctactagccccgctctggctaatctctgcgcttttagacttgacaccagactggcggcccttgcccattctttagatgccacgtacaccagatacgcagatgatctcgcattctccggaggtccagttcttgcgcgtgtggccgaacggctacctgtacgcgtagcaagtattgccattgaagagggcttcacacttcagctcaggaagactcgtgttatgccacgcggtgttcgacaaagaatcgtcggggtcgtcgtgaatcgtcaccccaatctggctcgcgatcagttcgacgctttgaaggctactttgaccaattgtgtgcggcatggcccactgagccagaacagagacgcacacgctgattttcgcggctatttggccggtcgggtagcccacgccacaatgctcaacgccgcaagagggagtaaactgcaggcaattttcgatcgaattgtgtgggagggcgtatga

SEQ ID NO: 12552 - RNA, 1395 nt, synthetic construct
  source 1..1395: mol_type = other RNA
atgcactccagtctgtacgacactacaagaaccattgccgatgctatgcttgccggccctgctgaacccgatggtgtagccgcccggatagctgctgtcctcggagacagcccaccttgggtgagggacgttgccctggatgcgatcgcccgatttggcgagcggtgggcagacgtcgaaccagacgaacttagccggctggtggtgggagcacccggatttgtagaggcatggcggagaggaggccgaccaaccatcgtccggatcctccggcagccagcagtccaaaggcctctgccaccgcccttagcagccctagatctgccacccctgcctccattacctcagctccccacttctggggatctggcggattggctggatttgacagtgccggagctcgagtggcttgcggatagatggcgtgtagccgctagaggtagtgaaacaccgctgcatcactacacttatagagcatttgacaaacgagacggcgggtgcaggctgatagagattccaaagggaaggctgcgtgatgcccagtcaagagtgttgcatgggctccttgatcgagtgcccccccatgacgctgctcacggattcagacggggcagggggattgtcagctttgctgccccccacgcggatcgcgatgttgtgatcaggtttgatctcgccgacttcttcgtctccgtgcgagcagcccgtatccacgcccttttcggcacactgggctaccccgcagaggtagcccgaactctgaccgctctgtgtaccaaccgggtgccatcagcacgccttctggctcccgacctgagggatcgatttgactggtccgggcggcagcgttatagaaaccggcatctgccgcaaggcgctcctacaagccctgcactcgcaaacctttgcgccttcagactagacacgaggttagccgcactcgctcgctctctcgacgctacctatacgcgctacgcagacgacctggcttttagtggcggggctggcttggctagggccattgagcggttgcaagtccgtgtggccgccatcgctctcgaggaaggtttcgccttacacatgaggaagacccgcgttatgcgcagatcagttcgccaacgcctggccggagtggtggttaaccgccaccctaatttggcaagggatgccttcgacaccttgaaagccatgttgactaattcggtgaggcatgggccagcgtcccagaatcgcgacgcacaccctgacttcagaggatatctggccgggagggttgcgcatgcgactatgctaaacgccacaagaggtatcaagctgcgggccatattcgaccgcattgcctgggatgctggcgatgtggacaccattcccgacggaaatggttctcagccttga

SEQ ID NO: 12553 - RNA, 1350 nt, synthetic construct
  source 1..1350: mol_type = other RNA
atgaggtcctctgtctacgataccgctcggacaattgccgatgccatgctggctgggccacccgatcctggtggtgttgccgcaaggatggctgccgtactaggtgatgcccccccatggctccatgatgtggagcgcgacgcagtggccagattcggtgcacggtgggctgcagtggaagcagacgacttgacccgactggtcgccgaggctccaggttttgtagcggcatggcgttccgattctcccccggctattgtgcgtatccttcctcggccagccgtgcaaagaccccttccagcagcccttggagccctcgatctgccccagtggcctacacctggggaactcgcaggctggctgggaattgctgtccctgacctcgactggttagcggaccggtggagagttgccgctaggggaagcgagacaccactgcaccactacacctaccacgccttcgacaagcgagacggagggtgcagactgatcgagatccccaaaggccgcctgagggaagctcagcgcagcatactgcatggcctcctcgatagagtgccgcctcacgatgcagcgcacggctttagaaaagggcggggaatcgtttcattcgccgcccctcatgcggatagagctgtggtgatccgcttcgatctcgccgacttcttcgcaagcgtgagtgcggcaaaggtgcatgcactgttcgacaccctgggctatcctttagaagtcgtgcggacgctcacggcgttatgtactaaccgcgtcccctcagcaaggctatttgccccagacctgcgggataggcttgactggtctggcaggcagcgctaccgaaaccgccacttgcctcagggagctccgaccagtcccgccttggctaatctgtgcgcctttcggctggacactcggttggccgcactagctcgctccctcgatgccacttatacacgttatgccgatgacctggcgttttcggggggcgctgtgcttacacgcgcaactgagtggatgacagtgagggttgccgctattgcgctggaggagggctttgcccttcagctgagaaaaacccgggttatgcgaaggggggtccgacaaaggttggccggcgtagttgtgaacagacatcccaatctggcccgggacgaatttgacactttaaaggcaatcttgaccaattgtgtaaggcacggaccagccagccagaatagggccgcccatgctgacttcagaggatatctcgctgggcgagtcgctcacgccaccatgctgaacgctgctcgtgggatgaagctgcaggccattttcgacagaatcgtgtgggatgcaggcgatataggcgcttga

SEQ ID NO: 12554 - RNA, 1350 nt, synthetic construct
  source 1..1350: mol_type = other RNA
atgcagcccgggttccggaacaccctcgtgattgtctgcgatgcaatgttggctggtgccccggaagttgcgggagttgtcactcggcttacagcaactttcggcctatatggcgcttggatggaagaagtcgcacagcaggccgttgacgcatttgggtccagatgggacgccacgcgcgtggatgagctgacacctctcttggaaaatgcacccgctatagtcgccgccttttcgtcccaagcctcccccgaaatcatccggattattagaagggcacctgctcaaaggcctcccccaccacagctggcgcatatcggcttacctcatctgccgactctgcgcgatctggccgagtggctcgagcttaacgactctgacttggcttggcttgccacaaggtggcgcgtggatcctggcgaggccagttctccattgcatcactatagctaccacgcacgcgaaaagagggatgggagacatagactcatagagcggccaaagtcactgatgcgcttcgtccagcacaaattgctgcacgggctgctcgatcacgtgcctcctcatgacgctgcccatggtttcaggcagggacgcaacattgtgtcctttgccgctccacatgcagataaatcactggtcatcagactggacctcgcagatttcttcgccagtattacccaggcccgtgtgcacgctacctttcacgctctggggtacccccttgctgtgtcacgagccctcaccgcactaagcaccaatcgggtgcccgtgcgagttctcagttgcggcgctttaaaggataaatttgactggactgagcagcagagactacgcgcgcgtcacttgccgcaaggggcatctacatcccccgctctggctaatctgtgtgcattccggttagatacccgtctcgcggcccttgccagatctctcgacgccgattatactcggtacgctgatgaccttgcattttcaggagccgctcgtctggagcgagtagcagaccgccttcccctgtgggttgcagcgattgccctggaggagggcttcaccgtgcagcctcggaagacgcgagtgatggccaggggtgtcaggcagcaattagccggcgtggtagtaaatagacacccaaacttggctcgggacaggttcgacgcactgaaggccctgctgacaaactgtgtgcgccacggacccgtgagccagaacagggacggaagagccgactttcgagcgagcctagccggccatgtagctcacgccacaatgctgaatccagctcggggagccaaactgcgagccatctttgacaggatcgattggaatagactcgaaagcgcgagctga

SEQ ID NO: 12555 - RNA, 1338 nt, synthetic construct
  source 1..1338: mol_type = other RNA
atgcggctcaacttcagagatacactggtggctgcttgcgatgccttactggccgggcctcccgagttggctggtatggtcgcgcgcctagtgtctgtgttcggtacttatagagcttggatggatgacgtcgccagagaagccgctcacgggtttgcacccaggtgggacgccatccctgcacacgaactggctcgctccctggagcaactgcccgtctttgccacagtgtttgggaacgcttcccgacccgaagtggtgcgtatcgtacgcagggctccagtgcagcgaccccttccacctggcctcgagcaggtttctctgcccagactcgcgacccttcgagatcttgctgagtggctcgaggtcgccggtggagacttagcctggctggcaaccaggtggcgggttgaaccaggcgaagccgcatccccacttcaccattacagctatcatgcgcgcgagaagagggacggacggaatcggctgattgagcggccgaagcccctgttgagatttgttcagcacaaacttctacacgacctcttggaccgcgtccctcctcacgacgctgcacatggcttcagacgaggaaggtcaatagtgagcttcgccgcaccacatgctgaccagccactggtgattcggcttgacctcgccgacttcttcgcctctatcacccaggggagggtccacgcagtcttccatgctctgggctacccggttgccgtggctagagccctgacagcgctgtcaaccaatagagtgcctagccgaatgctcacctccggcgccctgaaagataagttcgattggacagagcagcgcagattacgcgcgcgtcacttgcctcaaggagcctccacttcaccagccctggccaacctgtgcgcatggaggcttgatacgcggttggcagccttggcccagagcctagacgccaattatactaggtacgctgacgatctcgctttcagtggggccgcacggtttcagagagtcgccgatagactcccgctgtgggttgccgcaatcgcgctggaagagggcttttctgtgcaaccccgaaagactcgggtaatggcccagggagtgaggcagcagttggctggagtggtagtgaaccgccaccctaatctcgcccgggatcgttttgacgcactgaaggctctgctcacgaactgtgtaaggcatggccccgctagtcagaatcgtgacggtcgggcagattttagggcagccctggcaggccatgttgcacacgccgctatgttaaacccatcgcgcggggcgaaactacaaggcattttcgatcgcatagactggagtcaaagctga

SEQ ID NO: 12556 - RNA, 1350 nt, synthetic construct
  source 1..1350: mol_type = other RNA
atgaggctcaactttcacgacactctggtaatcacatgcgaagcaatgctggccggacctccagaggtggcctctattgtggcacgcctgatgctgatctttggcgaacatagtccctggatggacgacgtggctagaaaggccgccgatctgtttacaccgcgatggaatgacaccccgatcgacgagctcataagagtcgtcgaggatactccaacattcgtcgcggcatttggcactcatattcgccctgaggcgattcggatcataagaaggcctccagttcaacgacttcctcccaggcggctcgcacacgtggatttaccacatctgcctaccctcagggacttggctgactggctggaactggatgggtcggatatgagctggttagccaccagatggagggtagagccaggtgaggcggtgtccccactgcaccattattcttaccacgcccgggaaaagcgcgatgggcgctatcgacttatcgagcggccaaaagccctgattcggtttgcgcagcacaaaatactgagggaacttctcgatagggtgcctccccatgacgctgtccacggctttcgaaggggcaggaacatcgtgagttttgccggaccccacgccgataaggcactggtgattcgattcgatctgaccgacttcttcgcaagcgtaacgcaggcccgtgtgcacggcatgttcagaactcttggttaccccatcgccgttgcaagcgctcttacagcgctggccactaaccgcgttccctcacgcctgttcacactcggggaactcaaaggaaaattcgactgggacgctcagcagcggttgagagccagacaccttcctcagggagcatctacctcccccgctctggcaaacttgtgtgcctttcgcctagacacgagattggccgccctggctcattcagttgacgcggtttatacaagatacgctgatgacctggcattctctggcgaggctagtttaaaacgcggagccgatcggtttagcgcccgtgtcgccgcaattgcaagggaggaaggtttcaacctccatttcgggaagaccagagtaatggggcggggagtccaacagcggttagcaggggtggtggtgaaccgacacccgaatttggccagagacaggtttgatatgctgaaggctatcctaaccaactgcgtccagcatggccccgcttcacagaatcgtgccgggagggctgatttccgggcttccttggctggacaggtggcccacgctatgatgctcaatagctcccgcggcgccaagctacgtgctatcttcgaccggattaattggtcccaaggtaatagtgccggctga

SEQ ID NO: 12557 - RNA, 1338 nt, synthetic construct
  source 1..1338: mol_type = other RNA
atgaggcctggaacacctaaaaccatagcccttctttgtgaggccatgctggcaggagaaccagaacccgcggcagttgctgcccgcttggttctggcctgtaatagacacgagaggtggatggaagcactggcgcagctcgcggtagagcggtttgccagggtgtggagagatacagaaccagatgagctcgcctctttatttgcccttgcagctccttttccacccggctggagtgccagggacttacctgcaattgcccggatcgtgaggagagcccctgagcaacagctgccaccgcctaggttggtgcacctggatctaccttccctgcctaccctgagagccttggctgattggctggaactttctgacgaggacttggcatggcttgccactcggtggagggtcgctccacatgaggctgctagccccctacaccactaccgataccatgtgcgggaaaaaccggacggccggcaccgactgatagagcaaccgaagccccttctgaggatggcccagcacaccctcctacatggccttctcgaccgcgtccctccacatgaagccgctcacggattccggcgggggagaaacatcgtgtcctttgccgctccccatgcaggtcagcccctcgtaatccggctggatttcgaggacttctttgggtcagtgacggaggcaagagtgcacggactgttccgtacactaggttacccagttgcagtagcccaggcgctcagcgctctggcaacacaccgcgtgccctcacgtctctttgacgtcggggatctgaagggcaagttcgattggcacgctcagcaaaggctgagagcccgacacttgccacagggcgctgctacttcccccgcactggcaaacctgtgcgccttcaggttggacgtccgcttagctgctctcgctcggggattcggcgctagttatacgcgatatgccgatgacttagccttctccgggggtgataagctgaagtcggtagctcgcgattggcccctctgggtcgctaggatcgcacgagaggaagggtttgccgtccggagccagaaaaccagagtgctgagaaacaatatgagacagcagctggccggtgtggtggtgaatcgtcatccaaacctgtctcgcgagcggttcgacctcttgaaagcaatgctcaccaactgcgttcgtcatggccccgcgagccaaaatcgcgatggccgagccgacttccgcgcatcacttgccggccatgttgcccacgcaactatgctgaatgcggcccgcggggccaagctgaaagcgatttttgacaggattgactggactagaggatga

SEQ ID NO: 12558 - RNA, 1368 nt, synthetic construct
  source 1..1368: mol_type = other RNA
atgcagctcagtctccaccagacagtgattgctatcgctgaagccatgctcgccggggagccctatagagacagtgtggctgccagggccgcatcaattctaggtgcccagttaccttggctgtccgaagccgccgacgacgcagttcacagatttgggcaccgctgggatgacacccagcctgacgaggtggctccgttcatcgcagacttgcccggcttcgtgtctagctggatgagcgaagaacgactctcagttatcagaatactgaggcgcgcccctgtacaaaggcggctaccaccacccctggctcagatagagattccccagctgccggcccttggcgatttagccgattggctggagttatcccccgccgacctgggatggttggcgaatcgctggagagtcggcgcaagagacgggccttcgccattgcatcattacagctacagggtttgcgaaaaacgtggcgggaggtatcggctaatcgagcgtccaaagtcactgttgcgggcagcacaacacaaacttcttcacgggttgctcgaccgagtgcccccccatgaagctgcgcatggatttcgcaagggtagaaacattgtttcattcgctgcacctcacgtcggacagccactggtgatacgacttgatctggccgattttttcgtcagcgtgacagaggcgcgcgtccactccgtatttcggactctcggctataccagcgctgtggctcgagcaatgaccgctatggtaaccaatagagtaccctccgcccagttgcttgcaccagacctgaaaggcaagtttgattggctcgaacagcagaggttccggactcggcacctgcctcaaggagctagtacctctccagccctggccaatttgtgcgcgtttcgtctggatactcggctggccgccctggcaagatctcttaacgcaaactacacgcgatacgcggacgatctcgccttctctggtggggcccagttaatgtccgtggccgatcgcctacctgtcaaggtggccgctattgccatcgaggagggcttttccgttcagccacggaaaacacgcgtcatgcctaggggtgtgaggcagcaactggcgggcattgtcgttaaccagcatccgaacttcagccgcgacaagtttgacacactgaaggctactctcaataattgtgtgaaacatggagtggcaagccaaaataggtcggcacaccgtgacttcagagcttctctggccgggcatatcgctcacgtgaccatgctcaactccgctcggggagcgaaactgaaggcaatcttcgattgtatcgattggtctgagcccgtgggagatgagcatggcacgagtgccctgtga

SEQ ID NO: 12559 - RNA, 1470 nt, synthetic construct
  source 1..1470: mol_type = other RNA
atgagccattgcactgctcgcgcgcctctcagaacagcacaggcccgatccaggcacacgggtaccctgattcgcggctctagtttcacgatgcagctggaccttagcgccgcagtgcagctgatagcagaggcagctcttgctggtccttctaagcatgctagtgtggtggagcgtatcgtagccgtagtaggcgccgatccgccctggtgtcacgatgttgcaactctggccgtccagcggttcgcttactgctggcgcgaggcatcgcccgaagacttagcgctgcttatcgtcgacgtcccagcatttgctgccgcctggagtggcgtggataggcctacattcgttcgcgtgcttaagcgggtgcctacccaagttgctccccccgtgagcctggcacacatatctattccactattgcccacactcgccgacctagctgattggctggagctgagatccaccgacctcgagtggctggcggatagatggcgggtcgaaggtcacgcacgacgtctgcaccactacgggtaccatgcttgtgaaaagcgcgacggcagatacaggctcatcgagaggcccaaaccgctgctgagaagtgcccagcacaagattctccaccagatcctcgaccatattccagtgcacgcagcagctcatgggttttgcaaaaggcggaatattgtgtcatttgcggctccgcatgcgggccaggctatggtattgtcctttgacttgcaagacttcttttcatccgtgaccgccgggagggttcatgccatcttccggaccctgggatatcctttcgctgtggcccgagccatcactgccctcaccacaaatagggtcccttccgcctattttgacgctccacccctgaggggtaagttcacttggcatgaacgggagagactccgagccaggcatttacctcaaggagccgccacctctcccgctcttgcaaatctgtgcgccttccgcctggacatgagactgagcgctctagcgagagctttgggcgcgcggtatacccgctatgcagacgatctcgcctttagcggcggatcagtgttagcccgggcttccgaaaggctctcaatccaggttgcggccattgccctggaggaagggttcgaggtgcacagcagaaagacacacgggatgccacgcggggtgagacaacagcttgccggagtcgttattaatcgtcaccctaacttagcccgggattgttacgatcggtgcaaagcagtgttgcacaactgtgccttgcacgggccagcctctcagaaccgagaggcacatggagacttccgcgcccaccttatgggcaaagtcgcccatgccactatgttgaacccacgtcgaggcgcaaaactgaaggtcctgtttgataggatcatatggccagaagatgctcccgcaagaccacccgatgatggaacagtgcacgctatgcctcagtga

SEQ ID NO: 12560 - RNA, 1473 nt, synthetic construct
  source 1..1473: mol_type = other RNA
atgatcagtgcagttaggagaatgagcccactgtgtgtgctgagaaagacggctcacgcagccctggacgcattgacaaggcgtccagcgagcttccacgcaatgagacttagcccccttcagcggatcacatacgccattgccgatgcaatgctggccgggcctgccgaacccgattctatggtagagaggatgagtgacagcttaggtgtaccttcagactggatgctgggactcgcaaggcgcgttgcaaagagatttggggcgcgatgggattccgtggattccaaagaggttgcgctggtggtggctaagactgccgggtttgtagcagcgtggcgttctgaggccaggcccttcgttgtaagagtcttaaggaggccaccagtccaacaactccctcccccccgtcttagggagatagccctgccgaagctggctactctcggggatctcgccgcttggcttgaggtcgaagtggcagaactggactggtttgctgaccggtggcgcgtcttgcctcagggagctgatacccccttgcaccattacacctataaggctatcgagaaacgggacggcaggtgtcgacttatagagattcccaagtctcgtctccgctcactgcagcgcaaaatcctccacggactgctggatagggttcccccgcatgattgcgtacatgggttcaggaagggacggaacaccgtgacttatgccgcccctcatgccggcaaagccgttgtcgtgaggttcgaccttgccgacttctttgcgtccgtgcatgctcctcgggtgcacgctgtgatgcgcacgctgggatacccgttggaagtggctcggatgctcaccgctctatgcacaaatagggttccatcagcccgcctgctggctgctgatgtgagaggaaagttcgattggctagagcggcagcgatatcggactcggcacttaccacagggggcacctacatccccagccttggcaaatctgtgcgcctaccgactcgacctgcggcttgagggtctagcacgtgccgtcggagctacctacaccagatatgccgatgatcttgcgttttcgggcgacgaagacctggctcgggtcgttgagagactcaaagtgcgagtcgccgcaatcgccctagaagagggtttctcaatccagctgcgcaaaacacgcgtgatgcgccgcggtgtgagacagcacttagccggcgtcgtggtgaaccaacaccctaacctcgcccgcagcgaattcgacgcactcaaggcaatcttgatgaattgtgtgagacacggggccgcctcccagaatagagagggccatgcggactttcgagcacatctgcaaggccgggtcgcccaggctgtgatgttgaacgctgctagaggcgccaagctgaaaggcatttttgaacgaattggctgggaggacattgccaacgatagtagactggactctgaagcttga

SEQ ID NO: 12561 - RNA, 1356 nt, synthetic construct
  source 1..1356: mol_type = other RNA
atgaggctgtcatctctccagcatgttacctttgctatcgccgatgccatgctagccggtcctccggaacctgacgcgctggtagctcgcatgacagccgctttgggagtccgcgctgattggatgaccggaatagccagaacaacctctagacgctttgctgcacgatgggagcacgtgaagagagacgaactgctgaggatgattgccgccactgagagtttccagctggcatggcacaatgagcaccaaagaccagttgtggtgcgggtcctgaaacgcgcacctcagcaagtagccccacctccccgactggctcatgtggctctcccccagttacccacattgggggacctcgccgcctggcttgaagtggacgacgcggacttgggctggttcgcagatcagtggcgagtgatgccacaggcttcgtccactccactgcatcactacagctataaagccattgaaaaacgagacggtcggtgccgacttatcgaaatgcccaagagcaggttgcgggatctccaacgtaaaatcctgaaggggctccttgagcacgtaccacctcatgagtgtgcccacggtttcaggaaggggcggaacacggcatcatatgccactcctcacctgggaaaggatgttgtggttcggttcgacctggccgatttttttgcgtccgtgcatgccggacgcgtgcatgcactgatgcgcacactgggctacccactagaggtggccagagccctgaccgctatctgcaccaatagggtgccctccgctcggctgctagcagatgatgtgcgggagaggttcgattggcaggagaagcagcgttataggactcgacacctcccccagggggcacctacatctccagctctcgccaatctctgtgcataccgcttagatctgcgtctggctggccttgcacggacgatgtgtacaagctatacccgctacgcagacgatctggccttcagtgggggacgggagttagcgagaggagtggaacgtttggcggtcagggttgcggccatcgcaatggaagaaggcttcagcattcaacttagaaaaactcgggtcatgaggcgcgccgccaggcaaagattagctggcgtggtcgtcaatcagaggcccaacctggccagagatgagtttgacgctttgaaggctacccttaccaactgcgtaagatacggtgtcgagggccagaacagagacggacatcgggacttccgcgcccaccttgagggcaaggtggctcaggtttgctttctgaacccggggagaggcgaaaaactcagggggatactccgtcagattcagtgggacgtctccggcgcacacgagtga

SEQ ID NO: 12562 - RNA, 1368 nt, synthetic construct
  source 1..1368: mol_type = other RNA
atgcccctttccagcttacagcatgtgacatacgccatcgccgacgcaatgcttgccggctccccagaacccgctagtatggtggagaggatgacgctggtgctgggcgaatctacgaggtggatggacggactggcgaggcacgtggctaagcgtttcgcagctcgttgggactctgtcggtcgccgtgaagtgtcagccgtggttgccgggatgcctggcttcgtctctgcctggcgttccgagcagcctcccaaggtcctcagagtgctaactcgacctccatttcaaagacctccgccaccttggctgcacgacgttgcgctcccccagttgccaactctgggggacttggccgcttggctcaatattgagcccggcgatctcgactggttcgcggataggtggagggtacccgcccatagcgcggctacaccactccatcactacgcatacaaagccatcgaaaagcgcgacggaagatgccgcattattgagattcctaaaccgcggctgcgcgctctgcaacggaaggtactgtcaggcctgctggatcgaatccctgcccacgaatcagtccatgggtttagacatggtaggaacatcgtgacatttgcagctccccatgttgggcgggcagtcgtgatgaggttcgatctgaccgatttttttgccagtgtgcacgctgggcgggtgtattcagctttctatgccttcggctatccactggcagtggctatggcgctcactgccctttgcaccaaccggataccgagcggccgcctattggccactgacgtacgcgagaggctgcagtggcaggagaggcagcgatacagaaacagacaccttccacagggagctcccacctctccaaccctcgctaacctctgcgcattccgactggatctaaggctggctggtctggcacggagcgttggagccacctacacacggtatgccgacgacttggccttttcgggagacgaagaattagcacggatggcagatcgcttgtgtatccgggttgccgccatagcactggaggagggcttcggcgttaatctccgcaaaacacgagtcatgagaagaggtgtgcggcagcacttagccggcgtcgtcgtcaattcccacgctaatgtggctagacctgagttcgatgcattaaaggccatgctgaccaactgtgtgaggcacgggcccagaagccaaaatagagatgaccatcctgagtttcgagcacacctggctgggcgcgtagcgcatgtgggaatggtgaacgccgctcggggagctaaacttcgcgcccttttggagtccatcgagtgggatgaagaaagtgaggccaaggcagaaagcaatgcctga

SEQ ID NO: 12563 - RNA, 1113 nt, synthetic construct
  source 1..1113: mol_type = other RNA
atggccgcattgccatcctttcggcctccctttcaaaggcccccccctctttggctcagagaagtcgccctgcctcagctgccaactttgggtgacctggcggctcgcttagggatcgagcctgacgaacttcattggtttgccgctcgctggcgagtgccagctcactctgcagccactcccctccaccactacagctataaggccatcgagaaacgagatggcagatgtaggatcattgaaattcccaagccgcggcagagggccctgcaactaaaggtgctttctgggctgctggatcgcatcccggcgcatgaatcggctcacggtttcagaaggggacgtaatattgtgacattcaccgtgccccatgttggcaaagccgtcgtaatgcgttttgacctgaccgatttcttcgcatccgtgcacgccgggcgcgtctatagtgatttccactcatttggcttctcacctgctgtggcccaggtcttcaccgccttatgtacaaaaagagtaccttctggccgattgctggccgcagatgtcagagagcgcctgccatggcaggagaggcagaggtaccggaacagacacctgccacaaggggctccaactagccccgcccttgccaacctgtgcgcctttagatttgaccgccgcttggcaggactagctcgcagcgtaggtgccacatatacacggtacgcggatgacctggccttcagcggagatgaaaacgttgcacggatggtggaacggctctccgtgagggtggctgcaatcgcaatagaggagggtttctcagtgaacctgagaaaaaccagggtcatgaggcgtggagcaagacagcatttggccggagtggttgttaactggcatgctaatgtggggcgtacggaattcgacgctctcaaggcagtgctctctaactgcgttcggcacggcttaagaagtcagaatcgagacgggcatcgggactttcgcgcccatcttgcaggcagggttgcccacgtggcgatggtcaatgctgctcggggcgctaaactccgggcactgctcgaacgaatagagtgggacgaggagagtgaggccaaggcgaagtccaatgtatga

SEQ ID NO: 12564 - RNA, 1362 nt, synthetic construct
  source 1..1362: mol_type = other RNA
atgccatcttcatacttacagtacgtggccaatgccattgctgacgcgatgctagcggggcctgcacaaccagcttccatcgtggagcgaatggtgctcgctttgggagcgccggctgactggatgagcggtctggctcggagagtgagccgcagatttggcaaacgttgggattccgtcggccgccacgaactttccagggtaatagcagaccacgctgccttcgtgagcgcctggcaaagcgacaacaggccccgtgttgttcgtctcctgacgcgtccaccagtacagaggcaggtccccccttggctgcacggtatcactctgccacagctgcccgccttagccgatctggccgactggctagaagtagaaccaaccgagctcgattggttcgccgatagatggcgggcccctgctcatgcagctgcaactccccttcatcattattcttacaaagccatagagaagcgcgatgggcggtgccgcatcatcgagattcccaagagtagactgaggacagtgcagagaaaggttctccacggcctgttggacaggatacccgtccacgacgcagcacatggcttccgaagggggcgaaatactctgagcttcgcaaccccccatgctgccaaggcagtggtggtaagatttgatctcacggatttcttcgcttctgttaacgccggccgggtgtactcaaccttccgagactttggctatcctttggcagtggccagatcccttacagccctgtgtaccaaccgcgtgcccagtggaagattattggaagctgacgtccgcgagcgaatcgactggctggaaaggcagaggtaccgtaatcgccacctgcctcagggcgcacctacctcacctgccctggcaaatctctgtgcctatcgcctcgatttacggcttgcagggctggccagatccgtgggagcgacttacacccggtatgcggatgacctggcgttctcgggagatgaggaccttgctcggatcgccgagcgcctgtcaatccgggttggtgcaattgctattgaagagggctttgccctgaactttagaaagaccagagtgatgaggcggggcgctaggcaacatctcgctggtgtcgtggtcaacagacacccgaatttggctcgccctatgtttgacacactgaaagctatcctgacaaactgcgtgaggcacggaccggagagtcagaaccgggaagcccacccagatttccgggcccatctagctgggcgagttgcccacctcgccatgttgaatgcccgccggggagccaaacttgaggcaatttttgaaaggattgggtgggagggaggggagggctctggaacaactgtctga

SEQ ID NO: 12565 - RNA, 1350 nt, synthetic construct
  source 1..1350: mol_type = other RNA
atgccccaaagctccctccaggtcgtgacatatgccatcgccgacgcaatgttggcaggacctgctgacccagcgacgatggtggaaaggatgacccgggtcctgggagaaagtgccgattggatgaccggactggcccggagggttgagagacggttcggagcgcgatgggacagtgtggaggccaagcacctgtctaaaattatcgctgagacagcaggatttgtcgcggcttggcgttctgagaaccggccaagaatcgtgcgcgtcctgacaagacccccagttcaacggccggcacctcgttggctaagagatgtcacattgccacagctgcctaccttgggtgacctggccgcctggctcgatgtcgaacccctggagctggactggttcgccgaccgttggagagtagcagcacacgatgcaactaccagactgcatcactactcctataaggccatagagaagagagatggccggtgccgcataatagagatccctaaatctcggcttcgagagcttcagagaaaagtgcttcatggcctgcttgacaggattcccgcccatgacgctgtgcatggcttcagacgcggccggaatactgtgacttttgctgcaccacatgccgggaaggccgtggtgttccgctttgatttaacggacttctttgcttcagttcacgccggcagagtgtattcagctattcatgctctgggctacccccttgaagttgcccgagccctgaccgccttatgcactaacagggtgccgagcggtaggctactcgctcctgacgtgcgcgaccgtattgattggcaggagcgccagcgatacaggaaccgacacttgccgcaaggcgcacctacaagtcccgcactggccaacctgtgtgcgtttcggttggacctcaggctcgctgggctcgctagatcagtgggagcaagctataccaggtacgccgatgacctcgccttttccggtgggaatgatctctcccgtatgactgagcggctctctatccgcgtagcagctatcgctatcgaagaagggttcgcagtgaacatgaggaaaaccagggtaatgcgccatgccgtccgccagcacttagcaggggttgtggtaaatagccaccccaatctggagcggcctgcttttgacgccctgaaagctctgctgaccaattgtgtgcgacacgggccacgctcgcagaatcgggatgcccacacagatttcagagcccatttggctggccgcgttgcgcacgtcactatgctaaacgccgcgaggggggagaagcttaagggtattttcgaacgaattggctgggatgaaagggaccagagctga

SEQ ID NO: 12566 - RNA, 1293 nt, synthetic construct
  source 1..1293: mol_type = other RNA
atgctcgctggaccaccagaggccgcagcgatggttgagaggatgactttggtgttaggcgaacgagctgattggatgaatgggctagccaggggcatcgctaagcggttcggggcaaggtgggactcagtcgacggcaaggagctttcgaaagttgtggccgaaaacacaggctttgtcgccgcatggcgcggagagtctagacctcgggttgttcgagtgctcccccgaccaccagtccaaagacctcctcccccctggttgcatggtgtggcactaccgcagcttccaaccctcggagatctggctatgtggctggaggtcgaacctgacgaactggactggttcgctgatagatggagagtcccggcacagtccgctgctacacccctgcaccactacagctataaggccatagaaaaacgtgacggccggtgcagaattatcgaagtgcctaaatctcgactgcgggcgctgcagcggaaagttttgcacgggttactggatcgagtgcccgcacacgatgcggtgcatgggttcagaaggggacgcaacaccgtcactttcgctgccccccatgccggtaaagccgttgtgatccgcttcgatctgatggactttttcgccagtgtacatgccggtcgagtttactctgtgattagggccttgggctatcccctgaatgtcgcccgcgcactgaccggactatgtaccaaccgtgtaccttccgggtggctggtggctcctgatgtaagagacaggatcgactggcaggagagacagcgctaccagaaccggcaccttccacagggagctccaacaagtcctgccctcgccaacttgtgcgcttttagactggatctgaggctcgccgggcttgccaggtcattaggcgccacttatacacggtacgcagacgatctggccttcagcggcggggaagatctggcaaggatggcccaacgggtggagatacgtgtcgccgcaattgcgattgaggagggatttgctgtcaatctgaggaagacccgggtgatgagacgcggtgggaggcaacaactcgctggcgtggtagtgaatagccaccccaatcttgcaagagccgaatttgacgctctcaaggccgtgctcacgaattgtgtgcggcacggcccgggatcccaaaaccgtgagggtcacgaggattttcgcgcacatcttgcggggcgcgtggctcatgcaggtatgctgaacgctgtacgcggcgcgaagctcaaggccatcttcggccggatcgtgtgggacgacggatga

SEQ ID NO: 12567 - RNA, 1344 nt, synthetic construct
  source 1..1344: mol_type = other RNA
atgtcactctctacattacagaccgtgacaaatgccattgccaatgccatgcttgctgggccccccgaaccagctgctatagtggagaggatgacttgtgcactgggtgagccggctgactggatgaagggcctggcatctagagtggcccagcgttttgcagctcgttgggactccgtggatccctcggccatcagcaaggtggtagcggaaacgacaggcttcgttagtgcatggagaagcgagacacctccccgggtggtacgaaccttaatcaggcctccatcccaacggcctgcacctccttggctgcaggatgccgtcctccctcagctcgcaacccttgccgaactggcggcttggctcgaggtggaacccgatgaactggactggtttgcagatcattggagagtccccgcccaacaagccgccactcccttgcatcactattcatatatggttgccgacaaaagggacgggcggtgcagaattatcgagatcccgaagagccgcttgcgaggcctgcagaggaaagtgctgaggggcctgctggataaaattcctccacatgacgcagtgcacggcttcaggcgcgggagatcaactgtgtctttcgctgcccctcacgtcggaaaagctgtggttatcagattcgatctgaccgatttcttcgcctccattcacgcaggacgagtctactctgtgtggcgcagcctaggatttccaaagggggtggcgcgcagtctcacaggcctttgtactaatagggtgcccagtggtcggttgctagcaccagacctgcgcgaaaaaaccgattggcaggagcgtcagcgatatagaaaccgtcatctgccgcagggagcaccaacatctcccgcgctggctaacctgtgcgcataccgaatggatatgcggctcgccggattggctcgaagcgttggtgcaagctacaccaggtacgcagacgacctagctttttcaggtggtgatgatctggccagaatggctactcgcctgagtatacgggtcgccgccattgccatcgaagagggctttgcggttaatcttcgcaagacccgggtaatgcagcggggggctagacaacagctcgcttccgtcgtcgttaaccagcacgttaacgtggcccgctctgagttcgacgccctgaaggcggtgcttacgaattgcgccaaactcggcgtggagtcccagaacagagacggacacccagactttcggagccacttggccggccgccttgctcatgtcgagatggtaaacgctgcccggggggccaagttaaggaggatcttcggcaggatagtctgggggagatccggatga

SEQ ID NO: 12568 - RNA, 1305 nt, synthetic construct
  source 1..1305: mol_type = other RNA
atgaattcagcatttgtggccgagaatctcgcagcagcccttctgctcggagagtggactggacgcggactcctagattccgctctgcgggtggtacgctatcgcgaaccctggctgcatcggttcctaagaaggcttaggcgagcatttcctgagccccctgcacgccaggaatttcgcgcgctagtggactggataagtaatgatcggggattcctcaaccgtagcctggacggcgtgtttgagttcgtcagcctgacacccgccatgtcacaatcacggtggcccgtccctcagcttgccacagtgggtacgcttgctcagtggttggaattgacccctcgcgagctcgattggttcgctgacgggcagggtagggaagcagtgcagcccagaggcccattgcggcactatgtttacaaggccataccaaagcgcggaggcagactgcgactcatcgagtctccaaagagccgactcaaggcgattcaacggagaattctggatcagatactctccgttattcctgcccatgacgctgcccacggcttttgtcgggggaggagtgtggtcacctacgctgctgcccacgccaacaaggatgtcgtgctgcgcttggacttagctgacttcttcccctctgtcccagcctcacgtgtccacgccattttctgcactgccggctatccaaaagatgtggcgagaatgctgacgggcatctgtacaaacgttacccccagggatgagctgcccgagagcttcggtgccgataatagaggctggaccctgctgcagagattactgagccctcatcttccgcagggagccccaactagtccggcactcgcaaacttgtccgcttaccgtctggacctcagactgagtgccctggcacaggcatctggcatcgcctttaccagatatgcggacgatttagcgttctccggggacgaggagtttgctaggggggtactgaggttctacgagaaagcttgccagatcgtgatcgaagaaggtttcgccgttcgaccagccaagactaggattatgaggaggggcgtacgtcagcaattagctggagtggtggtgaacgtccggcctaatgccccgcgaggtgaatacgacagactgaaagctattttgacaaactgctcgaggcacggcgttggatctcaaaaccgggagaagcacccttcctttagagaacatctgcttgggaggatcacctggctgacaagccttcatcccgaacgcgggaaaaaattgcgggcacggtttgatcgaatcgactggaatggggggtga

SEQ ID NO: 12569 - RNA, 1530 nt, synthetic construct
  source 1..1530: mol_type = other RNA
atggtgcgagagaatcgcgtgcgccacagatctggtgtgactccagagactttctatcacctggggcttcaagcccgcgattcacctggtgcctcgaccccaccgatgtcaagagggactggcctcgtggacccactagctgctcttaccttcaccgacgaaatgtctacccagcagaggttcgtcagaaatttggcggcggggatgcttgctggcgaatggacggccgcgggtcttagggaaagtgcctacagagctactggccacacatttgcctgggcacccgccctcgctaaacgagttctggaaacccacagcacagcccccccgtttcctacacttttggccgtgctgaccgccgatgctggcttccagagagctttcgccgccttagcatccgatcgtaatgccgacgaccgcttcccggtgtggcatctgttccctgtacccacccctcccccactaccacgtcccgaatgggcaaaagagctgcctgatctgcctaacgaacccgctctcgcagagtggctaggagtgcccctcgagaggctcctctggctggctgaccccaaagggcgcaataccggtcaccgacccggcagtgttaggacataccgggcccggtgggttccgaagacacatagcagggcacgcctcctggaggtcccaattccagcgctgatgcgggcacaacggaaggtcttggttggcctgctcaactccgtgcccagccacccagcagtgcatggatttcgggtcggcaggagcgccatcacaaacgccgctccacattgcggcagggccgtagttatacggtttgacctggcggatttcttcccatccattccagccggccgcgtcttccgcatgttcctcacgttgggctatccggagacagttgcacggcttttagggagcctctgtacaacccgactgcctacaaaggattggaatgctaggcctaaccccagaacggattctgccgaataccagacgagaatcaggctggcgactagacaccttcctcaaggagccccaacctcccccgcacttgcaaacctcgcggcacatagactggaccgtcggctggcaggactggcttcagcatgcggggctacttatagcagatacgcagacgacctgactttttctgggggagaggacgtcaggaggtctgcctcccggttagctcgaagagtagctctgatagcagccgaggaaggctttacattgaaccggggtaagacccgcatgcagggaagaagtgagcgacagaccgtcacaggagccgtagtgaacgtgcgacctaatatccctagggccgattttgatctgctgaaagcaattttgaccaactgtgtgcgccatggacccgccactcagaatcgggctagtcaccctgactttcgcgctcacttagccggccgtatcgctcatctggccagcgtgaatcccgtgcggggacgtaagttgtgggctacttttgacaggatcgcctgggatgccgattcaacccagtccgggcagtga

SEQ ID NO: 12570 - RNA, 1362 nt, synthetic construct
  source 1..1362: mol_type = other RNA
atgaccacccagcagaggttcgtccagaatctggcagcgggaatgcttgctggagagtggaccgcggccggcatacgtgaaagtgtgtatagggccacaggaaggcgttttgcttggggccccgcactggctaaaagactgctaaacgcccacgcaactgcccccacctttcccactcttctggccactctcactgctgatgcaggctttcaacgggggctcaccgttttagctagcgcccgcaacgccgacaaccgattcccagtttggcatctgttctccgcacctgcgcctcccccattgcctagaccccaatgggccgcggaactcccagatttgccaaacgagcctgcactggccgaatggctgggtgtgagtctcgagcggctgctatggctggccgacacgaagtcgagaaatacgggccacagacctggctctgtgcgtacctatagagcgcggtgggtcccaaaaacacacggtcgggcacggctccttgaagtgccgattcccgctctcatgcgcgcccagaggaagatcctggcagagctgttaaacttagtgccagcacatcccgccgtacatggcttccgacctggccactctgccatcacgaacgcagctcagcactgtggtcgcgcctgcgtgatccgcttcgacctgactgattttttcccatcaataccggtggggcgtatctttaggatgttcctgaccctcgggtatagcgaacccgtggcccgactgtttgggtgcctctgtactacgcgacttcctgccgaggattggaacagaaggcccaatccaaggaatgatagttctgaataccagacacagaccagactggcatcacggcatgttccacagggggcccctacttcaccggctttggcgaatttgacagcctacagactggattgcagattggctggactggcgagcgcttgtggcgctacctactcccgctacgccgacgacctgactttctccggggatgatacactaaggagatctgcagcacggcttgctcgccgcgttgctctcattgtcgtagaggagggattcgcactcaatcggggaaaaacccgcgtgcaaggtcgcggcgagaggcaattggtgaccggagtcgtcgttaacgtgcggccgaacattccccgagaggacttcgaccagttaaaggccattctgacaaactgcgtccggcacaatcccgccacccagaatcgaacaaatcatcctgactttagagctcaccttgctgggaggatcgcccacgtcgcctccgtaaaccctacaaggggccggaagctgtgggctacatttgaccgcatcgtgtgggacacaaatagcgcccagagctga

SEQ ID NO: 12571 - RNA, 1359 nt, synthetic construct
  source 1..1359: mol_type = other RNA
atgactgcaaatcggttcgtgtcaaacctcgcggctgctttgctagcaggggagtggtcagtagccggattgcggacatccgtctatcgcgcaacgggcaagcgctttggttggacaccccggtttgccaagcgggttcacacagcgcacgctaccccacccacttttaatgagctgttagcctttctcgggcgggaccctggatttgtgcgggctcttgctgcactggctactgcaaggtacccagccgaccgctttcccgtgtggcacattttcgctcctccagagcctccgccaagaccaagacccgattgggccagcggtctgcctgtgctcccaaacgaacctgctctagcagagtggctcggtgtccccgtcggacacctgctttggctagcggatcctgccgggcggaacgcaatatctaaaggcgtgcgcagctacagagtccgatgggtcccgaaacctaaggggagggctcgcctgctcgagattccagtgcctccactaaaaagagttcagcgtaagttactggcagacctgcttaatcacgtgcccccgcatcccgctgtacatggctttcggcccggcagatccatcgtcaccaacgcgaccccgcactgtggccatgcaatcgtgatcaggtttgatctcaccgacttcttcgcctccgtacccgttggtcgcgtgcttgctctgttccttgccctcgggtaccgtgagagtgtcgcccgtctcctgtccggcctgtgcacaacacgactggcctcaaatgattggaacgaacgacccaatcccctgaatgacggatctgaacacgccacgagagccaggctgacatctcgccacctccctcaaggggccccaacttcgcctgccttagccaacctggtcgcattgcgcttggatagaagacttgccgggttagccgccgcttgtggggctacttatacccgatatgctgacgatctgactttctctggcggggagctcttgcggaggaatgccgctaggtttgtgcgcagagtgacgctgatagcggccgaagaaggattcgccctgaaccgtggcaagaccagggtgatgggtggcggaggtcgacagactgttaccggagtggttgtgaaccagcggcccaatgtgccgagggcggagttcgatagattgaaggccatcctgaccaactgcgtcagacacggccccgcagaccagaataggagtggacatcctgacttccgcagccatctggccggacgagtggcatacgtggctggagtaaaccctgttaggggcaggaaattgtgggccctgttcgaccggattacctggccaggcgcacatacatatccagcaagctga

SEQ ID NO: 12572 - RNA, 1383 nt, synthetic construct
  source 1..1383: mol_type = other RNA
atggatccccagcagaggttcgttaggaacatagccgcaggcatgttggcaggagagtggagtcgcgctggccttcgggatgcaattcggagagctacagggagagagtatcgatgggcttcgcctctagtgacacggctgctcgcggcacatatcgaaccaccaagctcaatcgccctgctcgacgtgctggtcagagatactaccttcgccggggtattagctaggcttgccggtgcccgaacagccggtgacaggtatccacggcgcaccttgtttgccgtgcctggcgaagccattcctcctgcccccacatggaatgctgacctgcctcgttgggacaccgaacacgattgtgcggatgccctaggcgttgccctccctcagttgctctggttggccgatcccaccggccgaaatccctacagacgggacgaaaccctgcgcacttacagggcacgctgggtgttaaagccacgcggcggtgcccggttattagaggtgccgaaacccctgctccgcaggacccagagaaggctggtcgacctgctcctcaaccgagtcgctccccatcctgccgctcatggattccgagcagggcggagcgcagtgaccaatgcagccgaacattgcggacgtgctgcggtgctgaggttcgacctcactgacttcttttcttccatcgtggctgggagaacttttggcctgttcagaaacctgggatatccggaacctgtggtgcggcttctgggcgcactgtgcaccacaaggttgcctagggcggtctgggatgtgcgcccacacccaacggcggatgggagtgactacccagcctgggtgagagtcaatactagacacctgccacaaggggctcccactagcccagcgcttgccaacttgattgcttatcgcctggaccgtaggttggctcgcctggctgctgcctgtggagcaacatacacgcgttacgccgacgacctgactttcagtggaggtccgggccttctgagggcagctaggggtttagcacggcgggtggcccttattgcggcagaggagggctttcgcgtgaaccgtggaaagtctagagcctacggcagaggaacccgacagaccgtgacagggatcgtaactaatgtaagaccgaacgtcacgcgcgcagagtttgatctcctgaaagccatactaaccaactgcacaagacacgggcccgccggtcaaaatagggctcaggtacccgacttccgagctcacttagccggacgggttgcccacgttgctggggttaatagcgtccggggcagaaaactctgggagctgtttgaccggatcgtctggcccgttgatgagtcttcatccatgatcgatctgaaggattcctga

SEQ ID NO: 12573 - RNA, 1329 nt, synthetic construct
  source 1..1329: mol_type = other RNA
atgccgaccttcgacgccgagcgattcttatttagcctcgctggtgggttaagggctggcgcatgggccgatgcggatctgagggcagccttgcgaggagctgcctctgatcggccggtaagggccccaggactagtgccaagactccttagaagattccacggaactcccgggtatggcgagctgctgttgttcctcgtgaatgaccctgggctggcaagagctgtggaccggctgacctggtcaagaccacagcccggcccagctaaaccagccatgggacaacctccgcctaggctgggcactctggcgattccagcgcttgctacagaggccgcattggggacatggctaggagtgggacccgaccgtctgcgatggctagccgacctgacaggccggaatcggagacacccacctgggccacttcgcacgtaccgccacaggtgggtacccaaagccgatggtcgcgccaggctgctggaaatcccaaggcctggcctgaagctggtgcagcggaagatactggctgacttgcttgatgcagtccctgcccatcctgctgcacacggctttagacccggtcgtagtgctgtcaccaacgccgccgaacattgcggtagggcggtagtggtgcgcctcgacttggcagatttctttccctctgtcccggccgctagagtgagtcggatttttcgcaccctcggctatccggatcccgtagctcgcctgctgaccggtctgtgcactactcgggtgccagcggatgtgtgggatacgcgtcccaacccagggcctgctgaccatcctgcgagggttcgctttgcaggtcggcatcttccccagggagcacccacatcacccgccttagctaaccttgctgcacaccgtctcgatagacggctcgccagactcgcaacagccgttggggcaacatacacccgctacgccgacgatctggccttcagtggcggcaatgccgttaggcgcggagctgcacgtctcgctcgattggtcgccgtcgtcgctagagaggagggcttcgccgtgaaccctgggaagacccgggtcatgaccagagccggacggcaaacggttactggcgttgtggtgaatgctcgccccaatttgccaagggccgaattcgaccgactcaaagccacactgactaactgtgtcagacacggtcccggaggacagaacaggggagggcacgcagactttcgagcccaccttgccggtcgagtggcgcatctggctgccgttcatcctggtagggggcgcaaggtgtgggcgttatttgaccggatcgcatggcctgcaggctga

SEQ ID NO: 12574 - RNA, 1332 nt, synthetic construct
  source 1..1332: mol_type = other RNA
atgctggaccgcacacgcttcctgttcgctctggcgggtgcatgcctgcgtgaaccttggactgctaccgggctgagagctgccttggacagagccgctgcaggacatcgcgtgcacgtgcctgggcttgcagccagaatcctggggcacttccctgagccaccgggatacggtgccctccttgcgtttttggtagccgatgccaggctcatgcgtgcactgaacagacccactggcagagccatcccaaaacggggcagacccgctatggacagccctccaccgagtttagccgcagtccagttgcccccacttgccacggaggtggccttagccgctcacctcaaccttgatccagcccggttaaggtggtatgctgatctgacgggaaggaaccgacaccacccacccggtcccttgaggacgtatcgccatcggtgggttgcaaagcctgggggacgcgctcgactactcgaagtccccaccttctccctgaagcgcattcagcggactatccttaccgatattctgaatcacgtgcctccccatcccgctgcacatgggtttcgacccggacggtctgccgtcactaatgccattgagcattgtggccgaagcgtagtgatgaagtttgatcttgctgacttctttccatcagttgccgccgcacgggtggtgaggctgttcagaactctaggctaccccgaagccgtggctaggttgctggctggcctctgtaccacaaggacaccagcggacgtgtggaaagcccgtccaaatcccgccgcggatggttccgaccatgtaagccggttgagactggttgcccggcacttacctcaaggcgccccaacatcgcctgcactggccaacttggccgcccataggcttgatcgccggctagcagggctggctaccgcaataggggccacatatactcgctacgccgacgatctgactttctcaggcgatatcgacctagcacgccgcagtcacaggctcgcaggtctggttgctgaagttgcttccgaggaaggatttgccctcaacgctcggaagacccgagtcctcaggcgtggcggacgacagacagtgaccggagtcgtggtgaacgccaagcctaatctgcccagagcggcttacgacaggctcaaagcgacactgaccaattgcgtcaggaaaggcaccgcttctcagaatcgggagaatcgggccgactttagagctcacctcgcgggtagagtcgcacacgcagcagcgataaacccggcccgtggtagaaagctgtgggccctgttcgacgcaatcgcttgggctgagcctccgccttga

SEQ ID NO: 12575 - RNA, 1386 nt, synthetic construct
  source 1..1386: mol_type = other RNA
atggcccagagcgcacgtggcaggttcgttgctaacctggctgcagccttagtcgctgggcgctgggaccgacgagttatgcgtgccgctgctgctgctgcagttggagggaagcccgggtggttggccccattagtaaggcgggtgcacgctgcctaccccgaaaagcctcagttcgacccggtgagggcttttctagagcgggaccccaccttggggagggtgattgaccgcgatggaccacctgctgtggtgagggtcttcgttcctcccgccgagatgcttccgcctcccactgcagccggcttggtggaacttccccagctgcccacagaagctgcactggcggagtggctgggcattacaccagcacgcctgctgtggcttgcagacgcctctggccgcaatcgaaaacatccccccgggcctctacgaacctatcaccatagatgggtaccgaagccaggcgggagagctcgtctgctcgaagtccccgtgcatctgctaaaagaggtccagcgggatctgttagagcggctgctcgatagaatccccccacatccagccgctcacgggtttaggccaggtcggagcgtggtgacgaatgccaggcctcactgcggcagatctgtggtgataagattcgacctgcaggacttcttcccaagtgtgtccgcggctcgggttagagctatttttcgtacattcggttatccggaagccgtggctcggctcttgaccggactctgcacaactcgcctccctgctgatgtctgggatgcacggcctaaccctgccgcggatggtagcgatcacccagcctggcaacgcttggccgcaaggcatttgcctcaaggagctcccacctcaccagccctggccaatctggccgcctttaagcatgatcgacggctctcaaaactggcagctgccctgggtgcagactacactcgctacgccgacgatctgaccttttccggcagtgttgagctcgcgcgtggcgcaaagagactggcaacccttgtggccgtcatcgccggacaggagggttttgcggtgaaccacagaaagacacgcgttatgaggagggcgggccgacaagaagtggctggagtggtagtcaatgctagacccaatgtgagacgggccgagtatgatgagatcaaagccatactgactaactgtgttaggcacggacctgcggggcaaaaccgcgcaaaccacccagacttccgggcccatctcacgggcagagttgcccatcttgcagcagtccaccctgcgcacggtcgcaaactctgggcccttttagtccggatcgaatggagagccgccaaggtagcaggaggcgaacaggccgagactgccaccgacaataacaggtga

SEQ ID NO: 12576 - RNA, 1353 nt, synthetic construct
  source 1..1353: mol_type = other RNA
atggcgaagaccgcccgcgggaggttcttggataatctggccgccgcgcttgttgcgggtagatgggatcggcgagtgatgagggctgctgcagttgctgcagtgggggggaaaccgcgttggctggctcctcttattaggcgcgtccacgccgctttcatcgataagcctcattttggaagggttcgggctgccctcgagcaggacgaacagctaattagagcagtagccgcggacggacctccaccagtagtacgcgtgttcgtgcctccggcagaaatgctacctccacccgccgctgctggtccagttgaactgccgcaattgcccacggaggcagcagtggccgaatggttcagtacagaccccggcaaactcctgtggtacgccgacccagctggcaggaatcgccaacaccctcccgggtttctgagaacatatcggcacaagtgggccgctaaacctggcggccgatccagacttatcgagatgcctaccgagtcactgaagcggcaccagagatggctgttaatctccatcctcaacaggataccaccccatcctgctgcgcatggcttccgaacaggacgtagcgtcgctaccaatgctggaccccattgcggcaaggccgtagtgattcgcttcgatctagccgactttttcccatctgtaagcgccgccagggtgcgagcgatttttcggaccttcgggtaccccgaggtggttgctcggcttctgacaggtctgtgcaccacgaggctgcccgcagatgtctggaacgctcgccccaatccagctccagacgggtccgaccacgcaacctggcaacgcttgaatgcccgccacttaccacagggggcacccacttctcccgctctggcaaacttggtggcctttaaactcgactgtcgcctcagtaagctcgcggccgccttaggcgcagattacactcggtatgctgacgatttgacctttagcggaggcgatgagctggcccggggatcaaagcggctggcaactctggtggccgtcatcgcagccgaagagggctttgcccttaatcatagaaaaacacgggtgatgcgaagggcaggtcgtcaggaggtcgcaggagtggtggtcaataccagacctaacgtcaggagagcggaatatgatactattaaggccatcctcactaactgtgttaggcacggcccagccggtcagaaccgtggtaaccatcccgacttccgggcacacctcactgggcgagttgcccacgtcgcagccgtgaacccggctagaggaagaaaactgtgggccatactggacagagtgacatgggaggctcatgaacctgccgccaggtga

SEQ ID NO: 12577 - RNA, 1320 nt, synthetic construct
  source 1..1320: mol_type = other RNA
atgctggacacaacactggccaacctgcttgatgcctttctggcagggagctggaccgaggatcgcctcgtagccagagcgaaagctgcgttgggccggtcgcataggtttatccgtccctttgtgcggagagtgttagcagcgttcccagctcctacccattccgatcgactcagggtattcgccctggccgacgaggagttcagaaaggggtggcgaagagcggaaccccatacagcaaagagattcttccctgtccccgtcatggctccacaccaagctgctcgcggatggctgatcccggagatcaccaccgcagagaaggtgtgcgaggtgctcaggatcgataggcaccagttggattggctggcagactgtgccggccgaaaccaccgtgagagctctcctaaactccaccactatcgttaccgctggattccaaaaccctccggccggagtagggtacttgagattcctaagccaattctcaagcaggtgcaacgtaacgtgctgggtcagattctggatgcaattccaccccatgctgctgcacacggctttcggattgggagatccatcctcacaaatgccgtgccccatagtgggagagccgtggtcctaaggtttgaccttgcgatatttttctccagcattagcgccgatgctgtcacagctatctttcggactgctggttatcccccggacgttgcccggcaactaaccggactgtgtactacgaggctgcccaaagccgtgtgggatcagaggcctagaccggccgcagatggaagcgactcactggaggagagacacctcagaaatcgccatctccctcaaggtgcccccacgagtccagcactggccaacctggttgcctttaggttggaccggcggctggacggactggctaagtctttagatgtcacctacactcgctatgctgacgacttggcctttagcggcggcatcgaccttacaaggcgctctgaaaaattccgcaacgcagttgcgcggatagtaagtgaagaaggtttccggctgaatccactgaaaactcgcgtcatgccacagtctgttagacagactgtggctggagtggtggtgaacatccgaacctcaatacctcgcgccgaattcgaccgattaaaggccgtcctaaccaactgcctcaggcatgggcccgaatcccagaatcgcgaagcccaccctaatttcagagcatacctggccggcaagcttgctcacgttgccaggttgaatcctactcgagggcgtaagcttttggcattattcgatcagatccggtggcagtcagcctga

SEQ ID NO: 12578 - RNA, 1344 nt, synthetic construct
  source 1..1344: mol_type = other RNA
atgtccaccagacatagtattgcacggaacctggctgccgcctttctgacagggacttggtcactcgacggcctagtccagcaaggcgcaagggcctgtggcaaacgagaacgatggttgaggccgttagctaggtgtgtcctagcggctttccctgggccacctgcaggtattgaccccgaggcactggccagatggatggaggagaaccctgtgttcaggactgcatgggccaaatatggcagggagggtcgctttcctcttggacaggtgttctgggtccccccgcggatgactcctagaaccggtgcaccagcaacctggagggtgcctcccttgaccacatctggcgcgcttgctgagtggctggggctgaaacccaaggagctggattggtttgctgactgtcatggcggggaagagaaactgcccccaggcccactgagacactatacttaccgctggttggtcggtcggagccggaagctgcgcttgctggaaatgcctaagcagcgccttaaagcactccagcgacgagtgctccacgatctgctcgatcatctcccctgccacgaagcagcacacggataccggaggggaagatccgttgccacatacgtggggccccacactggacggagaattgttctgcatcttgacctcagagattttttcccatccatccggtcgtctcgcgtgcaggccctatttcggaccgttggctacccctttccagtggcgcgcttattgaccgggctgtgcaccaacgtagtcccgggagaggtatggcacagcagccccgtgcgtggagaaccaggcgaatggaatcgttctccccactaccaggtcccacatctgcctcaaggagcccctacgtcaccggctcttgccaatctgtgtgcctaccggctggactgccggttgacgggacttgccagggccgttggtgctgcgtatacacgttacgctgacgatctggccttctcagggggccgcgatttggaacggagtactagagggttccaggtgcaggtagctcgaatcgcgctggaagaaggttttgaggtgcatacaagaaagacaaggtttatgcgccaaggcgttcgtcagcagcttgccggagtggtcctgaatgagcacgccaacttaaggagggaggagtatgaccgcttaaaggccatactcttcaattgcgtgagacacggccccggcctccagaatcgagaaggacgcccagacttcagagagagcctggctgggcggatcgcttatgtgcaaatgctcaacccttccagagggcgacgtctccgcgagctgttcgataggatcgcctgggaaaagtga

SEQ ID NO: 12579 - RNA, 1269 nt, synthetic construct
  source 1..1269: mol_type = other RNA
atggcaacttttcacgtggatcctgacttcgtggagcagctcgccgctacgttacgagccggcaattgggtgcggctggctctcaaaagcagggtgtggttcacattccccgacgatcgtgccctgaccgcgaaagtggtcggccaggtctgggagcacttcggaggtagccgaccctcactgaaacagctcactaagttcctcaagaaggctatcagcgcgctgccacacgaacccgaacagagggcagtacccgttgagccagcccctatgacggccagatggcccgtacctgtgctggcaacaccggtccagctcgcccattggctgaatgtgcctttgacccgccttgagtggctcgcagatattaaggaatggactctccggcaagccgatgcaaagctgaggcactacgtgaatgtctgggtgcctagaagaagaggcaaacccaggcttcttgaggcccctaagccccatctgaaggctatccaacggagaattctgcacgaaattcttgaccacatccccccgcatgacacagcccacgggtttaggactgggcgaagtatcgtctcctacgcaagaccccatgtgggaaagcaaatggtcctgcattttgacctaagggatttctttgcttcagtgtcggccgcaagagttagagctatttttagaactgctggctatcctgcagatgtagcttctctgctgaccggcctgtgtacaacccgaaccccagacgatgtgacggttgccgggattcactggaggcgacgccatttaccgcagggagcccctacttccccagccttcgcgaacttagcggcgcgtcgcatggacgtcagattgtccgccctggccgagaaacttggtgccacctacacccgctatgctgacgacttggctatctctggcggacacgaccttgagcgggcagttcgccgggtgaacgtactggttggtataatagcaggcgaagagggttttgaactcaacttccggaaaacacgttttatgcgccagagtgtttgccagcaggtggccggagtggtcgtcaacgtgaaaaccaactgtcgtagggaggatttcgatcggttgaaggccatcctccataactgcgctcggcacgggccagcctgccaaaatcgcgagcggcacccagactttcgccggcatctattggggcgagtggcacacctgaggcatttgaatccagctaggggagcccgcctgcaggctctattcgaacacatcgattggacaaggtga

SEQ ID NO: 12580 - RNA, 1371 nt, synthetic construct
  source 1..1371: mol_type = other RNA
atgaccgaatggaccttcgacgctgatgatcttgacgaagacgaagaggacgcagaccctcctcctggacccgcagagctgagactggcaagagccctggccctcgcctttctgggcactgatggaagacggcgcgccatgatcgaggccgcactagctaccctgcatgtgcctgatgaggcacgcgctcgggcttggataggtgcactggtggctctagttcggaggactttcgaccccctcaggagggccagcctggatgagctgaccactactatcgctcacgggcgcgcattagctcggagggatcgtggggtgcatgttgtgcgctgggtagccacaccgggcgaaatgagagccccgaggtgggatgtgccacggatcgacaccgttggagacttagcacgctggctggacgtggagatcggcgagttggattggctcgccgatagacgagcgatgctcgtcagagccagggttgggcccttgcatcactacgtacggacctgggtacctaagccatccggcggcgccagactgattgaagctccaaaggcccgtctggccgccatccagagaagggttcttcgcgaggtcttggagcgcgtgcccatgcacgatgtcgctcacggtttcaggcgtggccgctctgtggccacatttgtcgcaccacacgtagggcgcgccgttgtcgtacgggtggacttggaggacttcttcgctagtgtgacccggggccgggtgataggaatctttaggtctgcgggttatcctgaagaaattgcccgcactcttgcggcactgtgcacaacacgaacacccgcctccgaaatgagaggaatcgagcatgcagtccgcgcccgattacgtgtgccccacttaccccagggagctccaacgtccccagcgttggcaagcctcgcagcgtttcggctagacgccaggattgaaggtctggctcgagccgtcggcgcacgatgtaccagatacgccgacgatgtcgcactgagttttgagagggaccgcagccatggcgctattgacagagtgattgcccggattgctgagatcgcccgagaagaagggttcggggtggccagccacaaaacgcgtgtgatgcgccgaggggcgcgtcaatcacttgctggcgttgtggtcaacgaaaggcctgccgtggcacgggaggaatatgagcggcttagagctatcctccaccgggcagctacacgaggaccatcacccgatgagctgggtgcccacagggatctcagggcccatctggctgggagaatcgcctggatagcgcagtggtctgagaggagaggagcgaaactggctgctatgctcgctagaattgactggtcggcttga

SEQ ID NO: 12581 - RNA, 1368 nt, synthetic construct
  source 1..1368: mol_type = other RNA
atgacggattccactttcgatgattgggaagatgacgacgacgacccagaggacttaccgcccggcagacgtgcatggcgcttgtctagagccctggccctggcattcctgggcacagatggctcacgacgagcaatgatcgatgccgctttggcggccctcagagtgccccatgaagcacgcgcccgtgcttggcttggcggacttgtcgctctagtcaggcgtacctttgaccctctgccaagggcctcgctggacgagctcacaaccactatcgcccactctcgagcactcgcccggtacgatcgcgacgcagaaattgtgcggtgggtcgtaaccccaggtgcgcctctcgaaacacggtgggatgttccccggattgatacagtgggggaccttgctcggtggctggaggtggagatcggcgaactggattggctggctgatagacgcgctatgcttgtacgcgcccccctgggaccactgcatcactatttgaggacctgggtcccaaagcctagtgggggggctagactgatcgaggcccctaaaagtcggttggcgtccatacagaggcgcgttctgcgcgagatcgtggagaggatcccaatgcacgacgtggctcacgggtttaggcggggcagaagcgtggctacattcgtcgctcctcacgtgggaagggccgtggtagtgcgggtggaccttgaggatttctttgcaagcgtgactagaggaagggtgattggcatttttcggtctgcggggtatcctgaggaagtggccaggacactggcagcctcatgtaccacccgaactccgtccagagagatgagaggaatcgaacatgctgttcgcgcacgcctccgagtccctcatctaccccaaggagctccaaccagccctgccttagcatctctcgctgctttccgcctcgacgccagggttgagggtcttgcaagagccattgatgctcggtgcacccgttacgccgacgacatcgccctgtcattcgaaaggccacagtcccacgtagccatcgaccgcgttatcgcgagaatagctgaaattgccagagaggagggctttagagtggcaccccataaaacgagggtcatgaggcatggtgcgcgacagagtttggccggggtggttgtcaacgagaagcccgcagttccgcgggaggaatacgagcggctgcgagctatcctacaccgtgcagccattgaaggacccagggccgaagacctcgccgctcatagggatctgcgggcccacttagagggtcgaattgcgtggataggccagtggagcgagcacagacgggcaaagctggccgcaatgttggcccgcatagaatggactccctga

SEQ ID NO: 12582 - RNA, 1293 nt, synthetic construct
  source 1..1293: mol_type = other RNA
atgactagagcagatttagctgcgcgcgccatcgctgacgccttactcgatggcgagtgggcactggagcccatggttcagcgccttgggacaacttttggcgccagacgagcatggatgactaaactcgcccgtcgggccttgtcactttttcccagggctcctgccgatgcccgagatctccttgccagaaccgctagaactctacccggatttcccgcggcctgtcgagccagagtgagacactgggcgatccctgaaccacgaatgggccgagtcaggtggccagtgcctacgatcgaaacagcggcggacctttccgcatggctaggcgttgatgcagcggccctggctgtcttggctgacaggagagggttggcaagggacgcagacccgaagatgagacactacacatacgagtggatcgctaagaggaccggcggacggcgcttactagaggctcctaaacaacgcctgaaggccgtccagaggcgtatactgcatggtgtgcttgatgcaatacctgcacacgatgctgcacatgggttccgcgctgggcggtctgtcgtaagcttcgcccgcgttcatgtgggggctgctttggtgctgagagtggacctggaagctttcttccacagtgtgttcgccggcagggtttatggtatttttcggggggccggataccccgaagatgtagcccgcaccctgacagccctttgcacccacagaagcccgcgggatgtgttggctggtgccccaagagatctggttggcgatcgcccccggtccttacagcgccttcggacacctcatctgccacagggagcaccaacctcacctgccctagccaatctggccgccttcgccctggatgtacggctggacgcactggctcgtagttggggtgcgaggtattctaggtatgccgacgacttggtgttctccgggcgagtagcacagccccagaggcttgtggctgccatcgaccacatcgtgagggatgagggattcctgattgctcggcacaagactaggctcctccgtgcctcgacgcgccaagaaattgcaggcgtggtcgtgaaccaaaagaccagcgtcagaagagacgaggttgacaggctccgggccattctccacaattgcgcccgtaccggaccagctgcgcagaacagggacggacatccagactttcgggcccacctgttgggcagagtcgcttgggtggagcaggtgtctcccgacaaagcacgacggctccgggcactctttgatcatctgcgctgggacacatga

SEQ ID NO: 12583 - RNA, 1323 nt, synthetic construct
  source 1..1323: mol_type = other RNA
atgacatggctggtgagggagtttgcaggagcattgctcgcgggcccttgggagagacgtcccatgatcgcccggctggcatacgtgacgaacctccctgaagctggttggattgtgaaactagtggctgccgttctcaggaagcacggggagccaccggatcacgaagccctgaccgattggctctacagccaccgacctcttcaacgggtactggtcgatcccgaaattaggatcaggcggtggctggagcctccgttggagatggccgactctccctgggatgtgcctcccctgggaagtcgcaaagaactcgccacctggttaggtctggacgtgcagcgactggaggctctggctgacgagagagggcgtgtcagagaagcacgggaacagcggatgagacactatagatatacgtggatagcaaagagagcaggggggcatcgtctcctagaagcccccaagccaagactcagggcggtccagcggttagtcctggacgatattgtcgcaaaggtccccccccatgatgctgcccacggattccgagccggccactcagtagtgggctttgccgctgtccacgtgggccgtgaggtcgttatccgcgtggacctgcatgccttcttcgcctcagtttccaggccgagggtggctgcaatattcagatctgccggatatccccgggaaatcgccggagtacttgcagcattatgcacccatcgaactccaagagacgtgctggcggcggctccatcaagggagtggtccgaactggctaagttgcgcggggctcaccttccacaaggagcacctacttctggcgcgctcgccaatctggctgcctatcgccttgacgtgagggtagctgcacttgctgccgctattggcgcatcgtacactcggtacgccgatgacttggttctctccgggccaagagctttggctcgcgctgccagttccatcgttggccgcattggcgccattgcccatgatgagggctttgcactgaactttcggaagacccgggtcatgactgccagcgatcggcagaggatcaccggtctggtggttaatgagaaattagcagtgacacgagatgaagttgaccgcctacgcgccatcttgttcaattgtgcccgtacagggccagccgcgcagaacagagagggtcatgccgattttcgagcacacctgctgggccgcataagctgggtgagcgccgtggaccggggaaaaggagacagacttagggctctgttcgacagaatcaggtgggacgaggcgcctgctgatgccacagacgaggacgtgcgctga

SEQ ID NO: 12584 - RNA, 1233 nt, synthetic construct
  source 1..1233: mol_type = other RNA
atgaagtggttggagcccgcgctagcgcgtacagttgctgaggcccttgcggacgctcttcctggtagccgcgaagatcgagaggccagatgcctggacgtgttgggagcctgtgacgaggaagctctcgcaagcttattggaacgggtaccaccagcactgggctggcgtgcattggtggcctggatccttggcgatgacgcatttgggagactgctggctggcggagtcgctgttgaaccaccacgggccatggcaccatcccgctttgaggtcccttcattagatacggagggtgacttagcagcttggctagcggtgaccccccgagctctggaagccttcaccgaccctaccgatgctaccagacgcgcccctaggggtccgatgagacactacacgcacaggtgggttggcgctagactcatagaggcccctaagccacgcttgagagccatccagagacggattctgcaaggagtgctcgacgcagtgcccccccatgatgcagcacacgggtttagacgcggccgaagtatcttcacttcggcagcgccgcatgtgggaaaacccgctgtcctccgagtggacctcaggcgtttctttcagacaattcaccttgccagagttgtagccgtcttctctgccctgggatatccccgggcggtgagtcgagcttttgcacgcgtgtgtacacacgcagtgcccgacgatgagctggttgggcagcctttcctgactagacagcgcctccgcactaggcatctcccgcaaggggcacccacatcccccactctggccaaccttgctgctcacggcctcgacgtccggctttcagccttggctcgggcagctggactggcttataccaggtacgccgatgacctcgtcttctctggcgatgtggcccctggctttccttctcgggtggccagcatatgcgccgaagaggggttcccagtggccacagaaaaaactaggctgagaagggcctccgaccagcaacgggttgtcggactggtggtcaatgatcacctgggggtcgcccgtgtagaacgagacaggctgcgggccatcctgcacaactgtgcccggtccggcgtaaacgctgagaatcgcgcggggcatgccgatttcagggctcatctggagggccgcgtgagctttgtggagcaagccgatccaaggcagggtgcccggctaaggagactgttctgcaccattccttggtga

SEQ ID NO: 12585 - RNA, 1278 nt, synthetic construct
  source 1..1278: mol_type = other RNA
atgaagcggagggatccatctcgggatatcgccctagccgcgttaggggaaacatggtcaccagcggcaatagagggcgcattggccgacctcttcgcctcagaacaacgatggatgcgagctatggcacgtcgcatgacccggaggttcggtgaagctcccccccttgatgtgctggaggcttttgtgagggccgacagggaccttagacaggccagacgcctgctcgtccggcatccttctctggccatgccccctatgcctccttccagattcggtgcaccccccattgcgagcatgggcgatctggcgaccttactggaggtgccagtggaggatctggattggctagccgaccgcaggggtaccactcgtgacgctgaggctcctgtcagacactatcgggcacgctggatccctaagagaagcgtcggatggaggctggttgaggcccccaaagcccgactacgccgagcacagaggtgtttgttggatcgcgttctggcaagtgtccccccacatgaagccgctcacggctttgtgcctgggaggagcgttctggaccacgccagagctcatgtacgccaggccgtggttgtgaggctcgacctcgaggacttcttcgcctctgtgccagcagctcaagtgcgtgccgtgttccgtactgctgggtacggagaagacgtggccgtcgccttgacggctttgtctaccaccagaactccccctgccctgttacggagtccctgggtttcccggttcgaaacaagacagcggcttgctcatcgccacctgccgcaaggcgcaccaacatcgccctggatagcaaatttagctgcgtacaggctcgatctccgggtgtccgcactggcaagaagcctgggcgctacttacacccggtatgctgacgatctcgtactgtccggcgacgagggatttgcgagaggtgttgagaggctcctgccacgcctgggtgccattgctatcgaagaggggtttgcgcttcagcatcgaaaaacgcgagtcacacgtgccggagcctcacagagagtgtgcggtctggtcgtgaacgagggcgcaagagtaagccgccgagagagggagagactggaggccattctctttaattgcgtaaagcacgggccagctagtcagaacagaggagatcacccgcgctttcgggaccacttgctgggaaggatcgcctgggtggaacaggcacatgaaccgcacgcagctaggcttcacgcccttttcgcccggatcgaatggccttga

SEQ ID NO: 12586 - RNA, 1599 nt, synthetic construct
  source 1..1599: mol_type = other RNA
atggccgctgctcctgaacatgtggcacgggcaattgctgatgcttttctgtgtggaccgtggaccgccctaggcttaagggcgtctggtgccgaactctttgcacgccgggcccgatggctggatcccttaataagagcaacgctccgcgcatttcctgacccacctcgcgcaagcagagacgctctggcaagattcctgggtccccacgtcgagaggttgacagcccggcttgaaccacctcgctggccacctgtgcgtcgacgtctggtacctgcccccgcaatggccgaaagacgcaggtggcctgtgcgggagttggcaactaccgcagagctcgctcgctggttgggcctgactccaggcgaactggattggtttgctgataggcatgggaccgctgccagggcagttgaccctcgtctggtgcactatagagagacgtggatccccaaacgctccggggtgggtgaacgcctactcgagatcccccgcccccgactaagagccatacaacgcgctatcctggacgaaattctggtggccatcccacctcatgcggccgcactaggattccggagaggacggagtgccttagatcacgcgtccagacacgcagggagggctgttctgattagactcgacctggaagacttctttgctgccacaccggctgggagggtatacgggacattcagagccgctgggtaccctgctgaagtggcccttaccctcacccggttgaccacccgtagagccagtcccgatgcgcggagaagagcgcgaagatggaccccagcgcatggggatggatctggaggcacactccagagcgaaggcggtcggacaagcggacgccttgctgctgctcacctgcctcaaggaagcccaagctcgcctgccctggccaatctggcggcttttcatctggacgtccgtttagccgcactggcagaggccataggtgcccgatactcccgctatgctgacgatttggccttctccggcgaagacacacttgagagggcggccgagaggcttctcccaaggatcgccgccattgtcatcgaggagggcttccggccgaggttccgcaagactaggattgagcgggccactgggcgtcagacccttatgggcttgacagtgaacgtgcggcctgccgtcccaagagcagaacgtgagcggctgcgagccatcctcactaactgtgtgaggcacggccccgcatcacagaatagggagcggcatgcagacttcagggcccaccctaggcgagcacgggatgttggtcgggctagggagagacgatcaagagctgccgctgctcacgccgctagaagggatcggctggacgcgctcagtcagaccgaagccactcagcaggagcctgccccagcttgcggagatccatcccgcggtgatggagcacccagagcgacgaagaccattggcgccacaggtgtcccatctcccgttgccgggtcttcagaccgagacaggtcagaccggaggtgcgacaccgagacttgccgatggagaggcactcgcagaccctatccagcaggtgggagggccggaacttgtccgacagagtga

SEQ ID NO: 12587 - RNA, 1329 nt, synthetic construct
  source 1..1329: mol_type = other RNA
atgtctcctaccatagtggccgacgccctagccgccgctttcttagatggcgcctggtctgctccagcgcttgccagacgaggggcacgtgctctagggcagagcacgaggtggctgccggcattagccaggagggtagtcgctgctttccccgatggcgcacccagggatcgatttgaagccctcgccacattgcttgcccgagacgcagcagtgaggaaagctggaaggcccgatgctccctggcggctagtcattacagctccaaccctggctatgcgagacgcccatccagaatggcgccttcctcgcctccatactgctggggacttggccacctggcttgggctggaaatcggcgacctcctgtggttcgcagatacacgtggtttgtcccgccgtcggagggctgtggcattggatcattatcaccgacggtggctgccaaaaaggtccggcggagccaggctagtagaggcacccaagcgctggctgaaggaggtgcagcggagaatcctgagggagctcgtggaaagaatacctcctcacgaagccgcacatgggttccgccgcagaagaggagttctgagccatgccgcccttcacgccggaagggatgtggtcctgcggatggacctggaggacttcttcgtgagtattccggcttcgcgggtgtttgcggtttttcacgctgctggctaccccttggaagtcgcgcgcctgcttaccggtctgtgcaccacaagagcccccagtgacccaggcgctccaatgcctgccacgcctaccagggcagagttagaggcacggcaccgcgcaagagagcgatacgccgagagacacctgccacaaggcgctccgacttcacccgctctggcaaacctctgtgcttggcggttagacgtgcgcctcagcgcagctgcaagaactgcgggtgcagtttacactagatatgccgatgatctcgtgttttccggagacgatcggttcgccagatggcctgcggccagatttgcctacgtggtgggcggaattgccatcgaagagggcttcaatgtccagcaccggaagaccaagctcatgagagcggggacacggcagcaggtcacaggtctggttgtcaataggtcagcggctatccctcgacgcgactttgagagatataaagcgattctccacaactgcgttctgactggacccgatcggcaaaaccgggatggccgaccagactttcgtgcccacctggaaggagtagtggcctgggtgacccatgtacagcctgcacgtggggccaagttggccaaactgctggacgccatccgctggtga

SEQ ID NO: 12588 - RNA, 1329 nt, synthetic construct
  source 1..1329: mol_type = other RNA
atggaccgtcgtatcgttggcgaagccctggccgctgcctttctcgacggaacgtggagcccccagccaatggctagacggggtgccagggccataggaagacctggccggtggttacctgccttagcgcgccgaactgttgaggcgtttcctgaaggtcccccggtagaccgctttgaggacctggccaggtccctggctgaggacaaggcagtcgtgcgcgcatgcgctactccagccccttggcatttggctttcgtggcccccgcactcgctatgagagatgcacatccctcttggggcttgccaaggctcgacacagccggagatgttgccgcttggctcgggctggatgttggcgacctgctgtggttcgccgatacgcacggtttagcccgacacagacgggatcctcgcctggaacactatgtccgccgctggctgcccaaaagaagtggcggcgcgaggctggttgaagcaccaaagaagtggctgaaggacctgcagcggcgaatcctgcacgaacttgtagaaaggattccaccacacgatgcggctcacggtttcaggcgggcccattccattctgacacacgcggcaagtcacgccggacgagaggtggtcttgaggatggacctggaggacttcttcgtcagcatcccagccgccaggattttcgctatctttcgggccgctggatatcccgcagaggtggcacgccttctgacaggcctctgcactacaagctcaccccctgatgccggagctcccgtttcggcagctcctaccgtggccgaactgcaagcgcgtcacagggcacgagctaggtacgcctcccggcatctccctcaaggtgctcccacctctccggcgctagctaatctctgtgcctatgggttggatgtgcgcttaggggctgtcgcccgatctgcacacgcagtgtacaccagatacgcagacgacctagtgttctcaggcgatgagagatttgtccgctggcccgcgaagagatttggcatacttgtggctgggattgcacttgagcaaggattcaccgtgcagcacagaaaaaccaaactcatgcgcgccgctactagacaggctgtgaccgggcttgtcgtgaatcgggcaccgagcatccctcgtcgggatttcgagagatacaaagccacactacataactgtgtaaggtttgggccagagagtcagaacagagagggccatgccgattttcgtgcccatctggaaggggtagtggcctgggtgcggcatgtgcagccagagaggggagcacggttggcacagttgctcgacgccgtctcctggtga

SEQ ID NO: 12589 - RNA, 1332 nt, synthetic construct
  source 1..1332: mol_type = other RNA
atgcgccatgaaaccctggtcgtccaggctgtagcgtccgccatgttagccgatggcgcgtggtccagtgctgacctggttacacgaggggcaatggtattcgacaagcgaccacggtggatggtagccgccgtgagcgcagtgatggctacccaccctaccagggagggcgtcacagtggccgaactcgtggccctcctgtcttctcgtcccggcgtgatgcgcgccatcagacgagcacacgctgtagtcaggagatgggctatcccgctcgtcacacttgttcccccgagatggcctgtgcccgcgtttgcatcagccaatgcccttgcgtcgtggttggagctgtctcccgccgagctcgcctggtttgcagatgtgaaagggctagggagggatccagagcttgacgagcctcttcggcactaccgcgttcattgggttccgaagcgacgcggtggagttcggctcttggaggcccctaaaccacggttgcgcgatatgcagaggaggatgttacgcgagatactcgacgccatcccacctcacgatgctgctcatgggttcagacgcggtagggatgcacggtcacacgccgcactccacgagggacaagctgtggttctgcgagtggacttagaagattttttcctgagcattagcctggctcgcacggtggcaactttcagaagtgccggctatactgacgacgtggcacatctgctgggcaggttgtgcacacacagaactaacgcctcatgtcccttgccagtgctcggagcctacccaaccgaggcagacctgagagcccgtagaaatgcggaacggctggcgagggcactgcatctccctcagggagctcccaccagtcccgcagtggcaaatctgtgtgcatatagactagacgtcaggctggaagcagccgccgccagtgtaggtgccacctactccaggtatgctgacgacctggtgttctctggcggagaagacttcgctgctagagctcacagatttgccgccctggtgggcggcgtggtcttagatgaagggttccgggtgaaccaccgtaagactcgcattatggggcgaggtgccagacaactggtcggaggtttggtggttaacgctcatgcccaggtgccccgcgctagcttcgatacggtgaaagccatcgtccggaattgcatacagtacgggcctgcgtctcagaaccgtgactcccatcctgattttcgggctcacctgaggggccttgttggctgggctggaggagctgcagatagcccacggagggcgaagctagatgccctttttcggcagattgtctggtga

SEQ ID NO: 12590 - RNA, 1335 nt, synthetic construct
  source 1..1335: mol_type = other RNA
atgaagacaaaggttcccgaacgagtggccgaggctctcgcctcagcgtttttggcgcacggagcatggactcgcgacgccttagctgaacgcggcagagtgaccctcgccgaagatgcccgctggatgcgaggagtcgtggatcgcgttttggctacattccctgagcctcccagggcacgtttttctgccctggcacggtttattgcatccgtctccattgctgcacccagagagcgtcgagcccccagatggaggcctaaagtcgctcgctggctggagccagagatagcgatgggcgtgagaagatgggacgttccagctattgctactcctggagatcttgccaggtggctgggacttagcccggctgagtgcgattggtttgctgacggcagaggtctagaacgactgcgtcgccccgaggccctcgatcattatcggaggcggtgggttgcaaaacggcggggaggctttcggcttcttgaggcgcctaaggcgcggacaaaagccgtccaacagcggatacttcgggaaatcctagacagagtgccggctcatgacgccgcacacgggttcgtcagagggaggtcagtccggacccatgccgccttgcatgtggggagagcagtggtcgttcgcctggatctggaagacttctttctcagcatcagtgccgctagggtagccggcgtattcagagccgccggttacccggacgacgtagcatggtctttaacgctcctctgcacaaatgtggctccacctagcggcttggtgctgggacgggatgctacccacgacgatgtcgcacgactgcgcagggccgaaatgagggctcgaacacgccacctgccccaaggtgctcccaccagtccagccctcgccaatctgtgtgcacgtggtcttgatgtccgcctgacggccttggccaccaaattgggggcagtgtacacaaggtacgcagacgacatgactttctcgggcgacaggcgtctggcaaggtccagctctcgactggaggcttgggcgtctgctatcgccagtgatgaaggcttcaccgtaaatcacaggaagtcccgggtgatgagagctggcgtgcgccagttagtgactggggttgtggtaaacactaggctgaacgtggcacgagatgcttatgaccgcctcgaggcaaccctgcacaactgtcggaggctgggccctgggtcacagaacagggatgggcatccagacttcagagcccacctagttggtagagtggcccacgtgaagagcctccatccagccagaggagagaagttagcggccctgctggagcagatcgcctggtga

SEQ ID NO: 12591 - RNA, 1335 nt, synthetic construct
  source 1..1335: mol_type = other RNA
atggccagctacttggagcacgtgtccagagccctggggagtgcctttatgatgggtccatggactcggttggcattaatgggcttgggggagcgcgtactaggagagcgacctccttggttaggaggcctcgtctctcgcacactgagcgcactgccggaacctccacccactgttgaggccgtagccgccgtgttacgggaacaccgcgccttcaggaatgcctttgcggaccaggctagtcgcccccgtgttaggcggtggttacacgctccaccgagcgctcctgcagaagcaccttggccggtccctccactgaggacatttgacgacctcgcgcgtcatctcgaattgcctgatgagcagctgtcttggcttgcggatcctcggggggtactgcgtagagcaccttccgagcgcctgcaccactaccaccgagactttctgcctaagcgggccggaggacatcggctggtggaaacccccaaacctcgcctgaaggcagtccaacgacgtctccttagaaccatattcgatcacatccccccccacccctcagctcatggctttgtcaaggggcgaagccccattacacatgctggccagcacgcaggacgtgccgtggttctgaggctcgatctggaggacttcttcacgtccgtgacctacgcccgcgtataccgcgtgtgccgattcgcagcgtaccccgacgaggtggcaaggcttctcgctggcctgtgtaccacaagcctgccacccccaatctggagaagggcacctcggcctgatcatccggccgatcttcccgcctatcagaggcaacgggagcgcgctcttaggcggcatttgccacaaggggcccccacatccccatctctggccaaccattgcgcttcaaggcttgacaggagactccatgccgctgcggaaagggctggtgcccattattcgcggtatgccgatgacctggtgttctcaggcgatgacggctttgcccgaagtgtgactagattcattccattcgcagccgctattgcaatggacgagggtttcgtggtcaacttcagaaaaacgagagttatgccccgcaacaggaggcagcaggttgctggcctggtggtgaacgctcacccaaatgtctcccgccagacctatgaccgactaaaagcgatcctgactaattgtgctcggcacgggccagcaagccagaatagagacggtcaccccgattttagatctcacctaagagggttgatcgcctggatagatagtgtggcaccaaagagaggagctgaactccgggccctctttgaggccatcgaatggaagggctga

SEQ ID NO: 12592 - RNA, 1329 nt, synthetic construct
  source 1..1329: mol_type = other RNA
atgactctggatgacgtggttcgcgccttcgctggagctctcctggctggagaatggaccgagtccacagtccgggaaagagcggtagaggccctcggtgccaagcctagatggctctggcccctcgttagacgggtggtccgattagggagcccccctcgtagaaggcaggttgaactagccatccgagcctcatctgccttcgtgggagcatggaagcgggggctggtacagcccaccagagcacttgaagtccgtgctgtcctgtcctcgccacgaatgggtccagttcgctgggccgtgccatctctgggaacagagggggaactagcgaggtggttgggactcggcgtcagcgacctattttggcttgcggatcccctcgctggggaacgaagggctcgagtcgagcgcatcaggaattacgtgtatacctgggtgcccaagaggtcaggaggggtgcggttgattgagtctccgaagcctctgcttaaaacgctgcagaggcgtatcctgcgcgaaataattagtctggttcctgtgagtgacagtgcccacggctttgtgctgggaaggagcacgctgacccatgcctcatcccacatttcacagcgggtggtgttgcgcttagacctgcgcgacttcttcagtactgtgtccgcatggcgggtagccgccgtatttaggaccgccgggtatcctgagaatgttgcacgcttgctcgcaggcttgtgtaccaattccgctcccgaagcagtattacagctcgctggcccgagcctgtcacgctttcagaaacaacggctcagatccgcccatgtgcctcaaggcgctcccactagcccagctgtggcaaacctctgcgcttatcggcttgatcggcgcttggccggccttgcaagagttagcggcacaatctacactagatacgccgatgatctggtcttttccggcgatttcactagaagtaaggattttgaccgcccaaggcctagcattgataggttcgtggcgagggcccacgctatcgtcctggaggaaggcttcacaccacattttgagaaaacacgtgtgatgggttgcggccgtagacaggaggtcacgggaatagtcgtgaacaggcagcccaatgtgagccgggcagacctggaagtttttgaggccaccctgtacaactgtcggagatctgggccgtctacacaaaaccgaactgggcacccagacttccgcgcacaactggcgggcagattaggttatgtggagatggtgttgggtgagcgggcccgatggctgagaacccttttcgagcagatcgactggtctaggtga

SEQ ID NO: 12593 - RNA, 1182 nt, synthetic construct
  source 1..1182: mol_type = other RNA
atggcaagaacgctgtcacgcaggccgccacccatggaagcggacagagatttcactgagcggctcgcaagatttccaggagcgaaagaggctgtcctgaagagactgccgatacgccggtggttcgtggtgactcctgttcaaagacccggccgatggcccgtacctctcctaccaacaccctccgatctggccaccgcactaaggctcgacgtcgatgccctggattggttcgccgacaacagaggcttagaggctcacacccggagcagagctctgcggcattatcattacagatggttggcgaaaccaaccggtggggccagactggtcgaagcacccaagggacgcaccgtggatatacaaaggtggatcctgcgtaaccttcttgactctgtaccaccccacccggccgcagtagggtttcgaaggggattctccacactcgacgctgccgctcctcatgtgggcagggaggtggtgctcagtctggatctggaggacttttttgctagcgtctctgccgcacgagttgccgctacattcgccgccttaggttatcctcggcccgtggcgtattgcctttcaggcttgtgtaccacaagagtgcccgccgccattttagcggaacagcctcgaggtggcgacctgcctgctgcttggaggcagaggcggaggctgagagatgcccacctccctactggcgcccctacttcgccagcccttgccaatctcgctgcctttgccctggacacgcgattggctgctgcagccgcagctgtgggtgcaacctacacacggtacgccgacgatttgagctttagcggagacgcagaattctcccggcgggctaggcgcttctctgtcttggtgggggcaatcgctattgaggagggatacagggttaatctgaggaaaactcgtcttgccggaaagggcgctcgccaggaagttgtgggggtcgtggttaacgtcaggccagccctcgctcgtgaccgttgggatcggctacgggccatcctgcacaattgccaggttcatgggcccagtacccagaaccgcgacggtcacgaagacttccgcgcatggattaccgggacagtggcggcagccagagctatcgatgcaaagcgagggggccgcttgcttgagatgctggccggagtggattggggccgctga

SEQ ID NO: 12594 - RNA, 1326 nt, synthetic construct
  source 1..1326: mol_type = other RNA
atgaatagatcggaccggacaagtttagcccgagacttggcagcgacattcctcgccgggccatgggagcgaagggaaatggcaagaagagccgccgcaagcttcggcctccctagatcccctagatggctcagcactctagccagggaggtggtcagggtgtttggtcccgatcccccacacggacgggatggtaggatcgctgcactgatagccccccgcctaagacccttgagacgcgcaggaatcgctcgcaggccagcactggtgcatccttgtctcgtaccagcacgcatggggactgcagctgctcccgtgctgcgtgaacggggattgcccgaagttgccacgcccggtgaattggcggcatggcttgggctcgaccgagatcggcttgcttggctcgccgatgtccggggtctgagtaggcggactcatgatgggccactggtgcactaccgttacaggtgggtgcccaaaagatctggcggggcgcggttactggagatccctaagccagatctggccgcggcccaacgcaaaattttacgcgagctgctggaccgagtgccaccgcatgcatctgccgtaggcttcagaaagggccgcaatgtccttgatcacgccagcgcccacgcaggtgcagctgttgtgctgcgcatggacctgggggactttttcgcctcagtcgccgcaactcgtgttcacgccatctttgttgccctcggataccccgccgccgtctcttcactgctgacaggcctgtgtacccatagaacatccatgtttgtgcgtcatgcgtccaccgaccacgctgcttggtcccgtcttagggagagacatttacctcagggcgccccgacgagtcctgctctagcaaacctggctgctttcggcttggacgttaggctggctgctttggctagcaaggccggagccgcttataccaggtatgccgacgaccttgcattctcaggcggtaccggatttgcccggtctgcggcagccttccatgtccttgcttgcgctattgtgatagaagagagctttgcgccaaaccctcggaaaacccgcattatgcgggcctcaagccggcagcagattacaggcctcgtcgtgaatgcgaagcctagtctgccccgcgacgagctggataggctgaaggccaccctgcacaactgcgtagcccacggacctgcatcccagaaccgcgatggccgggctgatttccgagcatggctcgctgggaaagtggcctgggtggcctctgtacacccggctaggggagctcgattgcgagccatgctcgagagaatcaggtggtga

SEQ ID NO: 12595 - RNA, 1329 nt, synthetic construct
  source 1..1329: mol_type = other RNA
atgagcgaaagaaacgttgtggctaaagccctggcctcggcttttttggctgccccatggactcgcgctggactgatcgctaacggcgccgaagtcgtaggggggagatttccatggcttgcaagcttagcacgcagtactttacgattcttccctagaccccctcacgaccgcctcgaattgctggcggaaatccttgccacacgaccagccctgaaacaggcttgcgccaaccctaccgctcctgtgaggcttctgaggtggctaacagccgaacctcagatgggcagggccccatggccagtacctgctctgccaacgcaagctgatctcgcggcatggcttggagtgacagacgcccagttggactggctggcggacggaaaaggattggagcataggacctccccgggtaggtggaggcggtatggctacacctggattcccaagcggtcaggtgggcaacggctgttagagcagccgggggaagagctggccagacttcagagaaaggtcctgcattgtatactcgatcggatacccccccacgaagcagctcacggcttcgtgaagggaaggggcattcggggtttcgtggagccacacaccaggcaggcggtcgttgtgcgtttggatctggaggactttttcctgtcagttcgtccgccccgactgtggggcgttttccgtgcagcgggatatcccgatggcgtagctggcgcgcttgttggcctctgtacaaaccggacccctggagccgttgtagcccaagcacgcaaacccactcacgcccaggaggtcgagagcagatggttgctggggcggcgtctcgagagcagacatctcccacagggggcccctacttctccggcactggctaatctggccgcctatcgactagacgtccgcctgtctgctcttgccggtgtgctcggcatgcgatacacccggtatgccgacgacctggccttttccgcagacgcagcaagacccggatccattcggcggctcctgagatccgtgcgcaggatcgtgcgtgatgaggggtttacggtgagagaggataagacacgggtgatgagtaagggacatcagcaatggctggctggggtggtggtcaatgagcatcccaatctacgcagggaagattacgaccggctgaaggccgtgctgcatctctgcaggaccagaggccctgcctctcagaatactggcggtcacccagacttcagggctcacctactcgggcgcatcgcatgggtcacatacctccaccccgccagaggtgcacgcttacgagctttgtttgatcgcatcgcatgggattga

SEQ ID NO: 12596 - RNA, 1329 nt, synthetic construct
  source 1..1329: mol_type = other RNA
atgagtggacgtacagtggtcgccagagctctcgcatctgccttcttagccgccccctggactgtctctggcctagtggccaaaggaagcgaggtggtaggcgggcgcttttcttggcttaggagcctggcaaggtccgtgttacgcttcttcccccgccccccacacggaagactcgaactgctcgccgaggtattggctacacgggccgctctgaaacaggcctgcgcaaatcctgaagcgcccgttagggtcgtgcggtggctaactagcgagccggagatgggtcgacaaccatggccgatccctgcactgagtactcaggccgacctggctgactggcttaaggtcacatccgcgcaactggattggctcgccgacggcatgggcagagagcacaccagttcaccggggcgctggagaagatacagatacacctggattcccaagcgttccgggggcgaaagactgctggaacagcctggtgaggaacttgctaggctccagaggcaggtactgcacggcatattagatcggataccacctcatgaagccgcttatggctttgtgaaggggcggggcatccggggttttgtggaacctcacaccgggcaggcagttgtgatgcggctcgatcttgaggactttttcctgtctgttaggcccccacgagtttggggggtcttcagggcagctggttacccagacggagttgctggtgctctggctggattgtgtaccaaccgaacacctggcgccgtcgtggcaaaagcccgcagagctgatgacgccagaaaggtcgacgccaggtggctgcttgcaaggcgattggaaagtaggcacttgccccaaggtgcgcctacgtccccagccttggccaacttagcggcctacaaacttgacgttcggctgtccgccttggctgcagctctcggaatgcattatactcgctatgccgatgatctcgcgttttcagggtcagatgcaagggcaggaagcgcacaccgcttactccggtgcgttcggagcattgtgcgggacgaggggttcaccgtcagggaggataagacgcgggtgatgcatcagggccatcagcaatggttggcaggggtggtggtgaatcagcacccctcactgcgtcgcgccgactatgatagactgaaggcgctgctacatctgagccgcacccgaggacccaactcgcagaatactggaggccaccctgactttcgcgctcatctgctgggcagaatcgcttgggtaacacacctgcatccagctcgtggcgccagactccgagccattttcgagcagatcgtgtgggattga

SEQ ID NO: 12597 - RNA, 1329 nt, synthetic construct
  source 1..1329: mol_type = other RNA
atgagtaaacgcatagccgtggccaatgcactggccagcgctttccttagtgggccctggaccaccgcgggattagtcgagagaggcgctgaagtgatcggagggcgcaccccatggctgcttagcgtcgtccggagcacacggcgatttttcccccgtccccctcatgcccggtttgaactgctggcggagatcctggcgaccagaccagccttgcagagggcttgcgggaatccccatgcccccgtgaagattttgcactgggtagccactgaacctgagatgggcagacagccctggccggtaccttccttgccgacccaggcagagctgactgactggctgggcatgactgatgctcagctcggctggttagctgatgctcgcgggctcgaacgtatgacacccccagggcagtggaggcggtataggtacacttggatccctaagagatcaggcggtgagaggctgttggagcagcccggtctggatctgtctcggttacaaagaaaagtgcttcatgggattctcgacgtgatcccccctcatgaggccgcctacggattcgttgcgggacgaggcgttcgcggctttgccgaaccacacgtgggccaagccgtggtggtgagggtggacctggaggactttttcctctcagtcaagccggctcgtgtctggggaatgtttcgggcagccggatatccagacgatgtggctaccactctggccggtctatgcacaacacgtacgccatcaggagttttggaacaggcccgcagagcagctgatggggaggctctgacagcacgatggaggctggcacgtcgacttgaaagccgccacctggctcagggtgctcctacatcccccgcgctcgcaaaccttgctgcctacagactcgacgtcaggttgagcgccctcgccagtgctcttggtgccaggtatactaggtacgctgacgacctagccttctccggcggcgatgccctagcaagatccacagggaggctgctcaggtgtgtcgcccgaatagttcgggaggaaggattcacggtgcggaccgagaagacgcgcgttatgagacggggtagacaacaacgcctggccggcgtggtggtaaacgaacacccatctgttccacgagcagactatgatcgcctgaaagcgattctgcacctctgtcggaccaggggccctgcatctcagaacactggatctcaccctgagttcagagcccatctactcgggcgggtggcttgggtatcgcagttaaatcctacccggggcgcaagactgcgcgcaatctttgagcagattgcatgggaatga

SEQ ID NO: 12598 - RNA, 1350 nt, synthetic construct
  source 1..1350: mol_type = other RNA
atggcgttaggggattccgcggtgagcaaccggcagtcagtcgcttcagccctggccagtgcttttctggctggcccatggacctatgagggtatggtagaaagaggagctcacgtggttggaggacgggccccttggctattggccgtggtgaggggtatcaggcgcttcttcccccaccccccagttgctcgcatggagctcctgacagaactcttagcgacacgcccagcactgattaaggcctgccgcaatcctgctgtcccagtccacctgcacaggtggctcattcccgagcccagcatgggacagaggccatggcctgtgcccgaactgtctactcaggccgaggtcgctcgctggcttggagtgactgatgcccagcttggctggcttgctgacgggtctggatttgaacggactagtcggccagggcaatggcggaggtaccgttacgtgtggatcccaaaaagagcaggcggtaagcgcctcctggaacagcctggcgttgacctcggtcgcctgcagagacaggtgctgcacgggctgcttgacctgataccgccccatgatgccgctaggggattcgttcgtggccgaggcgtgagagattttgccgaacctcacgtgggacaagcggtagtcgtacacatggacctggaagacttctttcattcagttcggccctctaaggtgtggggagtattccgagcagcgggctatcctgactcggtgacagaggtcctggcaggcctgtgcacaaatagaactcccggtaccgttgtagaggaggcaccccgagccacccatttaggggagcagaaagccagatggcggatgaccagaaggctcacggctagacatttgccgcagggtgcccctacttctccggccttggccaacctggccgcatatcgcctggacgtgaggctgtccgctcttgccgctgccttgggagctcggtatacgcgttacgccgatgaccttgccttttccgggggcgcatccttgttacaacgacctctccggctcgtccgatgtgtggcagcaattgtcagggaggagggcttcgccatcagagccgataaaacacgggttatgcatcaggggcagcaacagagactggccggcgtggtggtgaatgcacaccctactgtgccaagagaggactacgaaaggctgaaggcagtcctacatctgtgtcgtacccgcggccccacaagccaaaacaccgaggggcatcacgatttcagagctcacctactcggccgcatcgcgtgggtcagtcacctccatccaagcaggggggcaaggttgcgggctacctttgaccgaataacctgggattga

SEQ ID NO: 12599 - RNA, 1335 nt, synthetic construct
  source 1..1335: mol_type = other RNA
atgtcaactcgccacccggtcgctgcagctttggctagcgccttcctcgcagggccatggacaagggctggccttcgagaacggggcgcacatgtggtcggtggaagacccaggtggctggtgcctgtagtccgtggcatattgcggtactttcccaggccccctcacgctaggttcgagctgctgactgagctgctcgctaccaggccagcgctgattaaagcttgtggcaacagcgctgagccaattagaattcggcattggctggacgtggaaccgcagatgagcaggaggccgtggcctgtacccgagttgaccacccaggccgctttagcccaatggcttggcgttaccgatgcccagctcggatggcttgcagatggctccggtttcgaacgaacaagtcggccaggacagtggcgccgttaccggtatgtatggataccaaagaggactggagggaaacgcctgttggagcaacccggtctggacctggcgagactccagaggaaggttctccatgatatcctggatgttatccctcctcacgcggcggctcggggatttgttagggggctgggcgtgaaggacttcgctgaacctcacgtggggcgggcagtggtagtccgagtagatctggaagacttctttcacgcagtgcgacccgcacaggtctggggagtgttccgcacggccggatatcctgatggtgtcgtgaacgcgcttgccgggctgtgcacgaatcggacaccaggagccgtcgtggaacaggctagacgggccgagagtgcacaggaacttgacgcctgctggcgtctgtcccgcaggttatctgccagacacctcccccaaggcgccccaacttcaccagccttggccaacctggctgcatatagactggacgttcgcctgtcggctctggcagctacactgggggcacgctatactcggtacgcagatgacctagccttctccggcgacgaggtgctagccagaagggtccgcagactgttaacttgcgtgacacgcatcattcgcgatgagggctttaccgtgcggcaggggaagacaagagtgatgcaccaaggccagcaacagcgtctcgcgggcgttgtggtgaatgcccatccgacggtcccccgagaggactacgaaagactcaaagctgttctccacttatgtagaaccaggggacctgagtctcagaataccgagcagcatcccgactttagagcccacctattggggcgcatcgcctgggtggaacatctccatccagccagaggtgcccgtcttcgagccacctttgagcggatcccttgggcccccgagtga

SEQ ID NO: 12600 - RNA, 1332 nt, synthetic construct
  source 1..1332: mol_type = other RNA
atgtctgagcggcgcgtagttgcccagggtttggccagtgcctttctggctggcccttggactctgaagggactcgtcgagcggggtacagaagcagtcggcggtcgagcgccttgggttcgatctatggccagaagtgcgatgatattcttccccagaccccctcatgcacgtctggagctgcttgccgaggtgttggcgagcaggcccgtgtttcccaaaggattcgccgactcctcgggacgggctaggatcgtgcgatggctgacatcagaaccgcgaatggataggcagccctggccagtcccatccctccctactcaggccgatctggctgactggctaggcgtcacgggcgcacaactcgattggctcgccgacgcccctggcattgaaagaaccagcaaacccgggcggtggagacggtatagatatacttggatccctaagagaagcgggggagagaggctgttggagcagccagggctggatctgatgcaggttcagcggaaggtgctgcacgggattttggaccgcgttccaccacatgacgctgcgcacggctttgtcgccggtaggtctgtgagaagctttgtagaacctcacgccgggcaagccgtggtcgtacgtgtggacctggaagatttttttttctcagtgcgaccagcccggatttgggccgtcttccgaaccgcagggtacccagacggcgtgactaacgcacttgccgggctgtgcaccaatcgcacaccgcaagccgtgttggcacaggccagacagcccgagagtgtaagcgaggtggatgcacggtggagactggctaggcgcttggaatcacgccatcttcctcagggagcccccaccagtcccgctttagccaacctggctgcttaccgcctcgatgttcggcttagcgctttagcgacagccatgggagcacgctatacgaggtatgccgacgacctcgcattttccggtggcgacgcactgtctcgtagaacccacaaactattaagatacgtgtctcagatcctcagggaagagggattcatgacccgggcaggaaagacccgcgtgatgaggcaaggtgcccaacagcgtctggctggcgtcgtggtgaacgcacatccgtccgtctcccgggccgattacgagagactgaaggcaatcctccacctgtgtaggacaagggggcctgcttcacagaatacagaaggccaccccgatttcagggcttaccttctcggccgtatagcttgggttgctcaccttcatccagcgcgcggcgctaaactacgcgccactttcgagcaggtggtgtgggctggatga

SEQ ID NO: 12601 - RNA, 1329 nt, synthetic construct
  source 1..1329: mol_type = other RNA
atgtctgagcaacgagtggtcgcccaggcgcttgcgagtgcattccttgcgggcccttggactttgaaaggcctggtggagcgcgggacagaagtggtgggagggagagccccctgggtatcctctctcgcacggtccgctatgatcttctttcctagacccccccacgcacgcatggagcttctgggtgatctgctggcttcaagaccggcgttcatgagaggctgtaccgatcccagcgcacgagcacgtatcgtccgctggattactagcgagccccgaatggctagacagccctggccagtgccttccctctctacgcaggctgaactggctgcttggttgggcgttactggagcccagctggactggctggctgatgtgccaggtatcgaaagaacgagctcacctggcaggtggcgcagataccggtatacctggatcccaaagcggtcgggtggggaacgactcctcgaacgacccgggctggaccttctgctcgtgcagagaaagctcttacatgggatattagaccatatccctccgcacgatgcggcccacggtttcgttgctggcaggagcgttctcggctttgcagagcctcatgcccgccaggccgtggtagtaagagttgacattgaggattttttcttcgccgtgaggccagcacggatttgggcagtgttccgcaccgccgggtatccagatggagttgtgagtgcccttgcgggactctgcactaaccgtaccccatccgccgtcgtctcacaagctaggcgtcccgactctttggccgatgcttccgcacgttggcggttggcaagaaggctggagtctcggcaccttccacaaggagctcctaccagccctgccctggccaatctggccgcttaccgcttggatgtgcggctgagtgcactagccgaggccatgggagcccgctatacacgctacgctgatgacatggcatttagcggaggcgatgccttggccaggagaacccataaactcctgaggtacgtctcccagattgtcagggaagagggcttcaccccccggacaggaaagacaagggttatgcaccggagtactcaacagaggctagctggggtcgtggtgaacgaccacccttcaatacggagggtagactatgaacggctgaaagccatcttacacttatgcaggacccggggcccggcctctcagaatacagagggccatccagactttcgtgcacacctactggggcgcattgcctgggtggctcacctgcatcccgccagaggtgccaagctgcgagctacatttgaccagatcgcatgggactga

SEQ ID NO: 12602 - RNA, 1350 nt, synthetic construct
  source 1..1350: mol_type = other RNA
atggcctgcgagtcagcaatgagtgagcggcgcgtggttgctactgcccttgcgtctgcttttctggccggtccttggacaattcagggattgacagagcgtggactggaggtagtaggcgccccgtccccatgggttgcatcgctagcacgctcagcagtgcgctttttcccaagagcacctcgcgctcggatggagctgctggctgatctcttggccacaagagccgccttccagcgagggttcgaagaccccgaagccagggccagaattgtccgctggcgcgtatccgaaccgcgaatggctcggcaaccgtggccagtgccttccttgccagcacaggccgatctggccgattggctgggagtgaccagtgcccagctggattggctcgccgacgttcctggaatagaacgcacgagtccccctggcaggtggaggagataccgctatacctggatccccaaacggagcggcgggcaaaggcttttagagcgacccggattggacttggcatgcgtgcagaggaaggtgctccacggcattctggacagaatccccgcccatgacgcggcgcatggattcgtctctggacgtggcgtgcgctccttcactgcaccccacgtcggacaggccgtagtcgtgagacttgacctggaggacttctttcttgcagtgcggcctgccaggatctggggcgtatttcgggcggctggttatcccgatggtgtcgtgcgggctcttgctgggttatgtacaaatcgtaccccaggcgccgttatggctcgtgctcccacgccaaccagcttggctactgtggcagcccgctggcgatggaccagaagactggaaagccggcatctaccacaaggcgcccccacatcacctgccctggctaatctggccgcgtaccgtctcgatgttaggctaagcgctctggcagcagccatgggggcacgatacactagatacgctgacgatctggcattctctggtgatgcgtctctcgcacggaggactcggcgcttactgcacctcgtgggtctgattgtcagagaggagggcttcaccccaagggcgggcaaaacgagggtgatgagccaagggactcagcagcgactcgctggcgtggtcgttaacgccaggccttccatcccacgggctgactatgatagactcaaggctctgctgcacctgtgtcgaaccaggggtccggacagccagaacaacacagggcaccctgactttagggcccacctgttggggagaatcgcatgggtgtcacatctccatcccaccagaggggctaggcttcgggccttatttgaacagatagcctggacagcctga

SEQ ID NO: 12603 - RNA, 1260 nt, synthetic construct
  source 1..1260: mol_type = other RNA
atgcatgaacgggccgtcacagcccttgggcagcactttcagtggctgaccggagtggtcagaaacgttcgtcgtggctttcacaggcctcctgttgatgccccagatacacttgccaggtatatagcccacctgccttctttccgccaagcaatggcccatcccgacacacggcctcggatacggcactggctcgttgccccaaccgacatgggtagaatgcgatggcctgtgcccgcactgcctactactggcgagcttgctgcctggctgggcctaagtgacgaggatcttgattggctggcagataggaagggctacagccacagcgctcgcgacactcgcttactgcattatcagtggcgatgggtcccaaagcgcacaggcggagtgagactcctggaatccccgaaagcgaggctgaaagccctgcagcgccaggtactgcacgcgatccttgacgccatccccccccatgagtcagcacatgctttccagcaggggaggagcgtgctgacttttgcagcacctcatgtgggacagcacgttttgttgcggatggacctggaagacttcttcacctctatctctgccggtagggtcttcggcgtgtttcgaacggcggggtaccccgaagcagtgtcttccaccttagcctccctgtgtacccacgccctcccactgctcgttttgcgggatatgccccgtcctgcatcagtggaagacattgatgctcattggagagctcgcgcaaggctgtcgagcccacatcttccgcaaggtgccccaacgtcccccgctctagctaatctctgcgcttggggattggacgttcggctctcaaccctcgcggccagtatgggggtgaggtactctagatatgctgacgaccttgtatttagtggcggggaggatctgtcccacgcgttagagcggttccgtcacctagtcgagacagtgattagagacgagggatttgtccctaatgtgaggaagacccgcgtactgagacaaagtgtccgacagcaggtagccggcgtggtggtgaatgcacgcccaaacgtgccccgggctgacttcgatactctcaaagctacactcactaactgcattagacagggtccctcaacccagaaccacacagggcatccagatttccgcgcccacttggtgggaagagtggcctgggtcgctagcgtccaccctcaacgaggcgcaagactgcatgccctgttggatgctatcgattggagcaggtga

SEQ ID NO: 12604 - RNA, 1344 nt, synthetic construct
  source 1..1344: mol_type = other RNA
atgatcgaaccacaggctgctcgcgcgatactcgccgaggcatttctcgggggtgactggtctgccgacggtttactgcagcgggccctcgaagttgtcgctgaacccgcacctaggcaatcactccgcgcgctgatcaagttggtgctaggaaggttccccgcaaccccccccttaaggcgcagagatctcgaagaggtcatcgccagctccaggagcttttcaaaggccactcgcgcccaacgcctcagagtatggcggccttggctgaggtcccctgttatgacccccctggctggcgctccaacaagttggcccgtccctgccctcccaaccacaacagagcttgcggcttggctgggcctggatgtggacgctttggagtggtttgcgggcacgcatggcagagcaagaagggctccaccgggcccacttgggcactatacctattcatgggcaggcaaagccagcgggggataccgactcatcgaggccccaaaagcgcggctgaaggcccttcagaggcgagtgctggacgggattctggctgaagtgccagtgcaccctgccgctcacggattttgtcggggacgcggagttctgtctcacgcagcgccgcatgccggccaaaggttggtgatggccctcgatctgcgggactttttcgcaagtgttcgcgcctcccgggtccttgccattttccggactctgggttaccctgaggccaccgctcgactactgactggactggcgactcacaccgtgagcgcactcgtctgggcgagtgcaccacctcctagggatgccgccgaagctagcgcaaggtttcacgccgggcggttcttccagtcgccccatttaccccagggcgctcccacgtctccggctttagctaatttggccgctttcagattggatcttcggctgaccgccttagctagagccgccgacgccacatatacacgctacgcagatgacctggccttctctggcggagagagatttgcacgcggcgctgagagacttttttccctggccgcccagattatatttgaagaggggttccggctgaacgcagggaagactcgacttctggggcagggaatgcgccaaaggctcgctggcgtggtagtgaacgcccatcctaacctggcacgtcgagacttcgatcagctgaaggctaccttgcataattgccgtcgtgatggggctcaggcacacgacagagatgggcttggtgccggtttccgggcacacctgctaggcagagtagcctgggcagagcaagtgaatcccgcccgaggcggtaaattgcgtacaatcttcgacggaattagatggtga

SEQ ID NO: 12605 - RNA, 1920 nt, synthetic construct
  source 1..1920: mol_type = other RNA
atggctggcgaggtgtcgcctggactcgggaaactgagcggaggggattacgaaggcctggaactggtgcgggcccgagtggaattcgcctctggtgtgcgctggtttcacccgggcgagttagaccgggtgcatccccatgtcgaggctgcattggtgcggcatgccatcacacgagacttgattgcggccggcaacgctacgaggctcgaacagtcgctcgaggctttctgggagggacgccaagaattctaccggactccgggactgttagatgagctttggctccttcacaggggacccgcccctacagagctgggtgaactgttcgacgctcctcgtgctgaactgctcgcaatcgtcccccagctggcaccaccattaccccagttacccagagaaacgcggttgcttgaagcggaggagctgcatgccgaggcatggaagcaggtgacccccataggcgagctagaggaggacgaagattggtcatctgagtgggagagagcggccccactcggtgctcttgttcctccacggacaagggcggattatttggcggatgaccaagacgacgatgacccagatgatgacgaagaatgggagctcaggcgccggagaaagcagctagcagaggctgctagtgccctgtgtcaggcctttctatctgccgaatggtccgccgacgacctgttggaccgaggacagcggaccttaggcacctcagagccctggctggaggaattggttgacagagtcctggcagcctttcctgccagaccccatcctgaagacgaagatctagtcctgtttctcgctgaggacgaggccctgcatgaacagttgctcgagggcagccttgtcgtttggacacgcttctttgtgcccccccagatgcgtgctgacaggagattccccgtgatgcctctcgagggggcaccagacgtagagaggtggttgagaattggcactggggatctgcagtggctagccgatcaggaacgttggctttacagacacccaagtggaccgctgcagcattatcactaccactggctgccgaaaaggtctggtggcagacggcttgttgaggcacccaaggagctcctgaagtccgtccagcgccaaatcctgcgcgacgtgctgggtcctgttccacctcacgaagcggcgcacggattttgtcggggccgctctgtgaggtcatatgcagagcctcacgccgggcaggagttggtacttgggttcgatttgcgggaatttttccccacaatcagggcacccagggtgtccgccctgtttagagcactggggtatccatccggtgtcgcccagctgctgtcagatctgcgaaccaccgtgacccctagcgatgtgctggaggaaggaccactctccggaggagcaagggggaggctggaacaacgccatcttcctcaaggtagccctacgtctccggctctggcaaacctttgcgcttacggcctgccagtaagactctccgctgctgccgctgccgttagtgctcgctacactcgctacgccgatgaccttgccttctccggcggagctgattttctgcggcaagccagccgattccggtatttggtgatgcgaattgctgccgaggaggggtttgagatcaatccaaccaagaaccgttggatgcgcccccagaggcagcaaaggctcacagggctggtcgtaaacgtccggccccgaccaagccgagccgaattcgacagactaaaagcaaccctccacaattgcggcagacacggccctgccagtcagaatagagcaggcctgccagacttccgcgcccacttagcagggcgtgtgagctggttcgaacagactgatccggtgagaggcgagaggctccgtgagctctttcaccagataacttgggaaacttga

SEQ ID NO: 12606 - RNA, 1323 nt, synthetic construct
  source 1..1323: mol_type = other RNA
atgaacgtggacgaggtggcaagaggactggcagccgcctttttggccggagactggttacaggaagggatggtggctagaggtcgagaggcactgggaggcaggttcggctggctacctggactggcacggagagctcgcgaagcgttccttgacccacctctgcacgacccagaagcgctggaggacttgctcgctgcggatgctaggctgcaggcagccctgaggcgacgagctagacaaggccacccgcctttggtcgttaggagactgttcctccatcacacggcgatgaggagcgagcgccgctttgctgttccctctttcgacactgaggccgatttggccaggtggctcgggcttgctctcactgatctggattggtttgccgatcgaaaggcctggttaatccacgccccccaagggcctttacagcactatcatcggacctggatccggaagagaggagggggccttcggctgcttgaggcaccaaaagccacattaaaggcaatgcagaggagagtgctccatggcttgctggcacacgtaccgccacacgatgcggcccatggtttcaggcctggacgctccgttgtcactcatgctgccccccacgcgggcaaagctcttgtactccggctggacctgcgcgatttttttccctccgtacctgcaggtagagtggccgccctgttccgttccctgggttacccccgctcagttgctggtctgctcaccggccttgtcactaccagaacacccctggcgacccttgagggggtggatctagatcgggaagctgaggacgccctcaggcggtcacatttgccacagggcgctccaacgagcccttggttagccaacctctgtgccctaggcttggacgtgcgcctcagtgctgcagcagccaaggtgggcgccgattacacccggtatgctgatgacctcgccttcagtggggacgaggcctttcgtcgagtcgcagccaggtttcggacactggtgcatgctatagttctgggcgagggatttgacttgaggccagagaaaacaaggtggatgaccccttctgtgagacagcgacttacagggctggtggtcaatcagcgtccccgcccaagcagggccgaattcgatcggctgaaggcaactctgtttaactgcgcccgacgcgggcccacagcagaaaatcgggagggacaccctgacctgcgtgctcacctccgcggtagagtcgcttggttcgaacataccgacccggctcgtggagcacggctaagagccctgttcgaacgcattgcttgggcccccgccagatga

SEQ ID NO: 12607 - RNA, 1302 nt, synthetic construct
  source 1..1302: mol_type = other RNA
atgatgctagctactgtagcctcgccggcgagtttgatcgctgcctgccaacgagtcttcggaacaacccctgcgtgggtgccaagggtctgctttgcattgatcgatcggacgggcgacaacttccactgtttttcacgccaggagctggccgacatcctgctacagctgctgttccatggcccgcaaaccgagagaatagcactccccccagtgaggagatactgtacagaacctgcccgacaagcgccaaggcctgcttggcttgccgcccttgctctccccgacttgccctctgtgggtgctctggccggttggctaggagaacccgttggcgctttggcttggctcgctgaccagtggagatccgaggacggcaaccggtccaggttacagcactatcactatcgctgggtgccaaagcggagcggaggagtccgattgattgaaattcctaaggcgagactgcgtcgtattcaacacaaaatcctgcggcagattctggatagagtgccccctcatccggccgctcacggatttctgagaggccatagctgtctcacccatgccgcccttcacgctggtcaggaggtcgttatacgcatggacctgaaggacttcttccctagcatccagtatgcccgcatccacgcactgtttgagaaactcggctatacgacaaacgtcgccggcactctggcaagggtgtgcgtgaatcgcactcctccatccgccatcagggatcaggccgcaggatccctttcatggccagagcggcacgcactcaaaagtccacacctgccccagggatcaccctgctctccagcactggcaaacctgtgcgcctaccgtcttgatcttcgcctcgcatctctcgctcgacctctgggggctagctatagcaggtacgccgacgatctggtcttctctgggggtcccgatttcgctcgctccgcagaaagatttcgtgttagggccgctgcaattgcgctggaggaagggttccaggtaaacactcggaagagccgggtgatgaggaagggcgcaagacagcaagtgaccgggatagtagtcaatgcccatcccaatttagcacggagtgagtacgatcggcttaaagccacactgaccaactgtgtgagacatgggccagacagtcagaataggcagaatcatccggattaccaggcctacttagcggggcgagtttcctacgttaaaatggtgaatgcctctagatctgccaagttgcagcgcctctttgatgctgtggcctggccccaagacgccccttcagcttga

SEQ ID NO: 12608 - RNA, 1188 nt, synthetic construct
  source 1..1188: mol_type = other RNA
ttgttgtggcaatgcctcggaaggggcgacggaaacgaggacgacaacgacggggatggggatggcgacggagatggcgacgcatgggtggttggcgccgatctgccacccctgagacggtactgtgtcgatccaccagtgaggccagttcctccggcatggttagccgcactagcgttgcctgccctggcttcagtcggtgcgctagccgcttggtttgacgagcccgtgggtgcccttggttggttggccgatcagtggagactgggaggcgaagggcaggagcggttacagcactatcactataggtgggtcccgaagcgctccggtggagtgagactcatcgaaatccctaaagcccggcttcggcgactccaacagaaaatcctccgcgaaatccttgaccgtgtaccaccccaccctgctgcccatggctttcgcaggggccattcgtgcgtgacgcatgcagccctacacgcgggacagaccgtggtcattagaatggatctcaaagatttctttccttctattcagctgtctcgcatacatgctctctttgccaaactcggatattgcgccagcgttgctggtacactcgctcgcctgtgtgtgaatcgaactcccccttcagccttcaacgatagacagctgggggccgcactgaattggacggagaggcaggccctgaagagccctcaccttccccagggctccccatgtagcccagcattggcgaatctgtgcgcatacaggctggatctcaggctgagttccctggcccagtctcagggggccacatatagcagatacgcggatgacctggcattcagtggaggtgctgcttttgctcgacgggccgagagattccacctgcaagtggctgcaattgcactggaggaagggttccaggtgcaccaccggaagacccgtttgatgcgagcagccacccggcaacaggttacaggcgtcgtggtaaatagacatcccaacattgcccgctccgactacgacgctctgaaggctaccttaactaactgtgtaagacatggccccgccactcaaaacagggatcgtcatacagactttcgagcgtacctggcagggaggatagctcacgtgaagatggtcaatgcagaccgcgccaccaagcttcagcggcttttcgaagctatcgcctggcccgcttga

SEQ ID NO: 12609 - RNA, 1371 nt, synthetic construct
  source 1..1371: mol_type = other RNA
atgaatacaaagcagttcacagtgctggcgttagctgacatggtcctggcaaccgatggctccctcgcatctctcatcggcgcctgtaaccgcgtcttcgacgctgaaccgccctgggttcctgcagcatgcgcagctttaattgaacgtacaggggattacttccattactactctaggagagaactggccgccctgctgcttgagtgcatcgggcacggatctgctggggccagagatgaggatgcagagccaggccacgagcggggtctggaatgccttgtgatgcctgacgtgagaaggctctgtgtggagccagccctcagaccccctaaacctgcttggcttgcggccctggctttgcccgatctacccaccgcaggtgcccttgctgcatggctcaacgaacccgttggcgccctggattggttcgccgaccaatggcgcctagctcgggatgctcagtcaccgcttcagcactatcattatcgatgggtccccaagaggagcggaggtcagcgactcattgagattcctaaagctcgcctgcgacggatccagcagaagatcttgcgggaaattctcgacatggtgcctccacatccagccgcccatggctttcgccggggacattcctgcgtcacccatgcggctttgcacgctggacggcacgcagtcatcaggatggacctgaaggacttcttccctagcatacagctaagcagggtgcacgcgttatttgagaaactggggtacccacacaggactgccggcaccctcgcaagaatctgcgtgaatagaaccccacagggtgccttgcgcgacaagctggctggtggcgcacttccgtggctggagaggcaagcgcttaaatcccctcacttacctcaaggctctccctgtagtcccgctttggctaacttgtgtgcctatcgcctggacataagactgagcgccctagcacagtccctgggcggaagttattcacgttatgccgatgacctggccttcagtggtggaccagcctttgctcgggctgccgatcgatttcacgtaagagtggcagccattgcgctggaagagggctttcgagtgaacaccaggaagactaggctgatgcgtgaagggacacggcagcaagtaactggaatagtagtcaacgcccatactaatgtggcacgcgatgagtacgacaaactcaaggccacgctcacgaattgtgttcgccatgggcccgctagccagaatcgtgacaggcacccagactttaaagcgtacctggccgggagagtgtcgtacgttcggatggttaacgccggaagagcctcacgcctgcagggcttgctcgatgcaatcgcatgggccgcctga

SEQ ID NO: 12610 - RNA, 1380 nt, synthetic construct
  source 1..1380: mol_type = other RNA
atgaatatcaaacagcataccgtccttgctctggcggacatggccctggccactgacggatccctagcctcgctgaccgcggcatgtcacagggtcttcgacgcagagccgccatgggttccagcggtctgtgaggcactgattgcgcgtacaggtgaacacttccactattatagtagacacgagctggctgggctgctgctggagtgcatcggacacggtcgaggaggaccaggagcggacggacaagacggtgacgacgccgaggactttgcccttcctgaacctatcgcgctcccagccgtcaggagatactgcgtggatcctcctgtcaggcctcccaaacccgagtggttggctgccctcgctctcccagaactcgctaatgccgccgccctagcagcctggcttaacgagccagtgggggccttggattggtttgccgatcagtggcgcctagctagagacgggcagtctcccctgcagcattaccattacagatgggtgccaaaaagaagcggcggcgtgcggttaatcgagattcccaaggcacggctgagacgtattcagcagaaaattctgcgtgagatcctcgatcttgtgcctccgcatcccgcagctcacggatttcggcgcggtcacagctgtgtgactcatgccgcccaacacgccggccaacatgccgtagttaggatggatctgaaggatttctttccgagtatccagctgtcccgcgtgcatgccctcttcgaaaagctcgggtacccttataagacagctggcacattggccagaatatgcgtaaaccgaactccattgggcgcgttccgctcaaccccggatggagatagcctgtcctggtcagagcgacaggctcttaagtccccccatctgccacaaggctccccctgtagccccgctttggcaaatctctgcgcctacaggctggacattcggcttgctgcactcgcagaatcattaggcggggcctatagtagatacgctgatgatttagcttttagcggcggacctgcttttgcacgcgcagctgaccggttccacatccaggtggcagcaatagcactggaagaagggttccgcgtgaacacacgaaagactcggttgatgagggccggtgcacggcaacaggttaccggagtagtggttaacgcccaccccaacatagcccgcgacgaatacgacaagctgaaagcgaccctgacgaattgcgtcagacacggccccgcttcacagaatcgggatcgaaggcctgatttccacgcttatctggccgggcgcatctcttatgtgaaaatggtgaacgccgcaagggcctctaggctccagtctttaatggacgctattgcctgggccgcttga

SEQ ID NO: 12611 - RNA, 1383 nt, synthetic construct
  source 1..1383: mol_type = other RNA
atgactacggataagctgactgcactggcacttgctgacacaatgttggcgaccgatggcagcatggagtctcttattgctgcctgcaacagagtgtttggaagtcggcagccctgggctacagggatctgtgtcgctctgatcgagcgaacaggtgaatcatttcactatttctctaggcacgagttggccgatatcttgcttcagctgctgggccaccaatttgacgacgacgagtacggcgagtataacgacgacgaatttggtgaagaggactccagcccaccttatatagaactgccgcaggtgcgacggtactgcctggatcagcccattcgaccgccaaaaccggaatggcttgccgccctagccctccctgagttacccacaatcggagatttagcgcactggctcaacgaacctgtaggggcactggagtggttcgcggaccaatggcgtcttgccggcgatgcacagagtcggctccaaaattaccattaccgctgggttgccaagaggtccggtggcctcagacttatcgagatacctaaagcccggctgcgcagggtgcagcagaaaatactccgacagatcctcgacctagcacctcctcacccctcggtgcacggattcagacgcggacgttcaagtgtgactcatgcagctttgcacgcaggcaagcgggtggttattcggatggatctgaaggatttctttcccagcatacaggtatctcgtattcatgctcttttcgagaaactgggctactctcagtctgtggcaggtaccctcgcgcgtatttgcgtcaatcgcgctccttatggactgttccgcgataaacaaacaggaggctccttgccatgggtggagaggcaggccctaaaaaccccccacctgccacagggaagtccatgtagccctgccctggccaatctctgtgcttaccgcttggatatcagactggagactctggcccaatcactgggcgcctcctatagccgctacgctgacgacttagcattctcagggggggctgactttgctagagccgcccataggttccacattcaggtcgcggcaatcgcattagaggaagggtttagggtgaatactcgaaagactagagttatgagagaagggacccggcagcaggtgacaggtgtcgtggtgaatacccatccaaacctggctaggagcgaatacgatacgttgaaggccatgctgaccaactgcgtcaggcatgggcccacctcccagaatcgccacaacagaccagactttagagcccatctggccggcaggatttcttatgtcaagatgctgaatgtaaaccgggctgttaagctccaacggctcttcgaatccatcgcctggaccccctga

SEQ ID NO: 12612 - RNA, 1359 nt, synthetic construct
  source 1..1359: mol_type = other RNA
atgaatacagaaaagctgactgctttggcactcgctgatatgatgctcgccaccgatggatccatggcctctctggttgccgcctgccatcgggtattcgacagtccccagccttggagcgcgaccatttgcgctgcccttatcgagcgtaccggcgataatttccactatttctctcgccatgagcttgcccatatactcctgctgctgaccggacgccgcttcgatgacttcgaagacggtgacgacgagcccagtcctcccctaattgaactgcccgcagtcagaagatactgtctcaatcagccaatccgaccccccaagccggcttggttagcctctctggcactaccagaactgaagactgttggggatttagccgggtggcttaacgagcctgtgggagctctcgcatggttggccgatcagtggcgcttggctggcgacgaacagagcagacttcaacactaccactaccgatgggtccctaaacggggcgggggactgaggttgattgaaatccctaaagcacggctgcgtcgaatacaacacaagattctcaggcagatccttgacctggctccgccccatccatgtgcacatgggttccggcacgggcatagcagcgtaacacacgccgcgttgcatgcgggcaaaaacgtgattatccggatggacctcaaggactttttcccatccatccaagcttcaaggatccacgccctgtttgagaaactgggctacccaccatcggtagccgggacccttgccagaatgtgcgttaacagggctccacgaggtatatttcgtgacaagcaaacgggcgggtcattgccctggtctgagaggcaggcactccagtccccccacttgcctcagggaagcccttgctctccagccctggccaacctgtccgcttatcggctggacataagattagccagtctggcccagtccctcggagcttcatattccagatacgcagatgatctagcatttagcggaggccctgatttagctcgggcagccgataggttccacattcaggtggctgccattgcgctagaggaaggctttcggatcaatacacggaaaacgcgcgtgatgagaaaaggtacacgccaggaggtggccggagtcgtggtcaacagccatcccaatctggcgagaggcgaatatgatctgctgaaggctatcctgactaactgtgtgaggcatggcccggccagtcaaaatcgccaccgccacccttcgtttagagcccacctcgcaggtaggatctcatacgtgaagatgcttaatgctaacagggcggtgaagctccagcgactgtttgagactattgagtgggcagactga

SEQ ID NO: 12613 - RNA, 1377 nt, synthetic construct
  source 1..1377: mol_type = other RNA
atggataacgaaaagttaacagccttggccctggcagatacaatgcttgccactgacgggagccctgagaacctcatagctgcttgcgaccgggtgtttgatgccacccaaccatgggcgccaggggtttgcatggccctggtcatgcgcaccggcgagaacttccattatttttctcgacatgagctggccgacattctgctccagcttctcggcaggggtcacgtggactacgacgacgaagacgaggatgaagaggagggtggtgccgatgccccccctttcataaagctgcaggacgtcagaaggtattgtctggaacaacctattcggcctcctaagcccgcttggctcgccgaattagcactgcccgacttacccacggtcggcgatctggccgtttggcttaacgaacccgtaggcgctctgcggtggtttgcagaccaatggaggatcgctcgggatgagcagagccgcctgcaacattaccattatagatgggtgccaaagagatcaggcggcttgcgtctgattgagatccccaaagagaggctgcgccggatacaacagaagattttgaggcagattcttgatcttgtgccgccccatgcctccgcacacggttttcggcgagggcattcttgtgtgactcacgctgcacgtcacgcagggcaacacgccgtggtgagaatggacctcaaggatttcttcccatccatccagcatgcccgggttcaggctctgtttgagaaactgggataccctgagagtgtggccggaacattagctagaatttgtgttaatcgcgccccccacgacctatttagggacaaacagagtggaggcagccttgcgtggtccgaacgacaggcactcaagagccctcatcttccacagggctcaccgtgttcaccggcgctcgcaaatctgtgcgcttatcgcctggatatcagactggagtccctggctcggtcactaggggcaagttacagccgctacgctgatgacctggccttctctgggggagatgaattcgcacgctgcgccgagaggttccacatccaggtagctgcaatcgccctggaggagggatttagagttaatacgcgaaaaactcgtttgatgagggaagggactcgacagcaggtgaccggaatcgtggtcaatgcgcaccccaatattgccagggacgagtacgataagttgaaagccaccctcacaaactgcgtccggcacggaccagaatcccagaaccgcgaatctcacccaaacttccaggcatacctcgctggcagaatctcgtatgtagcgatggtcaatagcgacagagccgctaaactacagcgtttgctcgacgatatcgtgtggcctacctga

SEQ ID NO: 12614 - RNA, 927 nt, synthetic construct
  source 1..927: mol_type = other RNA
atggctggtgcggccagacgagctgattctgccagtgctctgcccctgccccttggagcacaagctcaaaggaggcccgccccggatagaaatagtcaaggcgccgcggctgcacacccagcaaataatcctgccccagacccaagaccaggagccgcagcatgtggacgccccagaattccagcacgcccggtcgaaagacacgctcggaggcttgcttgcagacctcccaaccgtaggccacatggcccggagggattctttccttcaattcagtacgcacgcatcgtggcattatttgagaaactcgggtatcctgataaggtcgccagccttctggcacggctgtgtgttaataggactcctaacggcgcatggcgcgacagaaaggtggcagaggccgttacctggtctgagagacaggccttgaaatccccccatctacctcaggggagtccctgttcacctgctctcgctaacttatgcgcgtaccgactggacatacggctgactgctctcgctcagtcgctgggggccagctactctcggtatgccgacgacctcgtgtttagcggagatcatgacttcgcccgcgctgccgaacgatttcacattcaggtcgccgccatagccctggaagagggcttcagggtcaacacaagaaaaactcgcctaatgcgtgagggtacccgacagcaggtgaccggcgtagtaatcaatcgacacccaaacatcgcccgcgacgaatatgacaagttgaaggccacactgacaaactgcgtgcgtcacggtcccgccagccagaatagggaagggcggaccgatttccgggcctacctcgctggccggatctcctatgttaacatggtgaacgctaatagggcaacgcggttgcagaggctggcggatgcgattgtgtggtcctga

SEQ ID NO: 12615 - RNA, 1380 nt, synthetic construct
  source 1..1380: mol_type = other RNA
atggccattgagaagctgacgctattggcgctggcagatacattactggctaccgaggctcacctggcctcccagatagccgcttgcacccgggtctttgacgcaccacaaccctgggcccctcctgtttgtgccgctttactcgctcgcacgggagataacttccattatttctcacgctacgaaattgccgacctgctcaggcagcttctggcaagagcgcaagaggaacgagagggagccgccgctgaagacgcagacacagccgctgctgacagtgcacccctggtcacagaactgcccccagtgaggagatattgcattgatcctcctctcagacccccccaggcagattggttggttgctttgggactgcctcagctgcatagcgtgggggcactagccgcttggctagacgaacctgttggggctctgggttggctggcagaccagtggagacttccccataacgcgcctgcccggctccagcattaccactacaggtgggttccgaaacggtcaggcgggctgcgacttattgagataccaaaggcaagactccgccgtatccagcagcaaatcctgagacagctccttgacttgactcccccacatgccgctgctcacggtttccgtaggggtcgctcttcggtgactcacgctgccttacacgcaggccggcacactgtgatccgaatggatttgaaggattttttccccagcatccagtacgcaagaattgtggctctgtttgagaaactgggctaccccgagaaagtcgccgggcttttggctaggctgtgtgtgaatcgcacccctaacggcgcccttcatggacgccaggtagccgacgcagtcacttggtctgagaggcaggcgctcaagtccccacacctcccacagggtagcccgtgttctccggcccttgccaatctctgcgcctataggctggatatccggttggacgccctggcccagagtttaggggccgtgtactccaggtatgccgacgacctggtctttagtggggacagagatttcgctcgtgccgccgaccgtttccatattcaggtggctgccatcgctctggaagagggctttcgcgtaaatacacggaaaaccagactgatgagggagggcactcggcagcaggtgacaggagtggtgattaaccgacacccaaacatcgccagggatgaatatgaccagctcaaggccaccctaaccaattgcgtgaggcacggaccagcgagccaaaatcgcgatggccgcgcggattttcgggcatacctcgcgggcagaatctcctatgttcggatggtaaacgcacaacgggcagcccgactgcaacgactcgcagatgcgatagtctggagatga

SEQ ID NO: 12616 - RNA, 1434 nt, synthetic construct
  source 1..1434: mol_type = other RNA
atgagtcgtgtcgctttccctcggaaaacagcccacgcgtctagagactccctcaaggccttgcgttcttttagcttgaggatgaccataaaaaaactcacagtgctggcactcgctgatacaatgcttgccagtgaacgtaatctggattcactcatcgccgcttgtggcagagtatttggggcaccaccaccatgggcttccgaagtctgcgcggcattgatcgagcgtaccggcgagaacttttactatttctctaggcacgagattgcggggatcctcttgcagctactgagccatgataacgctgatgacgacgatggcgacgatgaagcacccgagccgatggagcttccccctgtacggcgatactgtattgaccccccaattcgcccgccgagagatgcatggttggccgcactcgccctacctgagctgaggaccgtgggcgacttagctgcctggctcgacgagccagtgggagctctagagtggttcgccgaccaatggagactggccggcgataaggaaagcaggctgcagcattatcactacagatgggtgcccaagcgctcaggaggactgcggttgatcgaaattcctaaggaaaggctgcgctccatccaacagaaaatactgcgccagattctggatcctctgcccccacatccagctgcccacggttttcggagggggcattcctgcctgacccacgctacgctccatgctggacggcacgtcgttatccgaatggacctgaaggatttttttccctcagtgcagctgtccagaatccatgccttattcgagaagcttggctaccccgataaagtggccggagccctcgcacgagtttgtgtgaatagggctcctcacggcgttttccgggacacgcacgatggcgccagcgttacatgggccgaacgccaagccttgaagtccccccacttacctcagggttcaccctgcagccccgcacttgccaacctgtgcgcctacagactggacgtacggctggaggccttagcgcaggccatgggagctagttacagtaggtatgccgacgatctggctttctctggcgacagagacttcgcaagggcggctgagcgcttccacatccaagtcgcagcaatagccctggaagagggttttcgaatcaacactcgcaagaccaggctgatgcgggagggtactcgacagcaggtgacaggggtggtggtcaatgctcatcctaatattgcgcgagacgaatatgaccgccttaaggctactctgaccaattgtgtccggcatgggccagctactcagaacagagactctcaccctgatttccgcgcctaccttgcagggagaattagctatgttaaaatggtgaacgcgtcgcgggccgtgaaacttcagaggctactcgccaccgtcgcatgggcatga

SEQ ID NO: 12617 - RNA, 1341 nt, synthetic construct
  source 1..1341: mol_type = other RNA
atgactattgctaaactaacagctctcgccctcgcggatacgatgctggcctccgacggtagcgtggaaaaactgatcgcggcttgtggccgcgtatttggggcaccacaaccctgggcgccgaaactttgtgccgccctgtccgaacgtactggcgacaactttcattacttctcacgccacgaaattgcagacatcctcctccacctcctgggccatgactataatgatgatgaggagcgccctgtaattgcactgccggcagtccgcagatactgcatcgacccacccatccgacccccacaggatgagtggtttgctgccttggctctgcccgagcttcccacggttggtgccctagccgcttggttagacgaaccggtcgacgccctggattggtttgcggacctgtggcgtgtggagtccggccaacagagtcggctccagcactaccggtataggtgggtaccaaagcgcagtggaggcctacgcctgattgagatccctaaggcccgattgcgccgcatacagcagaagatcttaaggcagctgcttgacaggctgcccccccatcctgctgcacatggattcagaagagggagatcatgtgttacccatgccgccctgcatgcaggcagacgaatcgtcattcgaatggatttaaaggacttcttccccagcattcaatactccagaatccacgcgcttttcgagaaacttgggtattctcctactgtggcaggtaccctggcaaggatatgcgttaatcgggccccttgtggcgtgttcagcgatccaatggaggggggatctctgccatgggcagaaaggcaggcgctcaaaagccaccatctgcctcaagggtcgccctgctctcctgctctggctaatctttgcgcttatcgactcgacatgagactccaggcactggcccagagtttgggcgcctcttattccaggtacgcagatgatttagccttcagtggtgaccaggatttcgcccggaccgcagaaaggttccacattcaggttgccgccatcgccctggaggaaggatttaggattcaccacagaaagacaaggctcatgagggaaggcactcggcagcaggtcacaggggtggtggtgaacacccacccaaatatagcccgggacgagtacgatcggctgaaggccaccctgaccaactgcgccagacacggacaagctacacagaatcgggactcacatccaaactttagagcatatttggctgggcgtataagctacgtgggaatggtgaacgctaaccgggccttgaagttgcgccgtctttttgatgctatcgcttggcctgcttga

SEQ ID NO: 12618 - RNA, 1371 nt, synthetic construct
  source 1..1371: mol_type = other RNA
atgaatatcgaaaagctgactgtcctggcattggctgatacaatgctcgctagcgacagaagtctcggcagtctgatttccgcctgtggaagtgtgttcggaatgagccccctttgggcacctagcatctgcgccgccctgatcgaaaggaccggggagaacttttatcacttctcccgccatgagctggccgacatcttactccacctgctgggaaggggctccgacgacgtacatgacgatgaagatgaagacaatccagaagaatataccgaggtcgctgaaagacttgaacttccggaggttaggcggtactgtatcgagcctcccattcgacccccacagactgcatgggttgccgcactcgcactgcctcagctcccttcagtcggtgccctcgctgcctggctagatgagcctgtgggtgctctcgcctggttcgcggaccaatggaggctggcctctgatgcccaatctcggctgcaacactaccactacagatgggttcccaagagaaacggaggccagaggctgattgaaatccccaaagcacgcctccgcgtcctccagcagaagatacttcgccacctgttggatagactgccacctcatcccgctgcccatgggttcagaagaggacattcttgcgtgacccacgcagcgctgcatgctggtaggcctgtggtagtgcggatggacttgaaagatttctttccctccatacaattagcgcgaattcacgcactgtttgagaagctggattatccacccgccgtcgctggcacattggctcgtatctgcgtaaaccgggccccacagggggtgtttaaagaagctgggtcgctgccctgggctgagaggcaagtgttacgaagcccacacttgccccagggctccccatgttcaccggctcttgccaatctatgtgcataccgactggacatgcggctggaggccttagctcagagcctcggcgcgacatattcacgctacgccgatgacctcgccttttctggcgatcgggactttgcaagggccgcggagagattcaatattcaggtcgcggctattgcactagaggagggcttccgcataaatactcgtaagacacgtcttatgcgtgagggtacccgccagcgactaaccggagtggtggtgaacgcccatccgaacatcgccagagatgaatacgaccggttgaaggctacgctgactaactgcgtccggcatgggccagcaagccagaacagagacaggcaccctgatttccacgcacacctggccgggaggatttcacacgttaaaatggtgaatgccaatcgggctgttaaattgcagcgcctgcttgaggccatcgcctggacggtgtga

SEQ ID NO: 12619 - RNA, 1374 nt, synthetic construct
  source 1..1374: mol_type = other RNA
atggatatcgacaaattggcggtcctggccctggctgatacaatgttggcctccgacggctcaatggccgccttagtagcagcctgccatcgcgtattcgcagctccacagccgtgggcgccaagaatatgtgctgcccttattgagcacactggcgagaactttcattacttttctaggcacgaactcgccgataggttgtggcagctattgggaagggccacctcggacgccgacgttgatgtggatgactttgtcgcgttagccgcgcccccctttatcgctcttcctccggtgaggagatattgtattgacttgccgcagcgaccacctgctccagggtggttggcagcactagcacttcccgagctggcaaccgttggggatctggcagcctggctaggtgagccagttgccgcgctcgattggttcgctgaccagtggcggctcgatggacctgcccaaacacccctgcagcactatcattacaggtgggtccccaaaagaagtggcggctggcggcttattgagattcctaaggaaagactgcgacggctccagcagcgtatccttaggcagctgctggatcgcgtgcctccacatcctgctgcccacggattcagacgaggccacagctgcctgacccacgctactctacatgcagggcagcgtgcagtgattcggatggatctcaaagacttcttcacaagcgtgcagcctgctcgcatacacgccctcttcgctaaactggggtaccccccaagtgttgctggtaccctggcccggctgtgtgtgaatcgcgctccacatggggtgctccgtgacaggcagggagacgtcgctctcccttggagcgagagacaggcactgaagactccccacctgccccaaggcgcaccttcatccccagccttagccaatctgtgcgcataccgcctggatctgagactcgctgcattggctcgcaccctgggagcctcttattctcgctacgccgacgacctggccttctccggtggagaagagtttgcgagagctgctgcgcgtcttcatatccaagtggccgcaatcgctctggaagagggctttcgggtcaacacccgcaagacacggctgatgcgggctggagcacggcaacaggtaacgggggttgtggtgaatgcccatcccaaccttgctagggacgaatatgatcgactcaaggccatgttaactaactgcgtcaggcacggtcctgccacgcagaatagggcaggtcatgccgactttcgggcccacctcgccggaaagatcagccacgtgagaatgttaaacccccagagagcaggccgactgcaagccgtgttcgatgcgatccgctgggacctgcactga

SEQ ID NO: 12620 - RNA, 1377 nt, synthetic construct
  source 1..1377: mol_type = other RNA
atgatacctgctcccagtgtggcactcgctctggctgatacactgcttgccggtgaagccagcccagatggactggctgcttctgccgcaagcgccctaggtactgcctatgcctggggacccgccatgtgcggtttcattctgcagcgtaccggcgataagttccgctacttttcgaggcacgagctggcggcaataatcttggattccgatgcttttcatgccgcctttgagcccggaaaagaggccccccaaattaaaagatattgcttacagctccctgttaggcctgagccagacgcttggctgagcgctctgtccttgccagccatccccacgttaggggaactggcgctgctcctgaatgtcgagcttcaggatctgggctggttcgccgaccaatggagaagagggtcagctgaagcagcacccttgcagcattaccactaccgctgggtagcaaaacggagtgggggctggagactgattgaaatcccaaaacagcggctgcggcgtatgcagcagacaatccttagaaagattctggaggacgtccccgtgcatggagcagctcacgggttcagaagagggcactcatgtgtcacccacgctgcattgcatgccgggcaacgcgttgtgattagaatggacctgaaggatttcttcccttccatccaggcgtctcggatacatgcactcttttccaaattggggtattctgattcagtggcgggcaccctggccaggctatgtacttcacgcgcaccagctagtgccttcgcagacccgcacacaggaggaagccttccctgggcagctcgtcgagcgcttaggagcccacatctcccacagggctccccctgttctcctgccttagccaacctgtgtgcatggcgcctcgacctcaggctcgacgcattatgcggttccattggcgcaacctactcaaggtatgctgacgatctcgtttttagtggcggccgggagttcgagcgctctgttgaacggtttcatgtgcaggtggcggcaatcgccattgaggaagcctttggggtcaacacacggaagacgcgcgtgatgcgagcgggagtgaggcaacaggtcactggcgtagtaatcaaccagcaccctaatctgagacgagacgagttcgacaggctgaaagccgtgctcaccaattgcgctcggcacggaccggtggctcaaaaccgagaaggccgagagaactactggcactaccttgccgggaaggtggcctgggtcaagatgttgaatcctgccaggggagccaagctagaaaaggtgtttgccggcatcgactggcctgaagccggtagtggctctgttgctgccccggcttccgagagcagcagctga

SEQ ID NO: 12621 - RNA, 1479 nt, synthetic construct
  source 1..1479: mol_type = other RNA
atgccactgcgcggatatcccgtggggacaattctcctatgcaactcgccccatgaaccaccatgtgccgccgctcacctgtcttcatcctttacccggttggtagagggatcccctcctccccagagctaccctagcatgattcccaaggacgcggtggcacttgcgctggcagatacgatgctggcaagggacgctactctagccggcctgatcgcaagcgctacttgggctttcgaccatccgtggccctggattccggccctttgcgaggagatccacgcacgcacagctgcacatttctactacttctccagagatgaactcgccaggataatatttgagctggatgtctttcacgcagcatgggatggcgaaggtccagcgccacagttgcagcggtactgcctcgacctgcctgtggttcctccagccccagactggttagccgctctggctctgcctgcattgccctctgtcggtgaactggccaggtggctcggactccgacccgatgagctgggctggtttgccggccaatggcgcaaagacccaatgcccgcagcccagcttgagcattatcattatcgctgggtgccgaaacggagtggcggagttcgattgatcgagatccccaagcctcgccttagagccatgcaggccatcatcctgagagagttactggatcgagtaccagctcatcccgcagcgcacggcttcaggaggggacattcttgtgtgacacatgctgccctccacactgggcaacgggtggttatccgcatggatctcaaagacttttttccctcaattcccgcaagtaggatccacgcgctgttcgctaaactgggttacagtcagacagtcgccggtgtcctggcccgtctttgcgttaatagggtgcctgctggcgtattgcgtgaaccggccggaggaaacgctctaacctggacccagcgacaagccttaagggccccccacctgcctcagggttcaccatgctctccggctctcgccaacgcttgtgcctggagactggacgtgcggttagagacattagcccagctcctcggggctagatacagcaggtatgccgatgatttggtgctgtccggcggtagagagcttgagagagcaatggaccgggtgcacgcacaggtgggagctattgccctagaagaagggttcgccattaacactagaaagacgcgagtaatgcgtgctggcgtgcgccagcaggttactggcattgtggtcaatcggcaccctaacatagcgagagacgagttcgacgtcctgaaggccaccctgaccaattgtgtgagacacggccctcaggggcaagaccgcgaaaatcgtcccgattttcgggcttggctcgccgggaaggtcgcgtatgtgaccatggttaatccacaacgaggggggaggcttcagcggctgttcgatgcaatcgcctggcctcacccacctttgtga

SEQ ID NO: 12622 - RNA, 1380 nt, synthetic construct
  source 1..1380: mol_type = other RNA
atgattcccaaagatgccgtggcccaggcactggcggatactatgttggctcgggatgctactctggctggcctcattgccagcgcaacctgggcgttcggtcacccatggccatggatacccgacctgtgcgagcagatccactcacgcacggccgagcacttctaccatttcagcagacacgaacttgcccagatcatctttgaactggatgtattccatgacgcatgggatggggatggtcccgccccagagttggagagatactgtcttgacttaccgctagtgcccccgccccctgactggttagctgctctggccctgccagcccttccttctgtgggtggcttagctaggtggctgcgcctccgagtggacgacatagcttggttcgctgatcaatggcgcgttgacgctgccccagccgcacaaatggagcattatcactacaggtgggtacctaagcggagtggaggcgtccggctgatcgagatccccaagcagcggctgcgtgctatgcaggccacaatcctccgcgaattgctggacagggttccagctcatcccgccgcacacggatttaggagaggacactcgtgcgtcacacacgccgccctacacacagggcagagagtagtcattaggatggatctgaaggacttctttccatccattccagcatcccggatccatgcactgtttgcaaaactgggctattctcagagtgtcgccggggtcctggcacgactctgtgtgaatagagttcctgcaggcgtgctacgcgcacccgtggatgacaacgccctgacttggatgcaacgtcaggctctgcggacacctcaccttccccaagggagcccttgcagccctgcactggcgaacgcttgcgcctggaggctcgatgtacgacttgacaccttggcccagtcattgggggcgcggtactctaggtatgccgacgacctcgttttttccggaggaagagccctcgagcgagcgatggaccggtttcacgcccaagtgggggctattgcgattgaagagggcttcgccgtgaatgccaggaagaccagaatgatgagagcaggcgtgcgccaacaggtgactggaatcgtcgttaatcggcatccaaatatagctcgtgatgaattcgaccttctcaaagctacgctcaccaattgtgcacgccatggcccgcaggctcagaatagagatcaccatccggacttccgcgcgtacctagccggaaaagtcgcatacgtgaccatggtgaaccctcagcgaggtcagaggctgcagggcctgtttgaaaccattgcctggttgtccgccccagggcagcctgataacaactcaggcaagcagtataactttccctga

SEQ ID NO: 12623 - RNA, 1317 nt, synthetic construct
  source 1..1317: mol_type = other RNA
atgataccggcccacagcgtagcacttgccttggccgataccatgttggcgggcgctgctggcgttgctgctctcatcggaagcgcggccagagcttttgaggtcgagcataaatgggtgccgcccctgtgtgaagccattcacgtgaggacaggggaacactttcactccttctctcgcatggagctggcagccattatcttggacgacgagcacttcctaggcgcgtgggaaaacgggaaagcacccccacagatacgtcggtattgcatctctcttcctgtagtgccagaacagccagcatggttagtggccctggctttgccggccatccccactgttggcgaccttgcacgttggctcaccgtccgcccagatgaactcggctggttcgctgaccagttccgcctcacacacgatgccaccagccggctacagcactaccattatcggtggctcccaaagcgctcaggaggatggcgactaatcgaaatccccaaacagaggctcagggctatgcagcaaaagatcctgcgagaaatcttggatttagtgcctgcccatagcgcagcccacgggtttcggaggggtcattcatgcgtgacccatgccgcactccacgtcaaccaaagagtggtgattcgcatggatctgaaggacttctttccctctatccctgcctcgagggttcatgcaatgttcgtcaagctcgggtattcccagtctgtcgcaggcgccctggctagactgtgtgttaatagaacacctgcgggtgccgctgcagctgttgacatttcctgggcagagaggcaagccctgcggagtccacatctgcctcagggcagtccttgttcccctgcactggcaaacgcgtgcgcttttcgactggatatacgcctgcaagccttggccgccagcatgggagccgtgtactccaggtacgctgatgatctggtgttctcaggagacgcccagttagcgcgggctcttgacaggttccacgtcagagttgcagctattgcactgggagagggttttcgggtgaacactcgcaagactcggatgatgggagccggtgtgcgacagcaggtgacaggcatagtagtgaactgcagacccaatattgccagagacgagtacgacgctctgaaagccacccttacgaactgcgtcagacatgggcccgccagtcagaataggatcgggcacgataattttcgtgcatatctggagggccgggtagcgcatgtgcacatggtcaatccagcccgagctgagagactccgcaatctgtgtgccgctattgtgtggccctga

SEQ ID NO: 12624 - RNA, 1326 nt, synthetic construct
  source 1..1326: mol_type = other RNA
atgaaccccaagacttttgtggccctggccctggctgatactttcttggccagagaggcttctctggatgcaatgctgcagggggccaggtgggcgttaggcaaaaagtggcgctggattccgagcctgtgccgagccattcataagcaaaccggcgaacaactgcactcccatggaaggacagaactggcggcgctcattctcgcccatgaagggtttgccgacgcttggttggacagcgagccccctcaggtacggcatttctgtctcgacccacctgtagccgctgaaccaccagcctggttaagtgcgttggctctccctgttttggctacagccgctgacctggcccagtggctgaaagtgacaccgtcggaactcgattggtttgctgaccagtggagaaactctcaggcaactaccaccgcactgcagcactatcaccatcggtggatcgccaagcgatcagggggattaagactaattgagatccctaagccacatctcagaaccatgcagacgcaagttttgcgcggacttctggacagaatccccttgcaccaggcagcccacggctttaggaggggccacagctgtgtgacccacgcagctctgcacgcgggtaaacgcgttgttatccggatggatctgaaggacttctttcctagtattcccgcagccagagtccacgcactcttcataaagttgggctacccgcccaaagtggctggcctgctctcaaggctttgcacataccggacccctggcaacgtccttaatcagcctgggcaaaaaatcccctggcaggagcgtcaggccctacgtactcggcacctaccccagggatccccttgttctccagcactggctaacctgtgcgcctataggttagacatgcggctgcaggcgcttgcaaccgctcttgatgccagatactcccgctacgcagatgacctcgtgtttagcggggaatcaggactggaaagagcaatggatcgattccacgtccaggtagctgcaattgcactggaggagggctttgccgtgaatgctcgaaagactcgcatgatgcgatccggtgtgaggcaacaagtcacgggtatcgtggtcaatcgccatccaaacataccacggcaggagttcgataaacttaaagctgccctgacaaattgcatacgccatgggcccgcctctcaaaatagagagggccgggacaactatcgtcagttcctcgccggacgcgtgtcctatgcccagatggtgaatccccagaggggtaagcggcttcacaggctgttcgagcagatcagttggccagggagctga

SEQ ID NO: 12625 - RNA, 1338 nt, synthetic construct
  source 1..1338: mol_type = other RNA
atgactcctcagaccttcgtggctctggccctggccgatacatttctcgccagggaggcgagcgtggaagcaatgcaacaaggcgccagaagggcactcggcaaaaaatggcgctggatacctagcctctgcagagctgtctacaagcagtttggagatcgcttgcatcgccatgggaggacagagttagcggccctgatattggctcaccagggctttgcagacgcctggttagactccgaacccccacagatccggcacttttgcctcgacctgccactgcccgcaggcaaacctgcttgggtcagtgccctgccccttcctgctctggcgacaaccgccgaccttgcccagtggctgaaagctggtcctagcgagctggattggtttgcagacaagtggagaacttctcctcctcccgctgccgccttacagcattatcatcatagatggattgcgaagcggtcagggggacttcggcttctcgaaattccaaaaccacgcctccgaaccatgcaagggcagatcctgagaggtctgttggatctgcttccgctgcaccctgctgctcaggggtttaggcgcggccactcttgtgttactcatgcagccaggcacgcaggtaagcgagtggtcatcagaatggacctgaagaacttcttcacatctatcccagccgccaggatccacgcattgttcaccggacttggctacccttcccgtgtggctggtattctttcgcgcctgtgtacccacagaacgccaggctccgtgttgaatcatcaagacccagcttcagcaggggcactgtcttggcaggagaggcaggtgttccgccagcgacatctgccgcaaggatcaccctgcagccccgcactagcgaacctctgtgcctatcgtttggacctaagattgcaagccctcgctgccagtttaaacgccgggtactcacgttacgccgacgatctggctttctccggagacggagaactagagcgggccatggatcggttccacgtccaggtggccgccatagctctcgaagaggggttcagcgtgaatacgcggaaaaccagaatgatgcggagtggcgcccgacagcaggtaacaggtatcgttgtcaatcggcacccaaacattccccgccaggagtttgataatctgaaggcggcactgactaattgcattaggcacgggcccgcttcccagaacagagatggaagggataatcaccggcagttcctcgcaggacgtatcgcttatgtaaggatggttaacccccagcgaggcaagcgcctgcaacagctatttgacaagattgcctggccgaagggctga

SEQ ID NO: 12626 - RNA, 1344 nt, synthetic construct
  source 1..1344: mol_type = other RNA
atgactccgaagacgttcgttgcccttgcgctggccgacaccttcctggcacacgacgcctccacaaatgccttgatcgccggcgcaaggagagcattgggaaagaagtggcgatggatcccaagcctctttcggaccatcttgaaacagcacggagaacaactgcattgtttgggacgctcagaactcgctgccttaattctagcccatgacggcttctcagacgcttggcaggagtcttctcctccccagatacggcactactgtctggacgcacctttggctgtcgaacagccgggttggcttgcggcccttggattgcctagactggcctcagtagccgagctggctcagtggttacaggtcgcacctctcgagctggattggttcgccgataagtggcgaaataacatgccagccccatcagctctgcagcattatcattataggtggttacagaaacgttccgggggcctgaggttactcgaaattcccaaactgagactgcgcgcgatgcagtcccaaatccttcggcatttgctggacctggtgcctccacatccagccgcacatggctttcgcagggcccacagttgtgctacacacgcagcacttcatgccggcaagcgggtggtgatgagaatggacctgtccaattttttccccagcatacccgccgctcgcattcacgggctcttcgttaagcttgggtaccccgctaacgttgctggggtattctctcggctgtgcacacataggaccccagcaagcgtcctggctaaccccgataaaggcctaagatccgctcacgtgatgtcttggcaggaaaggttagcactccgcacaagacacctgcctcaaggatccccttgcagtcctgctctcgcgaacctgtgcgcatatcgtttggatatgagactgcaggccctggccgtgagtctgaacgcctcgtactcgcgatatgctgatgatctagtgtttagcggtgaccaggaactcgagcgagccatgcaccgctttcacgtgcaggtagccgcaattgccctcgaggaggggttcagcgtcaatactcgaaaaactcgtatgatgcggagcgctgtgcggcaacagatcaccggaatagttgtgaatagtcacccaaacatcgctagacccgattttgataatctcaaagctgccctcaccaattgcattcgccacggcccggccagccaaaatagggaggggagggacaactacagacagttccttgcgggcaaggtggcatacctacacatggtgaacccccagcggggtaagaggctgcagcagctgtttgagcaaatcgtctggtctgcggactga

SEQ ID NO: 12627 - RNA, 1323 nt, synthetic construct
  source 1..1323: mol_type = other RNA
atgacctcaaaaacactcgtggccctggctctggccgatactttcctgtccagagaagccggtctagcgtcaatggttcacagtgcagcctgggcgcttgggaagaagtggaagtggattccctccctttgtcgtgccatcgtggagcaggctggcgagcatttttatgattactcacgagacgaactggctgcattgatcctggcacatgctggattctccgatgcatggcaggacaacgcccctcccaggatcaaacattattgcctcgacctccctatcgctcccgagaaaccagcctggctgtcttctctggcactgcccgagctggctactatagcggatcttacacaatggttaaagctgtctgccgctgaattagactggtttgccgataagtggagggagcaatcaccaaccgcaagagcactgcagcactatcgatataggtggctggtaaaaaagtccggaggactgcggctgattgagatccccaaacagcgcctgagatcaatccagacccacatcttaagaaagctcctggatctagtgccgccacacagcgccgcacatggtttcagaagggctcacagctgcgtcactcacgctagcctacacgctggcaagcgggtagtggtccgcatggacctcaaaaattttttcacgagtatctcgtacgctagaatacatgctatgttcgggaagcttggctacagctctagtgttgccgccgcgttggctcggctttgtacacataggaccccgctaggcgtctttagcgagcgggagattacaaaaacaattccttggcaggaacgtcacgccttgaggacccctcatctcccccagggatccccttcttctccagcacttgccaacttgtgtgctcaccgactcgatatcaggctggacgccctggccaatagtctcaacgcccgctacagccgctacgccgacgatctgaccttctccggagaatacgaactcgaacaggctatggaacggttttccattcaggtggcagcaattgcccttgaagagggtttcagtgtgaatacccggaagactagattgatgagagccggcgtccgccaacaagtgacgggcttgttagtgaatcggcatccaaatacacctcgcgaagagtttgacatcttgaaagccactctcaccaactgcattcgacacgacccagccagccagaatcgagaggggcgtgagaactacaggcagtatctggcggggaggatagcgttcgtgcacatggtcaacgcaaaacgcggggttcggctgaagcagctctttgagaagataaagtggtga

SEQ ID NO: 12628 - RNA, 1341 nt, synthetic construct
  source 1..1341: mol_type = other RNA
atggacattcccaagcaggtcgctctggcgatcgctgacgctttgctggctggcgagtgtagccacattgcacttatgaagaatatgtcttgggtgctggggaaaaagtggccttggataccttccctctgccccaagatctaccttcatgccggaccgcatttctaccactacagcagacatgaaattgcagccatcatcctggatgaccacggctactacgacgcttggcgcggtaaagacaagccgcagattaaacagtattgcctgttaccagccatagccccagagaagccagcttggctgcaagctctggctttacccgagttcaataactcggccgatctggcacggcatctgaacctcacagttaatgagcttgcttggttcgctgatcagtggaggcaagatgcccaggccgcccctcagttaagacactatcactacagatggctggaaaaagccacaggcggctggcggctcctggagattcctaagtcaagactgcgcaatatccagcggaagattctccagcgaatcctgaatcaagttcctccccatgccgctgcccaggcctttcagcagggacgaagttcaatcagccatgccgcacagcacaccgggaagctggtggtagtgaggctcgatttgaaggactttttcacatctatacccggtagtaggcttcacgcgctatttgcgaaactcgggtatcccgaaaaagtagccggtaccttggcaaggctgtgttccaatcgtactcctaccgtgattgctaaggagaaaacccgatacctagcccctctctcaagcgcacacttgctgaggagtccacacctgccgcagggagctcctacatccccagcattggccaacctgtgcgcttatcggctagatatgcgcctccaggcattggccgactctatgcaggcctcttattcccgctatgcagatgatcttactttctccggcgacgagcagtttgaccaatcactgagaagggttatcccacaggtggcagccatcgtcctcgaggaagggttcgtccttaactacaagaaaactcgcatcatgcgagctagcacacggcaacaggtgacgggaatagtggtgaacagacattgtaacatcaaaagggccgactatgacacgcttaaagcgatactgaccaactgcctccgtagtaatcccgcctctcaaaaccgtgaaggacacgctaattttcgggcgcatctggccggcaagctagcctacatgcgcatgatcaaccccgcaagaactgcaaagttacaggcgttgtttgaacaaattaaatggccagatagcgcagtcatgatttga

SEQ ID NO: 12629 - RNA, 1341 nt, synthetic construct
  source 1..1341: mol_type = other RNA
atggataaaccggagcaggtcgcacttgctctggcggacgcgttgttggctggaccatgcgacccggtcattatgatgaagaatatgagatgggtgatgggaagaaaatggccttggatccccgcactctgtaaaaagattcacagacataccggggaccacttttaccattactctcgacatgaggtggccgatatgatcctcgcagacaacggcttcgataacgcttggtttcggagtgaaagcccacctgtgattcgccattattgcttactgccgccagtagcccccgatagacctgtgtggttagaaatgctcaatctgcccagtctcgccaatagcgatgaattggctaactacctaaacctgccacacggtgagctggcctggttcgcggatcagtggagggattcggccccagaatccactgggttgaggcactatcggtacaggtggctggacaaacctaccgggggcgttaggctgctagaaatgcccaagcagagacttcgtaacatccagcgaaagatcctccgacagatcttggacagagtgccccctcacgcagctgcacaggcctttcggaaacggcattcttgtctctcccacgccagcttgcatacggggaaacaagtagttctgcggctggatctcaaggacttcttttcctctatccctggatcacgcattcattccctctttgctaagcttgggtaccctcagagcgtcgccgcaatcctggctcgcctttgcacccaccgaactcctaacacagtcctggacgagattatggcacggcagggagctccctggcaagtacgccacatgctcaggtctagacacttaccccaaggcgctccaacatccccagcccttgccaatctgtgtgccttccggcttgatatgcggctgcataccctggctgccagtatgcaggcaacatattcacgttatgctgacgacctgacattctcaggtgacgaagagctagcaagggccctccagcggttcataatccaggcgggcgccattgcgatagaggagggattctcactgaatcacaaaaagactagaatcatgcgcgctaccggtcgccaacaggtgactggcatcgtgattaaccgccactgtaatataaggcgtagcgaatttgacaggatgaaagccatattaactaattgcgtgcgcaatggcccagccacgcaaaacagagatcatcacgccgatttccgagttcacctggcaggcaagctggcacacctgcatatgatcaacgccgccagggccaccaagctgcagacaatttttgagcagattaactggcccgctaagcccgagtga

SEQ ID NO: 12630 - RNA, 1359 nt, synthetic construct
  source 1..1359: mol_type = other RNA
atggacgccaaggacttcgtagcactggcactagctgacgcttggttggctgagccagctgggcaggacttcacaggaagggctaccgtgttgttcggccaacctcacccctggattccacgcctagctcgtcggattaaaaggcagttcggcaccaccgagcattatgatcggaggacagcgctggcacaatttatacgggctgacgatggttataccactgcttggtcctcctacgctaaaccgcgactgagacaatacgtctttgccacacctcagatgcgcctccagagcgcatggctgagcacagccaagctgccacccctggcgacatgtggagcactggcagagtggttgggtcttacaacagaggagcttgcatggtttgccgatacccgagggatgaaccgaactgctacgggaaagctgaaccactaccaataccagtggagaaaaaagagatctggacagtaccggctgatcgaaagcccaaaagaacgcctgcgggccattcagaggaagatcttgactggcatcctcaatcaggttcccccccacgatgccgcacatggcttccgacgccagcgatcttgtctctcttttgtggccccacatatcggaaaagactgcgtgttgaggatggacctgtgtaattttttcggcaccattaccgccgcccggattcacgccctctttagagcactgggctatcccatggctcccgcccgtctcttaacgggcctctgcacccacagtcttcctcagcagttcatcgatcaattacataccgccggcatcgaattatcctgggcggaaagacgtgcgtaccaggcacctcaccttcctcaaggagcccctacttcaccggctctggccaacttgtgcgcctatggattagatgtgaggctaagtgcccttgttgcgaaacatggtgcagattacacgcgctatgcagatgatatagccttctcagggggtggggcctttaaaagccaggcggccgacatctccacattcgtggccgtagtggcccaggaggaagggttcgccgttaactttagaaagacgagaaggatgcccacttctcagcgccaacagctgaccgggataattctgaacaagaagcctaatgtcaggcggaccgactatgatgccctcaaggctattctccataactgccaacagggggaccccgctagtcagaataggagccggcacccagactttcgcgctcacctgctgggcaagatcaattatgtcaaacagatcaacccgcagagaggcacaaagctcctgactctttactcggaaataacttggcctgagaatccctcacagactgcaccagagcagccatga

SEQ ID NO: 12631 - RNA, 1347 nt, synthetic construct
  source 1..1347: mol_type = other RNA
atgactcccagagatcaggtggccgagggacttgccgatgccctactcgcaggtccctcttccgtggatgatcttgccgcacgggctgctgaggcacttgggagaaaacacaggtggatcagaccattcgcccgtcgcgtcttcaaacggtttggagcagcccttgctcatgcccagcgaggcgagctgatcggattcattcagacggaccctggctactgcaaagcctggaaagcggctgggaagctccgcatccggagatacttctttggggtacctagcatgggcccacgtccaggggcattggctaggtgtgtgctgccagaactgcctacttcagctgatctggccgcctggctcggaatcaccatacccgagttagaatggtacgccgacttgaggggcatgattggtagctcggacggcgccctctgtcattaccattataagtggattccaaaacgccacggtgactacagactgatagagagccctaaaccgaggttaagcgccatccagactcgcatcttgagagagatacttgaccttattcccacccacgaggctgcccacggctttcgaagaggccggtcttgtttaacctatgtcgcccctcacgtgggaaagctggtagtgttgaggatggaccttcacaacttctttggtagtatccccttcgctagaatcaatgcgctctttaagactctgggataccccgaagagacagcgaagtatttagctggtctgtgcacgaaccggctgcctgcacgagttgcgctgaagatcccaggagctgatccggggttcgtcctgccctggcctgaatgcaagaagctcaatgagaggcatttgccacaaggcgccccgacctcccctgctttggctaatctgtgtgctctgcatctggacttccgcctcgccgccctagcttcaaaagtcaatgccgactacacacgatatgcagacgatctggcattcagtggcaacgaaggggtgcggagaaaaattggggacctatctacaaccatagccgcgattgctctggcggaagggttcgaggtcaactttcgcaagacaagggccatgcataagtccgatcggcagattctgaccgggatcgtggtgaacgaacgtgttaatatgcagcggaacgagtatgaccgtctcaaagcaacactctataattgcctgcggtttgatcccgattcccaaaatagggaaggccacagggactttcaggcacacctgctgggacgcgtgaaccacttgaagaatctcaaccagaggcgaggcgcaaagctgcaggccttgctcgaacgcgttgagtggcaagcaggcgctggatga

SEQ ID NO: 12632 - RNA, 1338 nt, synthetic construct
  source 1..1338: mol_type = other RNA
atgacctccaaatcacgcaaacacttcgtcgcctgcggcttggcagatgcactcttagctgggccacccgggatcactgaatttgaggccagggccaagcaggctctggggagaaagcctaggtgggttctgcccctgtgtaagagaatttttgcgcggttcggatctgggttgggcacacaacagcgggcgaaactgattgaattcatagagacagaccagggctatctcgatgcctggctagctgatacaaagcccagaatccgccattattttctggctactaacagcatggcaccaagagtgggagcgctggccctgtgtcccctaccaaacatcccgacatcagtggatttggccgcctggcttgatatcagtatagaggacctcgagtggttcgccgatgtgcgccacatggtgaaagcccccggccctctgtgtcactatcatttccgatggctgcctaagaggtccggtggttggcgtctggtcgagatacccaaacagcgccttcgggacctgcaaaggaaaattctccgcgaggtcctggacccagtcatgccacacgatgcagctcatggctttcggcgcggccgttcctgtttgaccaatgcagctcctcattgcggaaaggacgtggtgcttcgaatggaccttctgaactttttcacgagcatccccgcctctaggattcacgcactcttcacaacgctgggataccctgaccctgtagccaagcgcctcaccgggttatgcacttgcgaggtcactacccgcatgcttccagcacttccggccggagcagaacccttaccatgggcaatgaggaagcggtacgctgagcgacatctgcctcagggcgctcctacaagccctgcgctggctaacctctgtgccttgcacctcgactttcgtttggcagggctggctgagtcgttaggtggagcatacacccggtacgccgatgatctggccatcagtggcggtgaaccgctgaggagaagggttggggccatcaccagtctcctcagcgctattgccagagagcagaagtttgacattaaccacagaaaaactcgggtgatgcacaggtcagacaggcagcggttgaccggggtggtggtgaatgaaaagccaaatgtctctagagctgagtttgaccaactaaaagccgtgctgcataactgcgtagtacacggtccccagtctcagaataggatgggacatcccaatttccgtgaacacttgagaggccgggtttcctatgttgccggccttaatggcgctagaggagaacgcctgcgactcgcgttcgaggaaatcgattgggcccgatga

SEQ ID NO: 12633 - RNA, 1332 nt, synthetic construct
  source 1..1332: mol_type = other RNA
atgggaaatgggctgagtagccttgcaacaaacctgcggcttctcgccctgagcgtcctagctggagcctgggataaaccagggctcatcgagcggttggagcaggctcttgagtacagcccaactgacgccgcacaactggcctcccgattattgttccactacgaggctggccagccgccgagtagacagagactgatggcctttctcgctaacgaggtcagtctgcagcagcggtttgcatcgcccgacgccaagcctcccagattagttctcgaccccccccggatgggtagacctccagaaagactcataacactgccactgccacctctggagacacgtaaggacctggccgagtggcttggactctttgaccacgagttggcctggtttgcggatctcgaacggcgccaatgtaaagtgaaggagtccaaacttcatcattaccgttaccagtggatcgaaaagcggtcagggaaactgaggctgattgaaatccccaagcctaggataaaagcgatccagcgaaggatcctgagggagattctcaaccgcgtaccaccgcatcccgctgctcatggcttctgcaggggcaggtcctgccgctctttcgttgcttctcacctcggcaagccagtgctgttgaggatggacctgaaggactttttccatagcgtgccaatcgctcgtattggggccctgttccggagggtgggataccctgcccatgtggcctggttgcttcagggattgaccactcactcaacctcccccgctctggctggcgaagctttcgaacgcctgccatggcagcgacgcaagcacctgattgacaaacacctacctcaaggcgcaccctccttcccggcattagccaatttgtgcgcatggcgtttcgattgtagactccaaggagtggccgagcgcttcgggctagactatacgagatatgcagacgatcttgcgtttagcggcgataggaatctcctgcgcctagccccttttctgaagggtcttattggcgccattgccattgaagaaggcttcgagatcaatcacaggaagactagattgaggacccaggcacagtctcaacgcctggcaggaatggttataaaccagcagcccaatctccctcgcgaggagtttgatcgactcaaggcaatcctgtataactgtacccgatggggtcccgaatcacagaaccgggaaggggtagaggattttcgggcgcacctggaaggtcgagtcgcctacgcgttatggctgaatcctgagaaagggcggagactgaaagatttatggagatatatccagtggtctgaatga

SEQ ID NO: 12634 - RNA, 1044 nt, synthetic construct
  source 1..1044: mol_type = other RNA
atgggcagaccgcctgataagctcctgaccttccccctaccaagcttgagtacagtcaaggacctccagcagtggcttgggctgtttgatcacgagcttgcatggtttgccgacagggaaaggcggcagtgcaaagtcaccgaatcgagactgcaccactaccgctatcagtggattgagaaacgaagtggcccacctcgccttatcgaaattccaaagactcgcctcaagatgttgcagcgtcaaatactgagggagatcctgaatcgcgtaccaccgcacccttgcgcaaagggttttgtgcgcgggcgatctattaaacatttcgtcgagccccatctcggtaaggaagtggtgcttagaatggacctgaaggacttcttccatactgttcccgtgtatcggattggcgcaatgtttcataggttagggtatccctggtctgtggcctatctgctccagggcctgtgtacacacacgtcctcagcattgttggccggagacacattcaatgcgttaccctgggctatgcagaagaggctgagggacaaacaccttcctcaaggagcgccaacctcccccacactggccaacctggctgcttttcgcttcgattgtagactgcagggagttgctaaccgattctccttggactacacgcggtacgccgacgatttagcctttagcggggctagggaattgctcagactcgcgccatttctacagggcctgatcggagccatcaccatcgaggagggattcgagatcaaccacagaaaaactcgggtacagacccaagcccagagccagcgactaggcggcatggtgattaaccaacgtcccaaccttccgagagaagagttcgatcggctgaaagcaatcctgcacaattgcgtgcgttgggggcctgagtcacagaatcgcgagggagttgatgactttaaggcccatctcggtgggagggtggcttacgccgtctggctgaatcctgaaaagggcaaaagactgcggcaactctggaaacggatacagtggctggattga

SEQ ID NO: 12635 - RNA, 1302 nt, synthetic construct
  source 1..1302: mol_type = other RNA
atgagaaggctgatgctgagcatccagttcggtcgatgggatcgggagagtctgggggatcggttacgtcgcgcactggacggcggacctcctgatcctgacaggctagccgcgcgccttcttttccagttcccgcccggtcatccaccttcgcggtcacaactcgccggtttgctggccgctgacagagaactggcagctgccagccaatccggaggcaagggcttcgaggcccggattgtgttagacacgtctgtgatgcaggcccccaccgggcacttctcaacccttcccctgcccacactcgatcatgcacgggacttaggcttgtggctcgggctgaaccagcgcgagcttgcttggttcgccgactgcgaatcccggcagaccagcgtgcgcaatcctaaactgcatcactaccgatatagatggctcgcaagacggagcgcaccacccagactcctggagattcccaaggccaggctgaagctgatgcagaggcaggtgcttcaccatctgctcgattgtgtacccccccatccggctgcccacggatttcgtcgacacaggtcttgtctgtcttttgctacaccccatctgcagaagcctgccgttcttcatatggaccttgaggactttttccccagcataccagccccaagagtcggggctttgtttaggcggttgggctatccgccaggggttgcacgcgtgttacaagggttgtgtactcacgccgtggccccagctttggtaggcgcagagttcgacgccctcccttgggagacaagaagacgcctccaagcaccccacctggctcaaggcgctccatcatctccagccatcgctaatctgtgcgcgtggaggctggattgccgactgcagggactggccgatcgcttcgaactcgattacaccaggtatgcagacgacttggctttttccggtcctgctagtctgctgcgcaggggtccatttgtccaggctctaataggcgcgattgcggccgaggaaggatttcgcatcaatcatcggaaaactaggctcaacactcaggcgcagagtcagcggctagctggggttgtggtcaaccagaggccgaacctccaaaggagagactacgatcgacttaaggcgacactacacaattgcgcccggttcgggcctgaaggccagaatcacgaaggacgacaggattttcgtgcccacttagccggacgcatcgcacacgtcgcatggctcaaccctgacagaggcgcacgtctgaaagccctgtgggccagaatctcctggccagattga

SEQ ID NO: 12636 - RNA, 1356 nt, synthetic construct
  source 1..1356: mol_type = other RNA
atgcctacgcaccgcactaaaatcaggcgactcacgcaggccttatccacggggttgtggcagaaagacacaatcgccgatagagccagtagggcgcttcatggggggccacctgatcccaggagattaaccgcgcggctgctgttgcagttcggagatgctcagcatccacctcccgctgaactggaagcatttttaagacacgaccacgaggtggcctccgcattgcgctcgattacagacaataacacccccgccctgttgcttgaccccagcactatgcaaccgcagcggcataggattagtttacctctgcccgtccttgataccgtgcgagacttgcaacagtggctgggtgtgtcagcaggagagctggcgtggttcgctgattgcgacggacgccaggctaaatctactacccagcggctccaccactaccgctacagatgggcagaaaagcgccggggaggttggaggctgatcgagcagccaaagagcaggctgaaggccattcagcgacaggtgctccgcgaaatccttgaccgagttccaccccacccagccgctcatggcttcagaaggggacgcagctgcctgtcttttgttgcaccccactgtggccgtccactgctgctcagattagacctgagggattacttcacacgggtgccggtggcccgaattggtgcaacatttcggcgtctgggctacccagctgccgtagctcatactttgcaggggctgtgcacccacgccatgagtgcgtcactagcagacccacccgcaggggctgttgactggcaacaacggcagtacctccgatcaaaacaccttcctcaaggagctcccacatcacccgccctagcgaatctatgttcttggcatctcgacgccaggctaagtggcttggctcatcggtacggcctggcctatacccgttatgcagacgacctggctttctctggcaccgatgcgctgagacacgacgcaccgtttctccgggatctgatcgctgccattgcactcgaggagggctttcggatcaaccaccgtaagaccagactggtaactgccgcccagagacagcgcctgacaggcatagtcatcaatgcccaccctaatcctcctcgctccgaattcgacaggctccgggctaccctgtttaactgtgtgaggtacggacctcagagccaaaacagagacgctagaaccgatttcgccgcctatctggcagggaagcttgcctatgtcactcaacttaatccaaacaaggccgtcagactccatcgcctctggaggcagatagattggcaggagtatgatggtacttccacaatgcatgatgatggcagctga

SEQ ID NO: 12637 - RNA, 1149 nt, synthetic construct
  source 1..1149: mol_type = other RNA
atggaggccatgctggccggtgatgctgaggtccgagctgccctggatcgatccgatgatcctgacttgcctgcgattctgctggatcccccagttatgcatccccccgcggaccgacgcatttctttaccgcttcccagaatcgagacttggagggatctcaggcagtggctgggcgtcttcgacggcgaactggcctggttcgcagacagagaaggacggcaagcagatgtcgtggagccacgtctgcaccactaccggtacagatggcttgccaaacctgccggagggtggcgtctaatcgagcagccgaagacccggttaaaggctatacagaggcagatcctcaggggagtcctggatcgtgttccccctcatcccgctgctcacggctttaggagagggcacagttgccgatctcacgccgcagtgcatacaggtcgcgccgttgtactccggatggatctgcagcacttttttacctcagtgcccgtggcacgcattggggccatgttccgacggctgggatatccggcaggagtggcacacctgctccagagcttgtgcactcactgtctgtcccctcctttagccgcagctcccgatggagccctcaactgggaacaacggcagagactgcgggccaaacatctcccacaaggtgctccaaccagcccagccctggctaatctttgtgcttggcgtctagactgcagactagacgggcttgccaggagattcgggcttgattatagtagatacgcggacgatctcgcgttttcagggccacatggcctggtggccaacgtggactttattgaaggcatggtgggcgcaatagctttggaagaggggttccgcgtcaatcataggaaaacacacctcgccaccaggtcccagtgtcaaaggctgacaggcatcgtagtgaatgccagacctaacctcgaccggcgggcttttgacaggctgcgagcaacgttgcataactgcgcacggtacggtcctgccggccagaacagagacggcgttgctgacttccgcgcacacttggctggccgcctagcatatgcccgctggctgaatcccgacaaggcgagacgccttgagcgcttgtggaggcagatcgactggccaagcgatggagactga

SEQ ID NO: 12638 - RNA, 1308 nt, synthetic construct
  source 1..1308: mol_type = other RNA
atgcccagaaagttcaaacaggcggagtggctggctagctcggtgtgcacaggtgcctgggagcgtgctgcagtggctgagagattggcccgggctttaccagccgacggtcctgatccggtcgcacttgctgccagtattaggaaccgcttctatgaggacggccctccaaacctgaaagccctcaccctatttctgatcgaccaccctcttcttcagcccgtgttccagaagggggggattcggggactgttgctggacccacctgttatgggacggcggcaggataacctggcccctcttcaactgccagaactaccaaccttaagggacgttggtctttggctttgcctgtccgatgcagaaatatcttggttcgcggatactaggctgcgccagggtcgcgttacggaggaaaagctccatcattacagatatctctggatccccaaacgttctggagggatacggctgatcgaaacgcccaaagtcaggctcaaggagatccagcgcatgatagtatcacggattctgagacacgttccacctcatgattcagcccacggctttactcgcggcagaagcattaaaactttcgcagcgcctcatctcaggcagcaggtggtactccggctggacctcaaggacttcttccactccgtgcccgtagcaaggatcgccgcactgttccgtagattaggctatccacccaatgccgcgagagtgctgcaggggttttgcaccaacagtgtgtctcccagcctggccggcaagccttttactcggctgagctggcacgataggaaacgattgcaaggccgtcatctaccgcagggagctcccacaagtgcacaattggcaaacctgtgtgcttgggggttggactgccgactgaaggggttggccgatcactacggctaccagtatacaaggtacgccgacgacctcgcctttagcggtccatcctctcttgcaggaagagctcgatttatcgaggcccttaccggggctattgcacaggaagaaggcttttcactcaatcacagaaaaaccaggttacgcctggctagtcaacgacagcgactcgcgggggtggtggtcaatgagcgcgtgaattgttcccgcgccgactgggatcggctaaaggctaccctgcataattgtgtgaagcatggcccggagtcccaaaaccacgataagcaccccgatttcaaagctcacctgaagggcagggtcacacatgccgcctggctgaaccctagcagaggaggaaaattgcagttcctctttaatcagatcgtctggtga

SEQ ID NO: 12639 - RNA, 1266 nt, synthetic construct
  source 1..1266: mol_type = other RNA
atgcatgccggagcatgggatagggctgctctggctgagagactagctaaagtgttgcctgccggagcccctgatcctgcacgactcgctgctcgtatttacaggcggtttggggagggtccaccaccaagcgtgacagcgctggcggctttcatgcgggaggaaaagttactggagcctctcttcgaaggaaaagggatccgcggcccatcactggagccttatgcaatgggccgacggcctgaccttctcgctgctgtgccgttacccgacctccctactctcagggatgtcggtaggtggctgggtctgtctgatgaggaggtcagctggtttgcggacgtgaggttccgccaggacaagctgaccgagccaaagctgcatcactaccattactcgtggattccgaagagatccggcggcttgcgcctaatcgagatgcccaagttccgcctcaaagagatccaacgtcgcatagtgcgggagatcctcgggcgaattcccccacacgattgcgcccacggcttcactagaggcagaagcatcagaacctttgctgaaccccataccgggcaatacgccgtgctgaggctggacttgaaagatttcttccacagtgtccccattgccaggattgcagccttattccggtccctggggtatccacccaaaatagcccgagtgctgcagggcttgtgcaccaatgccatctcaccaccgctggctgggaagccctttgaaaagctcccttggcatgaaagaaaagcccttcaggacaaacacttaccccagggagcaccctcttccgcacctctagccaatctgtgtgcatggcgccttgactgtagactggagggattagcaatcaggtacggctatagatatacaagatacgcggacgacctcgcccttagtggtccgagtagcctggcacgcagagccgaattcatagaagccctggtcggcgcgattgcaacggaagaaggattttgccttaattatcggaagacacggttgaggttgtcatctcagcggcagcgactggccggcgttgtagtaaacgaaaaggctaactgcggtcgggctgagtgggatcgtttgaaggccactcttcacaactgtgccaagcacgggccagagggccagaaccgtggaaatcatcctgcctttaagtcccacctggaagggagggttgcccactttgcatggcttaaccccgcccgcggtgagaaactgaaaagcctgctcggacgcatcgtttggtga

SEQ ID NO: 12640 - RNA, 1317 nt, synthetic construct
  source 1..1317: mol_type = other RNA
atgactaactcggtgagggccagaaggttagcactgagtattatagatggcgaatggactcagcctgctgtaaccgaccgcctcaggcgagtactggaactgcacccacaggatattaagcagttggcggctcggttgtgtttcttgtatgagcagccgccagcctctttcaaaagattggctacactcctcctcaacgaaccgctactggagtacttctggcagcatgccgcgcagcaggacattcccggtattctgctcgataccccacagatgcagcccccacccgctaacctgcggtgctttcccctgccccgactggacaccctgaaagacgtcgctctttggttggcagttcagcccagagagctggactggcttgcagacatcaacggtcgccaggcacaagtggtggagccacgtttacatcactatagatatcgctgggtcaacaagcgctccggaggccagaggttaattgagatccctaagtcccagctcaagcgcatacagcggctcatccttcacgacatccttgatcgcatcctccctcacgatgctgcgcatgggttcgtgcgtaatcgctcatgcgcctcctacgtggcagctcatgttgggcaaccggtgattttgcacctggacctgaaggatttctttcattccgtccccattaccaaagttctggcattttttaggaccctgggttaccctgccgcagtagccaggacattaatgggattgtgttctcatggcgtgtcacctagtcttgccggaaaaccatttgcagatcaaagctggcagcggcgtcggcaattacggcaccctcacctgcctcaaggtgccccaacaagcggcgcccttgccaatttcagtgcctataggctggattgcagactcgccggactggctaggagatacgggctgagatactcaagatatgctgacgacctcgtcttttccggacccgagacgctgcgaccacaagcagcctggatagagtctgtgactggcgccatcgcactggaagagggcttctgcctgaaccacagaaagacccgggttcgttctcaaagccagagccagaggatcacaggactagtgatcaatgagaaaatcaatatctcacgaacggactacgatcagctgaaggctacactccacaattgtgtccggcacgggagcgaaagccagaaccgatgtgcccatcctgatttccgcgcccatctagccgggagaattgctcacgtgactcacataaatccccaacggggcaaaaagcttcagcagctatttaatgcggtgcattgggaagactga

SEQ ID NO: 12641 - RNA, 1371 nt, synthetic construct
  source 1..1371: mol_type = other RNA
atgaatacccttaggcgagatatccaaacactcgctgcctctctgctagctggacgctgggccctgccagacttaaccgatagactgcagagggccttacattggccgcaccctcccgcatcactcttagcagctaggctactgcgggatctcggagagcaccacgcccctgaagcgagaaccttggcttcgtggctcctgcaggacgctctcctcctcgcacatttggagagggggagtgatgcccggcctcacatagagtggcttctggatgcccacgtaatggaggcacaaccacccgctatggcagccgacgttccgcagcttcctaccacgggcgatttggctgactggcttagaattagccccggggagttgggatggttcagtgacctatggtgcagtcaggcgagggcctctagagaacccctgaggcactaccgataccagtggcggcacagggaagacagacccagactcatcgaaattcccaaacccagactgaagcggcttcagcggagagtgctgcacgagattttggacccaccccagcctcatccagctgcccatggcttccgagccggtaggtcctgtttgacatatgcgcgcccacatactggacagcctgtggtggcacgcatggacctccgagattttttccagagcgtcccgatccgccgcgttacagcgtttttccggtgtttggggtatcctgcacctgtagctcgggtgctgcgcggtctgtgtacccatggggtgtccagggatgtgctgacaagagccggcctggatctgccctgggagcgaagacagcgactggccagccctcatctgccacaaggcgcaccaacttcccccgcactggcaaatctgtgctgttatcggttagattgccgcctgacgggcctcgctgataagctgggtctaagatacacccggtacgccgacgacttggctttctctggcgcagaatcactccgtcacggctttgagcgttttcacatcctcgtcgccaggatcgctctggaggagggatttgagctgaatacacggaagacaaggttgatgaccgccgcacaacgtcagtcactgaccggcatactggtcaacgcccaccccaacctcccacgtagagaatatgacagccttaaagccattcttcacaactgcatacgcactggaccggcagctcagaatcgcgctgggctgcctgacttccggggacatcttcgaggcaggatcgcttacctggcccaaatcaacccagacagaggggcccgtctgcttcggttatgggaggccattgaatggccagacaggagggctactgactccgccgatgcggaaactgcgggtagacgcgcccgctga

SEQ ID NO: 12642 - RNA, 1344 nt, synthetic construct
  source 1..1344: mol_type = other RNA
atgtcccgcctgcggcgggatctccgaactctttctgccagccttctggccggaagatgggccaggcctgacctgagtgaccggattcagagagcgctggaatggactcacgctccggccagccaactggcagcaaggctcacccgcgacctcggagatcaccatccaccacaggcccagcggttggaggattggcttaggcaggattccacacttgtggcgcggttagagcggggcagcgaccatcatccgcaggttcgctggctgctggacgctcctgtcatggaggcacagccagcagctctagctgcccgggtgcctcagcttcccaccatcggagacttggctgcctggctcagactatcgcccggggaactagaatggttatccgaccgatggtgtcagcagtctagagagacaagggaacccctgaggcactatcggtatcaatggcgaccacgagccggacgtgcgccaagattaattgaaatgcctaaaccgcgcttgaagcgcatacagcggcggattctcagacacatcctcgacccactgcaaccccatccggcagctgagggcttccgcagagggagatcatgccttacacacgctgaggctcacacagggcaggccgtggttgtgagaatggacctcgaggatttctttcagagcgtcccagtcagacgtgtgaccgctctcttccgatgtctggggtatcccgctcctgttgcccgggtactgcgtggattgtgtactcactgcgtcagcggtgacgcatggacccgcagtggcttggatatcccatgggagaggagacagcgtctgtccagtccccatctcccacaaggtgcacccacgtcacccgcactggccaatctctgttgctaccgtctggattgccggctgacaggtctggcagctaggctcgggttaagatacacctcttacgccgacgatctggcatttagcggcgccgagacactgcgacacggctttcaaaggttccatgtattggtggccaggatagctctggaagagggctttgccctgaacactcgcaagacgcgcctcatgacttcagcgcaacgacagatcttgaccggcattcttgtgaacgccaggcctaatctgcccaggcctgaatatgatctgcttaaagccaccctccacaattgcatcagatacggacctaaggagcagaaccgcgagggccttcctgacttcaggggtcatctactggggcgcatcgcgcacctgtctcaggtgaatcccgaacggggcgccaggttaagaaggttgtgggaggagattgattggagtaacgaagcttccgaagatcgcctgtga

SEQ ID NO: 12643 - RNA, 1311 nt, synthetic construct
  source 1..1311: mol_type = other RNA
atgagccagctgacccgaaatgccaggttggttgccctttgcattgtcgacactgcctggaacttgcccgcactgacagaacgcctgactattgtcctagctggaggccctcctgatccacagcgattggtggccaggctgctcttccattgcgaagccggccgaagccccagttttcagagaatcgtggacgtgctcgaggctgatgttgacttcgtaagacaccatgctgacgcagcttaccacttgcagcctggggctgcaacaatgcaaccgttgcccgattcacttgtgaccttcccattacctactattcccacactgaggcatctggccacttggctgggactctcagacagagagctcgcctggttttgcgggggccacagacgttatacgactgatcctaaccctgtatttcaccattatagatatcactggcaggatcggtgctccgggattccacgcctcatcgagcaaccgaaacccaagctcaaagccctgcagcgcgaagtgctgcggaatattctggatagggttcctccccatgacgcagcccacggctttcggcgtcataggtcgtgcctgaccggtgctacaccccatacgggccaagcgacccttctgcgcatggatctgcaggactttttcaccagcataaatcgcgcccgcgtggctggagtattcaggatcctcggctacccagcggctgttgcaactgcactggccggcctctgtaccaacagatctgtgctgaaactttctgacaacccaatcgctaatatcccctggcagaccaggaaaaagctagaggcctggcacctgccacaaggagccccaacatccccggcgttagccaacctgtgtgcctggaggttggactctcggcttacaggtttagccgcgcactgggatgctaacttcacaagatatgcggacgatctggcattatcagggggacggcagctacggaagcacaaatcccacaaggaagccctgatcgcagcaattgtgctcgaagaaggctttcgcataaaccatcggaaaaccagatggagcacgtccgcccaacgtcagcgctactgtggggtcgtggtgaaccgacatgctaacgtcgagcgggcagagtacgatcgattgaaggctatcctgaataactgtgtgcggcacgggcctgtcgagcagaatagagccgagcaccctgacttccgcaggcacctgcagggaagaatcagtcatgtcgctcagcttaatccagcacgtggtaataagctcagtaagcttttcgacaggatacactggccccagtga

SEQ ID NO: 12644 - RNA, 1557 nt, synthetic construct
  source 1..1557: mol_type = other RNA
atgagtgcacccatccgcgcattagcccgggcactggctctagcgcttcttgccgacgctgattctccggagagaagatcgcttcgtgctctagctgccagagcgggtcattgcttaggccacgccgccccagaacctgggaatccacctttgcctgaggtgctctttgagcagctgagacgactgtctactgtctcaaccgcagagtgggttcgcctcgagcctgaagacctcgccacctggctctgtcgtggcttctggtggcgaaaggcgggagtccggaatggtacggcgccatggccgcttcaagacgacggagagctgatcaccgaagatgacgacggtgacggggatgatcccagcgccactccctggcatcttcggacggatgcgcagctcgcgcaaagcttccggacatgggcagcatcacccaggactaggggaccactgcactggctgcttagaccgggaacagcaggtccagcacctgcctggatgggacgggcacctcagtgctccgcacctgtgctggctactgctcaggacctggtgcagctcctgggggtgcctctcgaggatttactgtggctggccccagaccacgcacactggagagaaccacaaggcggctgtgccttgccggcctctcactaccggtatcggctgctgcctaaaccaagcggaggactgagactgctagaagcccccaggcccagactagccacagcccaaaggcgcatactggataggctcctggcagacatcccggtacatgaagctgcccatgggtttgtccggggcaggagtgtgggatcccacgctcaggcccacacaaggcaagccgtggttgtccgctttgatctggctgatttcttcacacacataaacgctaccagggttcgtaccttatggagggctcttggccatggaaggcctgccgctgagttgctgaccagactcacaaccactagaactcctgccccagttcgagagcggttgtgggaaggctctgcacccacctcagcccagacaattgtccagaggcgcacaactcatgcccgattggcgcagttgcacctaccacagggcgctcccaccagtcctgcccttgctaacctttgcgctttcgggctggacctcagactccacgccttggcacagcgctttggtgccaggtacacaagatatgccgatgatctggtgttttccggcccccagaacctgcaaggccagtttggggctctccgcgcatgggtgggagctatcgcccaagacgaaggcttcgcgctgcgaggtgacaaaacccggctgatgcccgcccatagacgacaaagcgtgacgggcctggtggtgaaccagcgtcccaattactcccgggagcagtttgacattctcaaagcccgcctgcatcgtttagcccgcttgcccggcgtagacgtagcagagcgagctcggttggagggggaaatccactgggctgggcagtggctggcaccaaccaggaaggagaagctgcagcgcctcttcggggctattcgcttcactgatgccccctga

SEQ ID NO: 12645 - RNA, 1599 nt, synthetic construct
  source 1..1599: mol_type = other RNA
atgacgttgtccgcacccattcgcgctctggcaagagcattagcactggctctgctagctgatgctgattccccagaccggcgatcacttcgggcactcgtagcaagagctggccattgtctcgggcatgccgccccagaaccaggaccttccccactgccggaagtgctactggaacagctcagacgcctgagtacagtcagtgcggctgaatgggccaggttagaacccgaggatcttgctaattggttgtgccgaggtttctggtggagaaaagccggagtgcgcaatggcactgcgccatggcagcttcaggacggaggcgacctggtcactgagggcgacgatatcggattttgggaccctgaggataatgatggcgacgcacccagtgccaccccttggcatctgcgaaccgatgcccaattagctcagagcttccgaacttgggctgcatctccacgcactggcaggcctcttcactggctgctgaggcctggaacagcgggtcctcctccagcatggatgggctctgctccccagtgttctgtgccgatgctcgcgacagcgcaggacctgttccagctgctgggtgtccctttggaggatctgctgtggttagcgcccgatcacggccactggagggaacctcaaggcgggtatgctctccccgccagccactatcgctatagattgttgccaaaaacctcaggtgggcttcggctgctagaggccccaagacccaggctcgctaccgcacagaggcgaattctggaccgtctgctggcgggcatccctgttcatgaggccgcccatgggttcgttagggggaggagcgtcgggtcacacgtgcaagtgcacacacgtcaggctgtagtggtgaggtttgacctcgccgacttttttacccacataaacgccacccgcgttagagcactctggcgagccttgggtcatggacgtcctgccgccgagctgctgactaggctgaccacaacacgcactccggctcccgttcgggagagactctgggaggataacgctccgacgtccgctcagaccatagcacagcggcggtcgacacacgcgagactcgcacagctacacctccctcagggagccccaacttctcccgctctcgcaaacctgtgcgccttcggactggatctccgccttcatgccctggcccagcggtttggggctcgttacacccgctacgccgacgacttggtgttttccggtccccaggacttgcaagggcagttcggggcattgagggcctgggtgggtgccatcgtgcaggatgaagggttcgccctgcgcggcgataaaacaaggcttatgcccgctcaccaaagacagagcgtgaccggactagtcgtaaatcaacgacccaactacagccgcgagcagttcgacatcctgaaggcccgtctccatcggctggcacggttaccaggagttgatgtcggcgagagggcccggcttgagggagaaatccactgggcaggccaatggcttgcccccacgagacgggaaaagctcttacggctgttcggcgccattagatttaccgacgccgcccaggacaaggggtga

SEQ ID NO: 12646 - RNA, 1590 nt, synthetic construct
  source 1..1590: mol_type = other RNA
atgaccaagactcccgcaaggactcgtgcactggccaaggccctggctatggccgtgcttgcagacgctcgggagccagaacgacggactctgcaggccttagccgctagagccggagcttgcctggggaacaacaccactctggccgactcccctgtccctttgcctcctccactcctagagcagctgaggcgcttatcacatgcctcaggcgctgaatgggcccgactggagcctgaagacgtagcaacatggctgtgctggggcgtgtggtggagaaaagctggcttaaggaatggtagcaccctccaaagcctcaccacaacctttagtcagcaggaagagaaggatcaggacgcctgggacgagctagtcggcgacgacgatgagaatgccgagccagcgttacccctccaccagtggccagatccccagcttgctcgtgccttccggacatgggccgcaagccctagaacaggagagcccttgcactggctactgcgatctgctacagcaggggctcatcctgcttggatgggtcgggaaaggactacacctgtgctgctgaccgcaacagatgtgactgaaaccctggcaatcagcctggatgatctgctgtggctcgcccccgagcatgctcattggagggaaaggcaagacggcggtcacgctttgcccctttctcactaccgctatcggctgcttccgaagccatccggaggcctgaggttgctcgaggctccaaggccccggcttgcttccacccagaggagaatcctggattctctgctggcaggggttccggttcacgaagccgcccatgggttcgtgcggggtcatggagttgggacgcacgcccaggtacacactcagcaggccgtagtcattcgttttgatctcgcagattttttcatgtgtattacagcgacccgggtgagagccttgtggagggcattgggtcatgggaggccagcggcagaactcctgacaagattgaccaccacacgcacgccccaagccattagagagcgtctacttgaagcagcccctctcccccgcgaggcaatagctcaccggagagccatcaacactagactgaaacagccacacttaccccaaggcgcccccacgtctcctgccttagccaatctttgtgcgttcggcttggatctgcgactcaatgctctggctgagagattcggagctcggtatacccgctacgcggacgacctggtcttttcaggctcgaaggccctccatcagcaatgggtggacctccgtgcgtgggtgactgcaatcgctcaagacgaaggcttcaccttgcgcgccgataaaacgcgggttatgccggcacaccagcggcagtatgtcacgggactcgtggtgaacgagcgagcgaactacagtcgcacacaatttgatattcttaaggcgaggcttcacagactggggcaacagccgcaggtggacatatccgaaagagcccgcctcactggagagatccagtgggccagtcagtggctggcaccaacccgacgcgccaaactacagcgcttgctgcacgctatcagatttagcaatgagctgtga

SEQ ID NO: 12647 - RNA, 1590 nt, synthetic construct
  source 1..1590: mol_type = other RNA
atgaagaagatttccgcacgcacccgggccttagccaaagcacttgccatggcggtactggctgatgcacgggagcctgagagacacacattacaggccctcagtgctcgcgcaggtgcttgtctgggaggaaggactacacctgccgactcccccgatccattgcctgaacctctgtctgaacagctccgcaggctcagcaatatgagcgatccagagtgggcccgcctggaacctgaggacgttgccacatggctctgttgggggatatggtggagaaaagctggtgtgaggaacggctctgccctgcaggccctaactgcaaaccgggggcaagacgccgaagagcaggatgcctgggaccacctggccgatgagggcgatgaggatgccgaaccggcccttcccgttcaccagtggcctgatccccaactggcccgtgcctttagaacttgggccgccaatgtcagggcgggagaaaccctccactggctgttgcgtccagctgcagctggtccacaacccgcttggatgggcagggactccactacccccgttctgctcaccgccacggatgtgacagaggccttagctatctcattggacgacctactgtggctcgcccctgagcatgcccattggagggaaaggcagaacggcggccatgctctgccgctgagccactatcgctacagactgttacccaaaccatcaggggggctacgtctgttggaggctccaagaccctgcctcgctagtacgcagcgacgcattcttgacagtttgctggcaggcgtgccggtacacgaagctgcgcatggcttcgtgcgtggacggtcggtaggaagccacgcccaggttcatacccaccaagccgtcgtgattaggtttgatctggctgacttcttcaccagcatcacggctaccagagtccgggcactctggcgagctctcggtcatggccatcctgcagcagaactacttacacgactcacgactacccggaccccacaggcagtgctcgatcgacttctggaggcaacatccattccaccagaagcaatcgcacagagacacacaattggtgcgcggcctaagcaaccacacttgccccagggagcacctacatcacccgctctagccaatctctgcgccttcgggctggaccttagactgcacgccttggctgagcattttggggcccggtatactaggtatgctgacgacttggtgttcagcggcccgaaagcccttcttcaccgccagtgggtggattttcgggcctgggtcaccgcgatagcacaggacgaagggtttactttaagagctgacaagacccgagtgatgcccgcgcatcagcgccaatacgtgaccggcctggtcgtcaaccagagaacaaattactctcggacacagtttgacactctgaaggctcgactgcatcggctggcccagcaacctcccgtgaacatctcagagagggcacgcctggctggagagatccagtgggcctcccagtggctggctccaactcgcagtgcgaagctgcagagacttccccacgcaatcaggttctctaatgaggcgtga

SEQ ID NO: 12648 - RNA, 1521 nt, synthetic construct
  source 1..1521: mol_type = other RNA
atggccgttctgacagacgcacagggcggtccagagagacggactccacatgctctcgctgctcgtgccatggcatgcttaggcactcccgctgcccaggatgccattttacccgacagtctcacagagcagatcaggcggctatctctcgtgtcagcccttgaatgggctcgccttgagctggacgatgtggctacatggctgtgctggggcagatggtggaggaaagccggcgtgcgcaatcctcacgccgttcacagcgagcccgagatagacgatgacgccactttcctgtttgacatgagcgaggatgaagaggcgcacgagcaggggtccgcagatgtacccctggccctttgggccccacaagatctggctagggccttccgggaatgggcagcatcccctagatccggagcgcacctgcgatggctcttgcgaccggcaacaactggtccccagcctgcatggatggatcatgcccctgggtttgctctactggctacggccgctgacgtcacccaggcattaacactgtcgcgcgaggatctgcagtggcttgctcctgagcacgcccactggagagagcatcacaattcagggctggcactaccgccctcacactaccggtatagacttctcgctaagcccagtggagggctgcggctgttggaagctccaaggccacggttggcccaagcccaacgacgaatactggacaagcttctggcctccgtgccagttcacgaagcagctcacggctttgttaggggccgtggtgtgggtagccatgctgtggcccatgcccatcaggccgtggtcatcaggttcgacctggctgacttctttacgtctattaatgcgactcgtgtgcaggccctctggaaagcactcggacatggacgatctgctgcccagcttttgacccgtctcacgactgccaggaccccttccgctgtcagggaacggcttctcgaggcactgggaagtagctcagcccacttagcgcagcgcagagcgctcaatcagcggctcagccgcgcacatttgccacagggcgcacccacctctcctgccttggcaaacttgtgtgctttccgcctggatgtcagactgcaagcattggcccagaggttcggggctaactacacaagatatgcggacgatatggtattcagcggaccccgggcccttagaggccagtttgctgcactgcagtcatgggtgtctgccatcgcgcaagacgagggattcaccctgagagccgataagacacgcgtcatgccagcccatcagcggcagtacgtaaccgggttagtggtgaacgaacgggtgaactattcccgcgcccaatttgataaactgaaagcccagctacaccgcctctctcaacagccgcgagttgcagccagcgaaagaagtagggtcgctggcgaaattcagtgggcgagtcaatggctggcgaccaccagggctgcaaagctgaagcgcctgttcgacaccatcaggttttccccttga

SEQ ID NO: 12649 - RNA, 1605 nt, synthetic construct
  source 1..1605: mol_type = other RNA
atgaaaacacccgtgaggtctagagtgctcgccaaggctatctctatggccgtgctcgctgatgcgcagacaccagagcaccgcaccccacaggcactggttgctcgcgtccaagccagcctgggcctagaaccagctgccggttctccactgcccgctttcctcttggagcaactccagcgcttaagtgcaatgtcaagtccagagtgggctagatgggagccggaggatgtcgccgcatggctctgctgggggagatggtggaggtctgctggccttcgttggggcaccgaacacagcggtgccggtgtagaggacggagccagtgcatgggacggggacgatgaagacatcgccgagcccgatggcgatggagaaggcgatgatatcttaccaggccttcctccgactgactggactgcaccacgcctagggcaggcctttcggatttggacagctaccgccagaagcgctgtcccccgaagatggttactacgacctgcaggggcaggacctcttccggcatggatggaccgcgggaccacagtgcccgtattggccactgcgaccgacgtcgcgcaggttttggctgtaagtgtcgaggatctcctgtggctggccccccaaggagcattttggcgggaaagacatagcgaggggcactctcttcccgcttcccactacaggtacagactgctgccaaaacccagcgggggattgcgcctgctggaatcccctagaccgcgactcgtgcatgcccaaaggcggatcctctatacactgctggctaacatacccacacacgaggccgcccacggtttcgttcgtggacggtccgttggctcgcatgcacggattcacactggccaggctgtcgtgattaggttcgaccttgccgacttcttcacgcagatacacgcaacccgagtgcgtgctttgtggcgcgccttaggacatggaagggctgcggccgagctgctgacccaactcactacggctcggactccagctggagtcagggaccgccttctcgaatcaatgcctgagctgcccacaagcattgcacagcggcgtgctaccgcccagagacttgcacggccacacttacctcaaggtgcacctacctcccctgccctcgcgaatctgtgtgctttcggcctggatgtacggttgcaggcactggcgcagaggtttggggccaactatacaaggtacgcggatgatctggttttctcaggccctgacatgctgcgacggcagtttatcgcgctgagagcctgggtggcagccattgcccaggacgaggggtttgcactaagggctgacaagacccgtgtgatgcctgcccatcagagacagtttgtgacgggactcgtggtgaatcagcgggccaactattcacgcgtgcagttcgacactttgaaggctcgcctgcatcggttggcccaacaggctcaggtggatgccggcgaacgagcgaggctggaaggcgaaatcagatgggcctcccagtggcttgcacccgcaaggaccgccaaactgcaacgcctcctggccgctatcaggtttgggagcatggactccggtctggccgccaagggctga

SEQ ID NO: 12650 - RNA, 1602 nt, synthetic construct
  source 1..1602: mol_type = other RNA
atgaaaacacctgtacgatcccgggtgctggccaaagccatcgctatggcagtcctggccgatgctcagacacctggtcaccgcaccccacaagccctcgttgctcgggtgcaggcatgtctggggcttgaagccacagctgggcccacacttccggcgtgtgtgcttgagcagttgcggcggcttagcgccatgccctcccttgaatggagccgttgggagcctgaggatgtggctacctggctgtgctggggccattggtggagatccgctgggctcaggcaagggggcttaccatgggcagcaggccatggtgacgccccaacttgggagggcgacggagatgactttgccgagccggaaggcgaaggcgatggaggaggcaccttgccgggtctgccacctacagactggaccgctccccgcttagctcaagcgttccgaatctgggcggcaaccgccaggactgcagtacctcgcagatggctgctcaggcccgctgaagctggaccacctccagcatggatggagcgctcaacggctccccctctcttggctaccgctgcagacgtggcccagatgttagcagtcagtctggatgacctgtcatggctcgcctctcagggggctttctggcgagaaaggcacgccaccggccatgcactgccaccatcccattatcgttacaggctgctgcccaagccgagtggcggtcttcgcctgctagagagccctcggcctaggttgatgcacgcccagcgcagaatactggacacattgctggcagccattcccctgcatgaagcggctcacgggtttgtacgtggtagatctgtgggatctcacgcccaagttcacaccggccaggccgtcgtgatcaggttcgatctggccgatttctttacccagattcacgcgactagagtccgcgccctgtggagagcactaggacatggacgagccgccgccgagctactaacacggctgagcacgactccaactccagcaggcgttcgcgagagactccttgagtgcatgcctgaagtgcccgcctttgtcgcccaacggagggcaatggcccagcgtctggcacgacctcacttaccccagggagcccctacttcaccagcgcttgcaaatctctgcgccttcgggctggacgtgagactacaggcgctggcacagcgctttggcgccaactatacaagatacgccgacgacctcgtgttttcgggacccgaaaccttgcgccggcagttcatagcgttgcgtgcttgggtggctgcgatcgcgcaagacgaggggtttgctctgcgggccgataagactcgggtcatgcccgctcaccaaagacagacggtgaccggcctggttgtcaatcagcgggctaactactctaggactcagttcgatacactcaaggctagattacatcggctggcacagcaggcctgggtggaagcaggggatagggcacagctcgagggagagatcaggtgggccagtcagtggttggctcccgctcgagctgccagactccaaaggctcttcgacgccattcgcttcgctcccgttgatggtgaggccgccgctaaagactga

SEQ ID NO: 12651 - RNA, 1575 nt, synthetic construct
  source 1..1575: mol_type = other RNA
atgcatgtacatgtgcatgcacgcgttctggccaaagccatcgctttggcagtgcttgctgacgcccaggcccctcaaaggcgcactgtcgaagcgctgagggcaagggttcaggcatgtctgggacacgcccccggggaagaacaaaggccccttccggcacccctgcaggaacaactccgacggctcgccactctccctacaagggagtgggcgcggttaggagccgaggatatcgggacctggctccgggagggattttggagacgcatggccggtgtgcggacaggagctccatcagccagaggcgccagagttcccgatgattcctttgacgaggaggacaacgacaccgacgatgacggtatgcccgcagctccaccgtctcagtggactgctagagccttggccgaggccttcagacagtgggcctcccacgtgactcccaagaggtggttgctgcgaagcgcaacaacgggacccttgcctgcttggcgtgattctgatggagctagagccggcccattgttagccacagctgctgacctggcaggcgccttagcagtgagtctggaagacctgctctggctggcgcccgaacacgttcactggagggagaggcagccagacggcggtcatgctatggcccctagtcactaccgttaccggctcctgccaaagccttcaggtgggctcagactgctggaggctccgcgacctcgacttgcccaagctcaacggcgaattctggatctgctgcttgccccaatacccgtccacgaggcagcacatgggttcgttcgcggctgtggcgttggatcccacgctcaagtgcatgccggccaagccgtggtgatccgctttgacctggctgattttttcacccacattcacgcgaccagagtaagggccctgtggcaggccttagggcatggtcacgccgctagcgacctcctcactcgcctgaccactgcccggactcctgctgcagtgcgagaacggctgagggatgcctgcacaccactcggccatcctagctccgagcattggcatgcgaccggaagacacctcgctagcgcccatctgcctcaaggcgcacccacatcgccagcactggcgaacttatgcgctttcggcctagatcttcggcttgaagctctagcccgccggttcggcgcaagatatacgcgctacgctgacgaccttgtcttttcagggcctcagacccttttgcacgccttcgtacggttgagggcgtgggtgagtgcaattgcacaggacgagggttttgcactgcgggctagtaaaacccgtgtgatgcccgcgcaccagaggcagtatgtcaccgggctagtcgtgaatcaccgcgtcaattggtccagagcccagtttgatacattgaaggctagactgcacaggctggcccgacaagcctgcgtggatccaggcgaacgtgcacgcctggctggagagatccaatgggcgaggcaatggcttgccccgacgcgttctgctaaactacagcgcctcttcgaggcaatacggttcgccgattctgggagcagagacgggtga

SEQ ID NO: 12652 - RNA, 1584 nt, synthetic construct
  source 1..1584: mol_type = other RNA
atggccaccccatctcgcatactgagtaaagccgtcgcaatggccctgctggctgatgcacagacaggtgcagctgccaggcggccatcagcactggcagctcgtgccagccactgtctcgcgtcaaatgccggcgctccctcaggagcacagcctcttccagcaaccttcctggagcagttaaggcggctcagccagttgcctgcccgcgaatggcagaggctggaggtggaggacttagccacgtggctacggcatggacggtggtggagacaggcaggactcgtggccagtagtgggcctggcgaagaactggacgagcctgtgggcgattttgcagatgaggatctcttctttgatgacgacgatgagtctattccagatccccccgccccagcactacagagtaatgctcaactcgctcaggcttttagggtgtgggccgctcaacccagcgtacaggtgcgcagatggctccttcgtccagctcagcctggaccccaaccgccttggttggacgagcgtacacacggtagccgagctgctccaaggtgggcgacagcgaccggacttgcacaggccttgaatttggagttggacgaactcctttggctggctccggctcatgctcactggcgagaacgggccggcttagccatgccaccaagccattaccgacatcggctgctgcctaagagatcaggagggctccgcctattggaagcccccctccctaggctggctcaggtgcaacggtccctgctcgatcaggccctgaaccccatccccactcacgaagccgcccatggttttgtgcgcgggaggggtgttgcttcccacgtagctatgcatgctgggcaagccgttgttgcaagattcgacctgcgcgacttctttactcaggttcacactacaagggtgcgtgccttatggcgtgctctggggcactccagagccatggccgagttactgaccggcctaaccacgacaagaaccccgtctgcggtccgagagagactgctggatgccgttcccacggtcccctctgctgcagtagccggtgcgttggcacagagacgggccagagctcaggcccttgcaaggggacatctgccacagggcgcacctactagcccagctatcgccaacctgtgcgccttcggactggatgtgcgcttggcggcccttgcccaacgctttggagcgaggtactcccggtatgcagacgatctggtgatttcgggcaacgaggaccttcggcgccaatggcccaatctccgagcgtgggtgtctgcaattgtcagggacgagggcttcgccctgaacgccgataaaacccgcctgatgacagcctcccagcgacagcacgtcaccgggttggtgctgaatactcggcctaacctgcccagggcccagttcgacgtgctgaaggcgcagcttcacagattggctaagcaggcaggggtcccgctccaagaaagacctaggctgcttggccagctacagtgggcacggcagtggctggttcccactagagccgccaaactccaagcgctcttcgacgctatccgctttgcagactga

SEQ ID NO: 12653 - RNA, 1533 nt, synthetic construct
  source 1..1533: mol_type = other RNA
atgaaggcagctaatcacgtgcgacacgccgctttagccgttgcccatgcatggctggccgacagtgacgctgaaggaggaagactgggccacgcactgatggctagagcccagagctctctcggtcttgctccccaggaccaaccagattggctgcgcgcttggagtctccggctgcagaacctgcccgacccaatgtgggccagacttgatgtgtggagactggccagcaccctatgcggcgaaactagcttgggcgcggcctgttaccctgagcgcaggatggccggccttaccgacgagaatgccacactgcctgacccagcagcttcctggaactggggcgaagagggcgaggaagacgtcgtggattggttggacgacgagcatcctgcccgagccgagactgactttgagatctgggtcgaaaggagtcacaggcgggtgcgtcgctggcttttgcgaccagcgcgaatgcaagtggctaccatggccctccacgatctggagctgcccacctggccggattctgcgctactggctgaagccctggctatctcggtcgacgatctagcgtggctagctcgcccggcatggcaattagccccccgtgaccagcctcacaaggccctttctgcctcacattatcgccatcggctcataccaaaggcccgtggggggctgagattactcgaggtcccgaaacagaggctcgcagctgcacagcagcaaattagagtccagctgctggagcgcattcccgtgcatgaggctgcacacggttttgcccgtggcaggagcgtactcacacacgcagccacccatgcaggacagcctttcgtttgcgccttcgatctgcaagacttttttcactccattactgcggcacaaataagggccctttggagaactttggggtatcccgcagggatcgctaccgaactgaccgcactcactaccactgtgacacccgcccccgttcgcgagagactcttggaagacgcctcagttacgcggacgcaggctagacggttggccttacctcatctggctcagggcgcttcatcatcccctgccctcgccaacctgtgtgcattccagttggacctgaggttgagcgctcttgccgagagattcggcgctcggtattctcggtacgcggatgatctggtattctccggacccgcatcccttcagaggcacttcgccgccctacacggatgggtgcgagggatcgcggaagatgaaggatttgcgctgcaccctgagaaaacacggcgcatgccacgacatgccaggcagaggatcacaggtgtcgtggtaaacgaccagccaaatctggctaggcacgattacgatctgctccgggctgaacttcatcagctgagcctccagaaggaggctgtgtccgatgaggtgctggcaagtttacgcggtcgggttgcgtgggcctgccagttagtgacgccagcaagacaggaaaagctcaaagcactgttgattcggtgttctgcagggagccaaacaccttga

SEQ ID NO: 12654 - RNA, 1536 nt, synthetic construct
  source 1..1536: mol_type = other RNA
atggctctggcagtagcccacgcatggcttgctgactccgacgcagacgggggacgacatcagcggagccttatcgctcgagctcagaattgtctagggctcgccagtagtgatcaacctgattggttggtgacctggtctttgaggctccaccacatgcccgacccaatgtgggccaggttggatgtccagcgcctcgcttcagccctcgtggagcaacagtctctcggcgccgcttgctatccccaatggagggtaataacacaggccgccgccgaaaagggaattcctgacgacgaagagcctgacccacacggactgggcattggctgggccgaaggttacggcgaggaggatgacgacacagagagtactaacgcagcccctaattttagtcagtgggttcagcaggagcgaccagcggttcggcgttggttgcttagacctgctcgcatgcagatcgccgccatggcactccatgatctgggtctgcccaactgggctgatagccagcaactggcacaagccctaggcattggagtttcagacttggactggctggcaaggccagcctggcagtttgcgcctcgtgaccagcacggtaaaagcctcgctgcatcccattatcggcacaggctcaccccgaaggctagaggtggattacgtcttctggaggtgcccaaacagcagctggccgctgtgcagaagaagattcacgtgcagctgctgtctaggatccccgtccatgaggccgctcatggcttcgtcacgggaagaagcgtgctgacccatgccgcacttcatgctggccagcccgtggtgtgcaccttcgatctgagggattttttccatagtataactgcagctcaaatccgcgccctttggcgctctctgggttacccagctgggatcgcggcacagctgacagccctgacgactaccgttactcccgcaggggtccgggaaagactgctggaggatgcctccgcgacaaggtcccagatcaaaaggctggcgacaccccatctgactcaaggagccgcctcttctcccgctctggcaaatctgtgtgcattccacttggacatgcggttatcggctttggccgagcggtttgacgcccggtacagcagatatgcggacgatttggtgttctccgggcccgatagcctcagaagacactttgcgtcactcagaggctgggttcgcgggattgcccaggacgaaggctttgctctacacccagataagacccgacgtatgcctgaccacacccggcaaagaattaccggcgtcgtggtcaacgaaaagccaaacctttcaagggccgactatgatctcctacgggctcagctgtaccgactggccgcacagcaggatcctgcgtcagatgaattattagcaactcttcgcgggagagtagcatgggcctgccagttagtgtccccaagccgccaggaaaaactgaaaacactgctctcccgcatacctcgcgacgatgccccgcacaaaatggtgaagccgatcttccaatga

SEQ ID NO: 12655 - RNA, 1332 nt, synthetic construct
  source 1..1332: mol_type = other RNA
atgaatgataggcactggatcgcacggggaattgctcgcgccctccttgctcgattcagggagaacggcgacttctctgctgaggggctgcttgcgcaggcgagcatggcactcaacggtaaccctccctggctcaaacgccttattcgcccattggccaagctgtccctacccacatggcagaattttacggtggataccctcagcgaaaggttaatgaaagacgcccgcttcgacgaggcttttaggcaggtcgaaagccccaggatccggcagctttttatgcatcgtgctacaatggggctgcggccctttgcactgcaggattgtgagttaccagccattaccgacgacgtcatgctggccgagttcttaaaggtgtcaaccgaacagctgcattggctcgcccccgaattgccgctcgaacgtctgcctggtgctggccactacagatatcgcttaatacctaaggctagcggaggcctgcggttattggagatgccaaaagcgagaatgaaggccgcccaacgacagctgctcgataagctgttgaatcgcatcccactgcacgaagctgcccacggtttctgcgcaggtcggtcggtgatctcccatgctctgatgcattccggccaagatgtggtgatcagatttgacctgaaagactttttcacgagtatcaccgccgcgcgcgtccatgccattttcaggactcttgggtaccccgagggcgttagcaaggccctgactacaatctgcacaaacagaacttcacggatgattgtcgaaaggttgcttgatgagcggggggttcatgccggcgcagcacaaaggctgaggattccgcatctggcccagggagcaccatcatctccaactctggctaacctagcagcattttccctggatttgcgtctaagtggcctagcggacaagtttggggctcgatatagcagatatgctgacgatctggttttttcaggagagaaacacctgagagctgatttcagagtctttgccgtatgggtgaaagccatcatcgaatccgagggcttcatactccaccctgacaagacccgatgtatgcctgcccaccagcaacaacgcatcaccggagtggtggtaaatactaagaccaacctctctcgtgaggagttcgaccacctgaaagcacggctccaccagtgcgtggtgaatggagttgccagtcagaattctatggggcaccctgacttcaaagcataccttcagggccgaatagcatgggccagacaactgaacgccagtaaggctcagcggctccagagattgttcgatcagattacatggtga

SEQ ID NO: 12656 - RNA, 1413 nt, synthetic construct
  source 1..1413: mol_type = other RNA
atgccaccagctcatcacaggcggtggctcgcgacagggttggctcatgccttcttagccgaccacgaacaacccggagcacggacaccagaagcactcctggccagggctaaggtgtgcttggggtgtgagggagcagcccctggatggctagcctctctggctcaagctgttgccatccggtgggcccgacagggtctgatcgacactgtcgattcgttggcccagatgctcttgcagcgtcccgagtgggccctggacaaacaggcgttcgacgagggggacgaggagccaagtgacgattcagcaaaccgtccggagccggtacctgtcggacagtgggctgtgagacactggctgttgcggcctgccagaatggctgcaccaccatgggggctacagcacatcgatacccccgatttgccaaccgctgctgactgggtgcaatggcttggcattgaacccgacagacttctgtggctgacccacccttcacagcactggagagaaggcagcgaacgaccccacgccacagtagcccaccattatcaccacagactgctcccaaaacggtccggcggccttcgcctgattgaggcacctaaaagcgagcttaagcaggtgcagcgccttctgttagataggctcctcgcccagctgcctacccatgaagctgcacacggattcgtccgcgggcgtggagttcacacacacgcgcaagtgcatgccgcccagccctgtgttatctcttttgatctgcgcgattttttcccgtccatcggtgctgccaggattcgggccttctggaggtcctggggatatcccgaagccgcggcaaggatgctcactcagctctgtacgactcgaacgcccgtcgcagtaagagagcgactgcgcgaggcacaggcactggatttcaacgctgcgaagcggctggccacccctcatctgcctcaaggcgcacccaccagtccagctctcgctaatctgtgcgcatttgggttagatctcagactggagggtctggcccatcgctttggcgctaggtactcacgatacgctgacgacctcgtttttagtggtcccgcacccttagcccagcgctttcgtcagcttcatgcctgggtcggcgccatagccgcagacgaaggcttcgcacttcatcctgggaagttgaggagggccttaagccaccagcagcagagaatcactggcctggtggtgaacgctcagccgaatattgctcgggcagattacgatctacttcgcgcagagctgcatcatgctgtgcggtccgccagcgttgacgcgcaacaaagggcccacctccagggcagagtagcttgggcgtgccaggccctagccccttctagagtggcgaagctgcaagctctgctggcccgcatagcctga

SEQ ID NO: 12657 - RNA, 1413 nt, synthetic construct
  source 1..1413: mol_type = other RNA
atgactacgacccagcatcggagatggttggccacagggctggcccacgcctttcttgccgaccacgaacagccaggtgctcgcacgccagatgcgctattggcgcgggctagagcctgcctgggatgtgagggagccgcaccagagtggctggtgagcatggctcaggcagtcgcaacccgttgggcgagacaggggctgatagacacagtcgatagcctggctcagactctcgtacaacgtcccgagtggagtgcaggcgagaacgctctggacgatgatgatgaaacagtggacgatacagcaacccaccctgaaccggtcagtgtgggggagtggacagtgcgccattggctgcttagacccgccaggatggccgctttaccttggggcctccagcatatcgacagaccggacctccctaccactgaggactgggcccagtggctcggaattaccaccgatcggctgctgtggcttactcatcctagtcagcactggagggagggaaacgagcgccctcacgctacagtcgcacaccattaccaccataggctgcttcccaagcggtcagggggtctgaggttgctggaggcaccaaaaaccgaactcaagcaggttcagaggctcctcctgcacagagtcttagcgcaccagcccgcccacgaagctgctcatggctttgtgaggggccgtagcgtgcacacacatgcccaggtgcacgctgcccaaccttgcgtaatctcctttgacttgagagatttcttcccctcaataggagccgcccggatccgagctttttggcgcagctgcggctatcccgagggcgtttcacagatgcttactcaactctgtactaccaggacgcccgctgctgtgagggaacgcttgcgagaagccaaggcccttgattttcaagcagccaaacggctggcctccccccatttacctcaaggggcccccacttccccagccctagcaaacctttgcgcattcggcttagacctgcgccttgagggtctggcccaccgattcggcgcacgatattcaaggtatgctgacgacctggtgtttagcggcccggcttcgctggcatcccgtttcagacagctgcacgcttgggtggacgccattgcggcggatgaaggattcgtgttgcaccctgggaagttgtctagacggctatcccatcagcagcaaaggattaccggtctggttgtcaatgcccaaccaaatatcgcccggcaggactacgatcagctcagagcagagctccattgtgctgcgcgcatggggccagttggagcacagcaaaaggcctacctacagggccgggttgcatgggcttctcaggccctggctccagcacgagtaaccaaattgcgctctctcctggcccaggtgcagtcttga

SEQ ID NO: 12658 - RNA, 1419 nt, synthetic construct
  source 1..1419: mol_type = other RNA
atgacaactagtcacagacacgggctggcgatcggcttagcccacgcactgctagcagaccatgagaggcctggcgggcttacagcatctgcactgctagggagggcgagtgcatgtttggggtgcgaaggcgctgctccctcttggcttaggcggctgacccagtcaatcgccactcgatggcagagacacggcgctatcgataccctcgacacccttgcccaggctctgttggatctgcccgattggggagccctgttccatgacgatgacgacgctgaaggcgatgatacacccgccgtaaaccccgacgaggataagctgcctctcagcgcctggagagtccgcagatggctgttacgccccgctcgtaccgttcctcctgtgtggggcctcccagccatagatagaccagactggccctctgccagcgattgggcagacggtctgagcttgaccccggagcggcttgcgtggctcacacatccgtctcttcattggcgcgaatcgtcagaacggcctcaccagagagtggcaagccactaccgccacgctctgcttcccaaacggtcaggtggactgagattgctggaggcaccgaagcctgagctcaagcaggcccaacggcgcttactggatacatgcttaactcaattgccctgtcatgaggccgcccatgggttcgtgcgaggtagggacgtgcatagccatgctgcggttcatgcagggcagccatgcgtgatcgctttcgaccttagggacttttttcccagtatcggagctgcccgaattcgggctctctggcggtccctcggctatcctgaaccaactgccgacctgctgactcggttgtgcacaacgcgaactccagccgccgttagggagcgcttgcgtgaagacggcggtctgcactttctggccgcgaagcgcctagcaagacctcacctgcctcagggtgctcctacctccccgagtctcgctaacctctgtgcctttggactggacttgaggctggatggcttggctcaccgattcggagctcgctacagccgttacgccgacgatctcgtcttctccggcccagtctcactgcaacaacagtttaggtccctgcaggcatgggtgaaggcaattgccgccgacgagggattcgtcctgcatcccgggaaacagaggcagatgagagcccaccaacagcagagaataaccgggctcgtggtgaatcagcacgctaatttgccaagagaggattatgatcggctccgggccgaattacaccaagcggcacgttccggaccagtagacgcgtccaagcaggcaaggctccagggacgagtggcttgggcctctcagcacctggccccaaccaggattacgaaactgaaagcacttctagctcgggttgaggcccgcgcctga

SEQ ID NO: 12659 - RNA, 1536 nt, synthetic construct
  source 1..1536: mol_type = other RNA
atggcaacctctgacggatggcatacccggagagctattagagcagcaccgctcgcacaggacagatcccatccaacaggctggttagcacatcaggtgcactatccacaccatactcctaggatgacagcgttgcaccgccgcctaggcctatccatagggctggcccatgccatgctcgcagatcatcgtaggcctggaggaagtgcagcgccggctttactcgcccgcgcatgtgtgtgtttagggtgtgaggatgcccctccaccctggctggcatcattggcccaggccgttgctctgcggtggcaaaggcacggccccatcgacacgttggacagcctcgcccagttccttgctggccagctggagtgcgacgacactgagccagatgaggatgacgatcttgccgcccccgctattaatgacctgtggtcagatcgaccaccttctacttggcgagtgcggcactggttgttacgtccagcacagaccgcacagccagctgcaggactgcctgctgtggaacggcctgatctcccaactgaggatgcctgggctgcttggctgggactggatcctcaacgcctccggtggctgagccacccttcagttgactggagagaagaccaccaccgaccccaccgcaggatagcagctcattatcgccacgtcctgctgccaaaacggtccggtggcctccgtctgcttgaagtccctagaccagacctaaggcaggcccagcggaggcttctggatggctggctgtctttggtgcccgctcatgaagccgcccatggcttcgtaagaggccgtaacgtgcactcatttgcccaagtgcacgctgggcaagcctgcgtcattcgatttgacctccaggatttctttcccagcctgggtgctgctcgtatccaggccttctggtcggcctggggttaccccgaacctgtagcgcggatgctgacccgcttgtgcaccacaaccacgcccgcgatggttcgcgaacgcttgcaggaggcgccctccatggatgctatgtccctgaagagacttgccagaccgcatctccctcaaggggctcccactagcccagcactcgcaaatctgtgcgccttcgggctggatttgaggcttgacgggcttgcccggaggtttggtgccgtctacgctcgatatgcagacgacctggtgtttagtgggcctcagagcttataccgggaggccagagccctccaagcttgggtgcaagccatcgcggaggacgagggcttcgccctaaacgccgcgaagcagcgacagatgagggcgcaccagcagcagagagtcaccggtctggtgatcaacgaacgccccaatctccccagggaggactacgataggcttcgggcaacactgcacagagcagccctgagtggacctgctgatcccgctgccagggccagacttcagggacaggtagcgtgggcctgtcaatctctcgcaccgagccgcgttgctaaactacaggccctgctggctcggatcgccccaacatga

SEQ ID NO: 12660 - RNA, 1362 nt, synthetic construct
  source 1..1362: mol_type = other RNA
atggccgcagatcgcacacctcgatccaatgcaatcgcactggcacatgcactgctcgccgatgcggaagtacctggggctcgctcgttgacagccttgcacgatcgggtcgccgcatgccttggtctaactgcccccctgccacctgggctgttccagatttgtaccgagctcgcggcctggcctgaaccgatgtggagacagcatggattagactcactcgcggacgtgctcctgcaacgtcctgagtggccagctccccctcatgcatggcaggccagacactggttgctgcgacctgctcgcatgcagttagccccaatggccctggctggtgtggctctgcccgaactgcctactcacgccgccttggcagcgtggcttgggactactcccgatgacctacagtggcttgcacatccctctcagcggtggcgtgaatcccaacccacagaccggccgcatcgctctgtagctccccactatagataccagcttctcacgaagcctgggggaggactgagactgctagagatgccactcccaagactgaaaacccttcaacggaggctgctgcacggcctgttagcgagagtgcctgtccatgaggctgcccgaggatttgttgctgggcgcggagtacggggtcacgctaacctacacgccgggcagccctgcgtcctttgtttcgatcttcgggatttcttcggcagtgtcggtggaggccggatacacgccttgtggcgcagcctgggttatcccgagggtgtggcaaggactctcattcagctgtgtacgacacggaccccgccagctgttcgggagaggatggctgatgcaggttctctggaccgccctgcagccaggagactggcaagtgcacatctccctcagggagcgccaacatcaccggctctggccaacctcagcgcctttggcctggacctcagactggatggcttggcctggaggtttggagcgaggtatagcaggtacgctgacgatctcgttttctccggccccgccgccttacgaagagactttagagtgctccacgcctgggtcgaagccatcgccttggacgagggcttcgcactaaatcccgctaagacccgttgcctcccagcgcaccgccaacaacgggttaccggggtggtggtgaatgagcgtcccaaccttccaagagccgactacgataggctgagggccgaactgcatgccttgggccaccagaccagggtacccgctgctttgaagccaaggcttcaggggcgaattgcttgggcccgacagtggttagctccagagcgcgcagccaaactgcagcggctgctggaacgcatcgcttttgacggcgcctga

SEQ ID NO: 12661 - RNA, 1392 nt, synthetic construct
  source 1..1392: mol_type = other RNA
atgactgtggcggccccactcacttatcctcgatggatagccctggccctggccagagcattacaggccgatgacgagtctccacgagcacgggaggctgatgccctgcaagccagagccgaacagtgcctgggggtggagtctcggccttggctgaaacccctgtgtgtcgcgctggctcggtggacaaccccagtttggagagcccacagcattcgtagcttcgccgacgctttgctggaaatggacgccttccacgagggcttcgacctggaaaggttttctaggccaaccgttaggcgcttgctgctccggccttcccgtatgaggcccctaccttttgcattagagcatttggtcctccccgacttagccactgaggccgacctggctgcttggctcggtctgaccctggatgagcttgaccatttcgcggggcccgcaagacgttatcgagaagcagtagccacacctgagaggcctcatgtggccccaaccccacactaccgctgccttttggtaccgaaaaggaggggaggccttcggttggtcgaagcccccttaccgcggttaaaagcggtccagcgcagactcttggacgggctgctgaataccctaccctgccacgaagccgcccacggtttcgttccagggcgtaacgtggctaccaacgctgcagtccatacgggccaggattttgttatccgcttcgacctccgcgattttttcccaagtattggccgcgcgcgaatcgcagcaacattcaggacactcggtttttccgatgctgtggtggagcgcctcactacgctttgtactgcaaggacaccggctcctgtcagggagcgactacgggaggacggaagtattgatttcgatggcgccaagagactggcctcaccgcatcttcctcagggcgctcccacttcgcctgcccttgctaatttgtgtgcttttccactggatatgaggttggatggactcgctcacagatttggcgcccgctacacgcgctacgctgatgacctggtattttccggccccgcaaccctccggagagatcaacgagagtttcgggcatgggtacaagccatagtggaagacgaaggatttaggctccgaagagataaaaccagagccatgcccgccggaggtagacagcaagttacaggcgtggtggtgaacgaaaagcccaatctggctcgcgaagattttgaccgtctgaaggcggagctgcacagactggtggggtcaacagacgtggaccctgcgcagaggagcgtcctacttgggcggctggcttgggcacggcagttccttgcacccatgcgggtggagaagctgcagcgcatgttcgacgctatcgccttcggagcagcaaagaacctctga

SEQ ID NO: 12662 - RNA, 1392 nt, synthetic construct
  source 1..1392: mol_type = other RNA
atgtcattagccgcacccctcacctacccccggtggatagcccttgcactggccagggctctgcagacagacgatgatgcccctaggggtcgcgaggctcatgcattgcaggcgcgggctgaacagtgtcttggcgctgaggctcgaccctggttaactcccctctgcgcggaattagctagatgggcccggcccgtttggcttgcccattccatggccagcctggccgatgccctccaagccttggaggcctttcacgccggcttcgatccagagcggccaagaccaaccgtccgtcgcctgctgttgaggccttcacggctgcggcctcctcctcttgcactggcaagtctggtgctaccggattggagcacagaagccgacctcgctgcttggctcgggcttaccctagacgagcttgatcacttcgcaggacccgcccgccagtatagggaacggactgcaacccctagaagaccacacgctcacccgacaccgcactaccgtggcctgttggtgccaaagcgtaggggcgggctcaggcttattgaagcacccatgccgaggctcaaggccgtgcaaagaaggttgctggatgatttcctgcagcccctgccatgtcatgaggcggcccatggcttcgtgagagggaggaacgtggcgactcatgccgctggtcatgcgggccaggacttcgtcattcgctttgaccttcgggacttctttccatcgatcggccgcgccagagtatctgccacgttgcgcacgctggggcttccagacgcagttgtcgaaagactcgtcctgctgtgtctgacccggacccctgcaccactgagagaaagattacgtgaggatggaagtatcgacgcagacggtgcaaggcgcctggctagctttcatctgcctcagggggcccctacatccccagctttagccaatctgtgcgctttccccatggacctcagactggacggattggcccagaggttcggcgccagatatacccgctatgcagatgacctcgtgtttagcgggcccgcttctctccgacgcgatcaacgagcactgcgcgcctgggtgacagccatcgtggaggatgagggatttcgcctgcgaagggacaaaacacgggctatgcctgcaggtggacggcagtccgtaaccggggtggttgtcaacactcgtccaaacctggctcgcgaacgatacgacggactgaaagctgagctccaccagctaggcctacggtcccggtctgctcctgttgatcccgctctacgaggacccctcttgggtagactggcctgggcgcgacaatttctggcgccctcaagggtggagaagctcactaggatgttggcagccattcagttcaatgccgacagatga

SEQ ID NO: 12663 - RNA, 1383 nt, synthetic construct
  source 1..1383: mol_type = other RNA
atgagccacgcaaccccgctcacttatactcgctggatcgctctggccttagcacgggccctgcagaccgatgatgaaacacccggtggaaggggtgctcgagctctccaagctcgagccgagcagtgcctcggagttgaggctcgactgtggctgcgccctctgtgtgttgtgctcgcgcgatggccagacccggtttggagagcacacagtgtgcggtcactggcggatgaactgcaggacacatctgcctttttagacggctttgatgccgccttgcatcccaggcctcgggtccatagggtactactccgtccctcccggagaaggccccttccattcgcactggaacacctgtccctccccgattggcaaaccgaagcagagctggcagcctggctgggactgtcaggggaagagctcgatcactttgccggcccttcgcagcgctacagggagacagtagccacccctcggaggcctcacatagcagcgactaggcactaccgctgtcttttgatcccaaagagacggggtgggctgcgcctgatagaggcaccaatgcccagactgcgggcacttcagagacgcctgctggatggcctgctccatgcgcttccatgtcacgaggctgcccacggatttgtgccagggagagacgtcgctagccataccgcttgccacgccggccaggacttcgtcatccggttcgacctccaagatttttttgcatccgtggggagggcaagagtggctgccatttttaggaccctcggttacagcgacggggtcgtggagcgactggctactctttgcacaactcggacccctgcaatggttagagaacggcttagggaggacggggcgctggatttagacggtgctaggcgactagccgccccccatctatctcagggagcccctacaagccccgagctcgctaatctgtcattgttcggcttggacttaagattagccgggttggcagagaggttcggagcgagttactctagatatgccgacgatctcgtaatctccggacccgcaacgctgcgtagggatcaggggcgacttcgcgcctgggtgagagctgtcattgaagacgagggcttccggctgaggccggataaaacaagagcaatgccagcgggaggcagacaacaggtgaccggtgtggtggtcaaccagcgccctaacctcgctagagaagactatgaccggctgcgcgctgaactgcatcgccttgccggcatgccaagagttgacgccgccttgcgcgatcctttgcgtggtcggctggcctgggctcgtcagttcctagctgccacgcgcgtggccaagttggaccgtatgttcgatgccattgtgttcggcgaggcctga

SEQ ID NO: 12664 - RNA, 1377 nt, synthetic construct
  source 1..1377: mol_type = other RNA
atgacctcaagcgctagcctgacatatccccggtggatcgctctggcactggccagagccttccagacagacgacgatgccccaggaggacgatcccctcaggccttattgggccgtggcatggcttgcgtgggggaagagcatcggcggtggcttttgccactgtgtcagcacctggccagtttatctgcaccagtttggttagggatgaccccccgcaccttggccgaacacttagatcaacgccctgagtttttcgacgcctgggatccggctggtccgagacttcaggttcgccggcttctcctccgccctgctaggatgactcctccacctttcgcactggaagacctgcccctgcctgcatggcacactgtcgctgacctggcagcaggattgggcattgacctctctatgctcgacgtgctggcgggtccagctcagagataccgcgaggctgaagctcggcctcataggccacatgtgcaagccatccggcattacagggccgtccttgtgcccaaacgacgtggcggcttgcgactcattgaggcacccatgccggctctgaaggcggtccaaaggaggctactgcgctccctgcttgacttggttccggtgcacgaggccgcacacggctttgtagccggacgcaatgtggcttcacacgcgggactccacgctggacaagactgggtcttcaggttcgacctgcaggatttttttcccgggattggggccgccagaatacgagcactcttccgtaccctaggcatggaggaagcagtcgccgaatatctgactacactctgcactgtgcggacccctagagctgtgcgcgagcgactacaggatgacgggggcctaacatggatagacacgcggagactggccgcccctcatctaccacaaggggctccaaccagcccccagcttgctaacctgtgtgcatttaggctggatttacggctggatggcctggcggcaaggtttggggcccagtattctcgctacgccgacgatctggtgttctcgggtgcaggtacgcccgccttggatgctgtcaccctgcacgcatgggtgaaagccatcgttgaggaggaaggatttagactgaggcccgataagaccagactcatgagagccgggggcagacagacagtaacaggcctcgtcgtgaacgagactccccacatcgccagggcggattacgaccggctgagagccgaaatgcatagactcggacgcgagccagcagttgatctgtccctccgtgcgccccttcttggtaggctcgcctgggctcggcagttcgtagctcctactcgagccgccaagttgcagaggctgtttgacgcgatcagtttcgtgcagtga

SEQ ID NO: 12665 - RNA, 1377 nt, synthetic construct
  source 1..1377: mol_type = other RNA
atgacgccaccagctcccctgacctactcacggtggattgccctgtctctggcccgggcatgtcagactgatgacgacgctcctggaggtcgaactgcgtccgctttgctaggccgtgccacagcctgtcttggcgcggaacatcgcgcttggctgctgccattgtgcgaacaactggcacgcttaagtttgccagtctggcaacagatgacacctaggctgttagccgaccacctcgaactcatgccagcatttgtggcgggattcgaccctgagcggcctccagtgcatgttcggcgcctgttactgaggcccagcaggatgcgacctccaccctttgccctcgagcaccttccgctgcctccatggcatacgcttgccgacctggctgccggcttaggactggagttgtctatgctagaggtgctcgcaggacccgcacagcggtttcgagaggccgatcccaccccgcatagacctagagtccaggccactgcacactacagaagcctcctggttgacaagaggagtggtggcctgaggctcatcgaggcaccgttgcccgcgctgaaagctgtgcagagacggcttctgcggacactgcttgaccgcgttccggtacacgaagccgctcagggcttcgtcgcagggaggaacgtagcaggccacgctagaatgcatgccgggcaggcatgggtctttcggtttgacttgaaggatttctttccatccattggggcggcaagaatcagagctctattccgcaccctcggctttactgaagctgtcgcagataccctgactacactgtgcaccgtgcgtactcccagagctgtgagggagaggttgcgggacgagggcggactttcgtggcttgaagctcggcgtctcgctagtgcccaccttccacaaggagcccccacctctcctgtcctcgccaatctctgcgccttcgcgctggatctcagactggatggcttggctgtgcgcttcaacgcccagtattcccgatacgctgatgacctggtatttagcggtcccaccacagagggactcgatgccgtgtccctgcatgcttgggttcgcgcaatcgtggaggacgaagggttcgtgctgagggccgataaaacgcgcctgatgcgcgccggtggtagacagacagtgaccgggctagtggtcaatgagacaccccacctgagccgacccgactatgataggttacgggcccagttgcacagactcgggcacgaggcacaagtacctatgtcactgagggcgccacttctcgggagactagcctgggcccgacagttcgttgctccttcacgcgccgaaaagctgcagcgtcttttcaacgccatagcattcgtgcaatga

SEQ ID NO: 12666 - RNA, 1428 nt, synthetic construct
  source 1..1428: mol_type = other RNA
atgaccctggccgccccactcacctatcatagatggatcgcgctggcacttgcaagagcaatacaggcagacgacgatcaaccccaggggcgcgaggctcatgccctattgggtaggacgtcagaatgtttgggcaaggagcatgtcccctggctgagagccctctgccaagcactggctcggatgactaaaccacagtgggaccgtttcaccacccacacccttgctgatcacctggaatcaatgcacgaattttttgggtgggcccatgtacgtggagacggggatcccgacgacgagagtgaggaggatccggatggcgagccattcccaaccccccgagtccgacgattactcttgcgacctgctagaatgaccgctcgcccctacgccctggaagcacttgagttgccggtgtggcacactttgccagatctggccaacgggctcggaattgacctcgacatgctggaagtccttgccggcagggcgcaccactacagagacgctgtggcgacacctctcaggccacatgtcagggccacgcaccactatcggtccctgctggtgcccaaaaggagagagggcatgaggctgattgaggctccgatgcctgctctgaaggccgtgcaacgtcgcctgcttgacgtgctcctcgctcgggtacccgtacacgaggctgctcacggttttgtaactggaaggaatgtggcctctcacgccgccgcacatacagggcaacattgggttctgcggttagatctgcaggatttctttccttcgataggaagagcccgcatcgcggcacttttccgcaccttaggatacgccgaaggggtggctgataggcttactacgctgtgtaccgtccgcactcccgtcaatgttcgcgagcgcctaagggacgccggtgcaatcgactttcacggagcgaagagactagcatcccctcacctgccacagggcgctccaacatcccctcatctggccaatctttgcactttcagcctcgatctgagattggaagggcttgcctaccggttcggcgcgcactatagccgatacgccgatgacctggtgttttctggctcccgggacactaggctggcccctacagctctccatgcctgggtgcggacaattgttgaggaagaaggcttccgtctgcggcgcgataagaccagactgatgagggcaggcggacgacagacagtgacaggagtggttgtgaacctcaagcccaacctcagccgccccgactatgaccggttacgggctgagctgcatagactaagtcatcaggccgcagtggatggcgcattacggagccctttgttgggtcggctggcctgggcacagcagttcgtagctgcctctagggccgcgaaactgagacgtctcttcggtgctatccgctttgttccttga

SEQ ID NO: 12667 - RNA, 1350 nt, synthetic construct
  source 1..1350: mol_type = other RNA
atgactaggagctctagttatagaaactggattgccacggccctggcgcacgctttcttggcagatgcggctcaagccggcggtcgaagtgccgaagctctgcacgcacgcgctgtgcagtgcatgggcgaagatgctccatggctaagagcccttgcagcctcaatcgcaacagagtttagtcggaggcgagacgcacatactgtgcctactctgagcgcctggctgtgtgagctgccccaattggacgacgccttcgatccagagcgggagcacccacgggtgaggagacttctgctccggcccgcacgcatggttagagctccgtgtgccttagagggactgagactgcctcgatgggacactcctgccgacctcgcagcatggctgggtgtgccattggaaagactggaatggttagttggcagggcccaggatttccgagagacacaggccgggcgcaccagatcagctcactaccaccccctcctgaaggctaaaagatccggcgggctgaggctgattgagatacccaagcctgcactgaaacaggtgcagcagaagctgctctccgggctgcttgatgccataccaacccacgaaagcgttcacggatttgtccggggccggtcagccatttctcatgctcgggagcatgctggacgcgcggtagtgatcgcctttgaccttagagatttttttaacagcatcggagtcgcacgcgttcgagctctctggcggaccttgggctatgcagaaggagttgcggaagccctagcccgtctcacaaccactagaacacctctggccgtccgagagcggttggtcgaagctggtggcatcgacttcatggctgcgaagcgtctggcctcgaggcatctaccccaaggtgcccccacgtcccctgcacttgcgaatctctgcgcattcggactcgacttgagactagacgggctcgcttggcgtttcggggcccattattctaggtacgctgatgacatcgtgttctccggccccagagagcttgctgccaggagcaggaacctgcaggcttgggtcgaggcaattgtgcgcgccgaagggtttaccctccatccgggaaagaccaggcgtatgagggcacaccatcggcagcaggtaaccggcgtggtggtgaatgagcgcccgaatgtggctagggacgcctacgatcggttacgcgcgcgcttacactcttgcgcagcctccggctgcgatgccgagacatggatgcagctgcaagggcaggtcggttgggcctgtcaactggtcgccgcaagtagagctgaaaaacttcagcgcatgttggcggccgtaccagtgcgtcggtga

SEQ ID NO: 12668 - RNA, 1353 nt, synthetic construct
  source 1..1353: mol_type = other RNA
atgacccattcctatcgccattggatcgcgactggactggcccacgctcttatggccgatgccgatcaacccgggggtcagtccgcccaagcacttcaggcacgagcccagcagtgtatggggactcgcggtacctggctcaagcccctagccgaagcagtggccagggagttcgcgaggaatccacgccaccatactgtagcgaccctggccgaccacatatttgaactgccccaattcgatgctgctttcgctcctggccagcctaggcccagagtgagaagactgctcctgcgcacagctcgtatggccgctcctccattcgaactggcaggtttggagctcccgagccttcccactctcacggatctggcggcgtggctagacgtgagcctggaacggctgcagtggcttatcgcacccagccagaatttcagagagacagagcctgctcccggacgagctaatgtgcccccaggattacactatcacgccctcctgaaacctaaaaggtctgatgggctccgcctgatcgagattccaaagccagatttgaagcgagtgcaacggagattactgagcggcctgctggacaggattccggtgcatgaatgcgtccatggcttttcaaaagggcgatccgtgctcactcatgctgcagaacacaccggccaggccgtcgtgatatgccacgatttgagggattttttcaactcgattggcatcgctcgcattcgcgccttgtggcggacgcttggatacccggagggagtatcagctgcgcttgcagccctgtgtacagcgcgtacacctagggcagttcgggagcgcttactggaatgcggcagtatcgacaggagaggagcagccaggctcgcctctccacaccttccacaaggcgcccctaccagcccagccctagcaaacctgtgtggcttcgctctggacctgcgattagacggtttggcatggcggtttggggcccggtacagtagatacgccgacgacctggctttttccggacccgctgacttgatgccacggaggcgaaacctccaggcctgggtccaggcaattgcccacgctgagggttttgccctgcatcctgataagacccgggccatgccctcacaccgtcgtcagagactgacaggggtcgtggtcaacgagcggcctaatctcgagcgctgcgcttatgacaggttgcgggctcagcttcatgccctggccgctctgggctgtgatgaagccaccagaatgagactccaggggcaggtttcttgggcctcacagttagtttgcggctcccgggcacgcaagttggacagactcctagcagcaatcagttcttga

SEQ ID NO: 12669 - RNA, 1401 nt, synthetic construct
  source 1..1401: mol_type = other RNA
atgccgaagcccaaccactcctatagaaggtgggttgccacgggacttgcacacgccctgttggccgatgcacacaaacctggcggcgcgacttcgcaggctttacacgccagagcgatccagtgtctgggcgccgatcacccctggctactgccactgatagccgccatgggccctcattcagtagggcagtggcgccgtcattccgtggctagcctggctgagtacatcgatcagttgcccgccttcgacgccgcctttctcggacaggacagccacccccatattagacggctgttacttcgtcccgacaggatgctggccccgccatttgagctcgctcagctgggtctgcctcgtctggcctcacatgccgaccttgcccagtggctcgggatttcccctgagcgactgcagtggctgatcgaaccggcacagaacttccgcgagagcgaagcagctccagggcaaccacattgtcaccctggaaggcactaccgccagctgctgaaacagaagaactcaggtggcctacggctcgtagaggccccaaagtccgaattgaagcgggttcagaaacggctgttgagcgggttactgaataagattccagtgcatgaaaaggtccatggtttcgtgcgcggacgcggtgtgctgacacatgccagtgaacacgctgggcggcacaccgtcctggcatttgacctcagtgacttcttctctagcattggcgtggccaggataaaagccctatggcagacacttggataccccgaagcagtcgcacgagcattagccgctctctgcaccactcgcacacctctggcggtgagacaaaggctcatggacgccggcgggatcaacttttttcagcagcggcgccttgctagtgcgcatctccctcaaggagcccccacctctcctgcactggcaaacttgtgtgctttcatgctcgatttgaggcttgatggactcgcatggcgttttggtgcgaattacagcagatacgcagacgatctggtgttttctggttcagagttgttagctcgcgatcaacggaagttgacgggatgggttgccgcaatcgtagaggctgagggcttccgagttcacccccgcaaaacacgagtcctcctgaaatatggcaggcaacgggttaccggggtggtcgtgaatactaggcccaatctgggcagagatgattatgacagactgcgggcggaactgcacaggctagctggagcggacagattagacaagggggtgaagcaaagaatgtggggccgaatcagttgggcttgccagaccgtgtgcgcttccagagcagccaaactctacaggcttttcgaggctcttccaaatgaccaccagggcgctgggtatgatgcctctacttcttga

SEQ ID NO: 12670 - RNA, 1368 nt, synthetic construct
  source 1..1368: mol_type = other RNA
atgcctgccagttcgacctataggcagtggctcgctagagccttggcgcatgccctgcttgccgatgcccttctcccaggcggctgtttgagagatgcactgctggcgagggcagcctctactcttggaaagcgccccgcatggcttgcaggtttagtcgacgccctgctcccattcgacccactcagggaggacgtgcaagccctgggacgacggatcgcagttcttcccgcctttgatcctgccttcgacgctgagcatcccccccgaattcggcacctaatccttcggcctgccaccatgttaagaagaccgctgggcctgcacgagttggaactgccagcattggctacacacgctgacctggcgtcctggttaggcctcgactccgaacagctggcttggcttgcagcaccagctagagcttggcgaccacctggtgctggtggaagggctgccgctacccactaccgctgcctcttgatgccgaaaagaagtgggggcctgcggctcattgaggcacccatggccacactgaaggccgtgcaacgccacctgctggatgggcttctggatcacgtgcctgctcacgaggcggctatgggctatgtttccggccgatctgtcattgaccatgcagccgctcatgctgggcgggcagttgtcttgaggttcgatctcagagatttctttaacagcataccggcttctagggtacacgccctgtggcacacgcttggttacccagacggagctgctcggactctgaccgccctcactactgcccgcacacctgttgctctgcgcgaacgcctgcaggatgatggcgggttagatgtgctgggcgccaagaggctcgcctcagcacacttgccccaaggtgctcccacttcacccgccctggcaaacctgtgttgttttaggctggacctgaggctgaatggactggcaaaacgcttcgacgcgagctacacccgctatgccgacgatctcgtaatcagcggaccagcggcttgcgctaaaagacgacgtgagttgcaggcatgggtggaggcaatagtgcgggacgaagggtttgccctacagcctaggaagacactgacgatgcccgctcatcagagacagcaggtcgccgggatcgtcgtgaacgcgcatcccaatttggaccgtgccagcttcgacagactaaaagcccggttacatcgctgcacccgtgatggaccaagtcctgcagatgacccccaacaactccgagggcagctcgcctgggtgacacagcttaaccctgcccggggcgccaagctgcaaaagctctttgaagggatccggtggctaaatgtggccccgtcctcaacccctgtgcgttga

SEQ ID NO: 12671 - RNA, 1425 nt, synthetic construct
  source 1..1425: mol_type = other RNA
atgcctcccccaccttcatcgataggattgattaccttcatgacgcgggagctgtcctatcgggaatggctgagccgtagtctggcacgcgccttgcttgcagatgcacgacaacccggagggacagctcccgatgcattacacgcgagagctgccgccacattgggcacagacgccgcttggttgaagcctctagccgaagttctcgggaagcggagccaggccacctggcaaagaacagacttacccgcactggccaaggcaatccatgatatgccggagcttgaccttgcctttgcccaagacgagctaccacatgtgcgccgcatcattctccgaccagcccaaatgctgccccgccctctcggacttgaccacttcgcactgccagaagtgccgactctcgcagaccttgcgcgttggctggaactcgagcctgacagactggcatggttgacctccgccactcaggtgtttagagaaccagatgcttcctctccctgcccagctagccactatcgctaccagctgcagccaaaaagactgggcggtctgagactcctggagattcctaaggccgacctgaaacgtgcccagcggaggattctggacgatctgttgcagcatgtgccagtgcatgaggccgcacatgggtttgtgcagggcagaagtgttgcttctcacgccgctgctcacgccggcaaagatgtggttatcggattcgacttaagggacttctttccatccgttagggcgtctcgcgtgcacgccatgtggcgaactcttggttatcccgaaggcgtagcgcgagccttgaccgctctgtgcacacaccgtaccgattctgcggtgatcgagcggctacgggatgacggcggtctagactggctcggcgctaaaaggcttgcggcacctcatctgccgcaaggcagcccatgttcacccgccctcgccaatctctgcgcattcaggttagatctgcgcctggagggccttgcttgggtgtttggggctacctacaccagatacgccgatgatttggtcttttccgggcctgcgactttacgggcacagttcacggcactgcgggcttgggtcagtggtatcgctgctgacgaaggatttgccctgcacccccgcaaagtacgctgtatgcctcagcaccgacagcagcgggtgacaggcgtcgtcgtaaacgataaggctaacgcccctagggaggacttcgacagactcaaagcagtcctgcatcggtgtgttatgcacgggcccgcagcccagaatcacgctaagctggatgacttcaggggacacctcctgggacatatagcctggatcgggcagtttagcccgactaggaaggtcagactgatgaggctcttcgataggattgactggcccgatgccgctcagcctccctcatga

SEQ ID NO: 12672 - RNA, 1389 nt, synthetic construct
  source 1..1389: mol_type = other RNA
atgactactagagaaccaagctatcgcgagtggatcgctagaggtctggcgcacgccctgttagcagatgccaggcagccaggtggaactactccggatgcgctccgtgcgagggctgaagctgctttgggggccaatccaccttggttaacattgttggcagaagatctgggcaagcgcagtctagctacctgggagcggaccgatctccctggcctgacacaggcgatcttggagacacctgcactggagctcgcctttgagcaagacgaaccgccgcggattcgcaggctgatcctaagacccgccgacatgtttcccagacccatggggctcgaccacttcgccctgccacgtctgcccacctttgcaaaccttgcccaatggttagagatagaaccggatagactcgcttggctgaccgccgcctctcaagccttccgagcaccagatgcatccagcccaagacccgcctcgcattacagatatcagctgcagcctaagcggctgggcggacttcggctgctggagatacccaaagctgacctcaagaggctccagcgacggattctcgacgatctgttgcagcgcgtcccagctcacgaagcggctcatggattcgtgcaggaacgctctgtggcatcccacgctgccgcccatgtagggcaagaggttgtgattggattcgacttgcgagacttcttccctagcgtccgtgccagccgggttcatgcactgtggaggaccttgggctaccccgatggagttgctcgtgctctaacagcactctgcacgcatcgcacatccgcggccgtcatcgaaaggcttcgggatgacggtgggctcgattggatgggcgcaaagaggcttgccgagccacatctgccccagggatccccttgtagtcctgcactggcgaatctatgcgcctttagacttgaccttagactggagggactggcttgggcattcggcgctacgtatacccggtacgccgacgatcttgtgttttcaggccccgccacactcagggagcagtttaacgccttacgagcttgggtggacgggattgctgcagatgagggttttgccttacacccaagaaaagtgaggtgcatgccacggcaccatcagcagcgcgtgactggcgttattgtcaacgaaaaggcaaataccccccgcgtggacttcgacaggctgaaggctgtgcttcaccagtgtgtgctgcacgggcccgcctctcaaaatagagccaaagtcaccgacttccgaggtcacctcctgggccacatcgcctggatcggccagtttaaccctgccaggaaagcacggctgatgcgcctgttcgaacgaatcgagtggcctgccgtatcacagcctcccgggtga

SEQ ID NO: 12673 - RNA, 1509 nt, synthetic construct
  source 1..1509: mol_type = other RNA
atggcctcacacagcggcgctcaggctgctcttaggatccgcgcagaccagcttgcgcatcaccggcttgttgaaggtcccggcgcaactaccttcatcggattcgctgcaagtggcttcatgacccgggagctgagctaccgggagtggattgcgcgctctttagctagagccctgctggccgacgccaagcaacctggtggcactgatcctggagctttgcgtgcaagagccgcagctacattgggtgccgacgcaccatggctgaagccactcgcccaggccttagggaatcggtcccaggctacatggcgaaggaccgatctacctgcccttgcccgcgccatacatgatatgcctgaatttgacgcagccttcgagcagaatgaacctcctagagtgcgccgcattattctgcggcccgcccagatgctgccaagaccaatgggactggatcactttgcactcccccacatcccgacgcttgccgagttagctcagtggctagagctggatgccgacaggctggcatggctgacgtcggctgcgcaagcgtttcgagcccctacagaccccgacactaggcagcccgcatcccactaccggtaccagctgcaacccaaaaggctgggcggcatgcggttgctggagattccgaaggccgacctcaaacgtgcacagcgcagaatcctggatgatctactgagacatgttcccgcccatgaggcggtacatggattcgtcctgggtagatctgtagcaagccatgccgctgctcacgctggcaaggaagtggtgattgggttcgacctgcgtgacttctttcccgggataagggcatctcgcgtccacgcaacctggagaaccctgggttatcccgaaggggtggcacgggcccttacagcactgtgtacacatcgcaccgacgatgccgtgatcgaacggctcagggatgacggcgggctggattggatcggcgctcgaagacttgccgctccacaccttccacagggctccccttgcagccctgccttagccaacctctgcgctttccgactcgacctccgattggagggactggcctgggtgtttggggcctcctatacccgctatgcagatgatctcgttttttcaggaccagcctctttgcgtgcgcagtttaacgctctaagggcctgggtgagcgggatcgctgctgatgagggcttcgaactgcacccaaggaaaattagatgcatgccgcgacacaggcaacaacgggtcaccggcgtggtcgtcaatgacaaagctaacactccaagggaggactttgaccggctgaaagccgtgctccacagatgtgcaacacaggggcccgcgtcccagaacagagcgaaggttgatgatttccggggacatttgttgggatcaatagcctggattggacagttcagtgctacccgcaagactcgtctcatgagactctttgacaggatcgactggacagatgccactcaaacgccgagttga

SEQ ID NO: 12674 - RNA, 1365 nt, synthetic construct
  source 1..1365: mol_type = other RNA
atgtccagatccttggccagagcactgctcgctgatgccaggcaacccgggggtacagcaccaggagcattgcgagctagagcagcggctactctgggggccgatgctccttggctcaaggctttcgccgaggctttaggacagaggagccaggcaacgtggcagcgcactgacttgccagccttagcccgcgctatcgacgatatgcctgcgttcgatgcggcattcgcacaggacgaagccccccgagttcggaggataatcctcagatctgcagaaatgttccctcgcccactgggtctggaccactttgctctgccacgaattcccaccctagctgagctggcccagtggctcgagctggatgcggaaagactggcctggctcacaagcccggcccaagcattaagaacttcgcacgagcatgatgcgcctgggactgctcccgccagtcactaccgatatcagctgcagccgaaacggctcggtggccttcggctgctggaaatccccaaggccgatttgaagcgcgcccgtagacggattttggacgacctcctgcaacacgtgcccgtgcacgaggcagcacatgggttcgtgcaggggcgttcagttgccagtcacgctgctgcacacgcggccaaagaggtggttattggctttgaccttagggatttcttccccgccgtccgcgcatcaagagttcacgcgacctggcgaaccttgggttatccagatggcgtcgcgagggccttaactgccctctgtacccaccgtacgggcgctgcagtgatcgagcggctgagagacgacggcggacttgactggatgggcgccaaaaggctggctgctccccatctacctcaggggtccccatgcagccctgctctggctaacctgtgtgccttccggcttgacctgagactggagggtctggcctgggtctttggcgccacctacacaaggtacgctgacgatctcgtgttttcaggacctgccagcctaagggcgaggttcacagccctacgcacatgggtgggagggatagccgccgacgaaggctttgaactgcatccgagaaaggtcaggtgcatgccgcagcatcggcagcaacgggtaaccggagtcgtggtgaacgataaagcaaatgcccctcgtgaagagttcgaccgcctcaaggctacccttcatcgctgcgctcttcatggacccgccggccaaaaccgcgctcaggtaccagattttcgagcacatttgctcggacggatggcatgggtgggccagtttaatccagcccggcacgcaaggcttctgcggatttttgagcgcatcgcctggccctctgcctctcctacaccatcctga

SEQ ID NO: 12675 - RNA, 1383 nt, synthetic construct
  source 1..1383: mol_type = other RNA
atgacacgggaacccaactatagggaatggatcgctaggagccttgcaagggccttacttgcagatgcgcggcaacccggtggtacagctccaggagctttaagagctcgagcggccgctactttaggttccgatgcaccctggcttgcaccgctgattgaggcactagctcgccgctctcctgccacctggagacgaactgacttgccagcgttggcgcaggccatccacgacctcccagagtttgacgccgcattcgagcaggatgagccacccagggttcgtcggataattctccgacccgcccaaatgtttccgcgccctctcggccttgatcacttggcccttccggcactgcccacccaagctgagctcgcaagatggttggacctggatccacagagactggaatggctggcaagcccagcgcaagccttcaggacgccccaaggaacctcccctgctcctgccagacactacagataccagctacagccaaaacgcttagggggtctgcgattgctagagatccccaggccagagctgaagagagcgcagagggggatcctcgacgcactgttggccagggtaccggtgcacgaagctgcccacgggtttgtgcctggccggagtgttgctagccatgcggctgcccacgcaggaaaggctgtcgtaatcggcttcgacctgcgtgacttcttcgccggggtacgcgccagcagagttcatgccacttggagaacactgggctaccctgacggagtggcacggactctgactgccctgtgtacccatcggacagatgccgcagtgatagagcgcctgcgtgacgacggcggcttggatctcatggggggtaagagattggctgaagcacacctccctcaggggtcgccttgttccccagctctcgctaacctgtgcgctttccggctcgatcttcggctggaagggctggcttgggtgtttggcgccacctatacgagatatgctgacgacctggtcttttcaggcgacgagtctcttaggctgaggttcgacgcccttcgagcctgggtgggaggcattgctgccgatgaaggatttgagctgcacccccgcaaactgcgttgcatgccccggcatcgacagcagagagtcaccggggtcgtggtgaacgatcggcccaatgcacctagagcagatttcgatcggctgcgcgcactgctccatcagtgcaccctccatggccccgccagtcaaaatgccgctggtctggccgatttccgcggacacctcttaggccgcatcgcctggttcggccagttttcaccaacacgtcaggcccggctgaggaggctatttgacaggattgaatggcctgcgggagccgccccagcctaa

SEQ ID NO: 12676 - RNA, 1425 nt, synthetic construct
  source 1..1425: mol_type = other RNA
atgcgtgaaacccggtttcggcacctgatcgcaaggggactggcccgagctctccttgctgacgccggtaagcctggcgggacagcattgcctgccttgcaagccagagcagctgcagcactgggccaaaggcctgcctggttgcgagaacttctgcagcccctgactctgctctcccccatcacttggcagaagttcgatatcacgagtctggctcgccgcctggaggattcaccggctttcggactcgcctttggggatgaggacgatgacgaagatgaggacggtgaagccgatagttcagagccacaggcgtcccaagcaatcgatgaccgcgatgatcccgaacctgaaaggcccccccgaatccggcggcttattctaaggccccccgctatgaggccaagaccacttggactacaggcctgtaccctcccagatattaccaccgacgccgacctggcgagatggctacagctgtcccgagagcagcttaggtggttagcacccgccaccaggcctgtggtcgaacattataggtacagccttcaggcaaaacaggctgggggtctgcgcctgttggagacaccaaaggtcgagctcaaaagagtgcagcgccatatccttcacgccttattgtccgaggtgcctgttcacgaggctgcccatggctttactgcggggagatctgtgaagacacatgcagccgcccacgtaggtcaagccgtggtgattagattcgacctgcgggacttttttggttctattggagcggctcaggtcaacgcggtttggcgaacactggggtatccagaaggggtggcacgcagtctcacagccctgtgcacacaccacactgccggcatggtgatcgaacggttgcgggacgacggcggattagactggatgggagctaagagactcgcaagcgcccatttaccacagggggccccgacttcacccgcacttgctaacctttgcgcgttcaacctggacctgcgtctcgagggattggcctgggtgttcggcgcttcttacacccgatacgcagacgacctggtgtttagcggacctgcttcgctccggttgcagtttagggctctccacgcttgggtagccgagatagtccgggatgagggcttcgcactccacccggataagaccaggtgtctgcctcggcatcagcgccaacgggttacgggggtggtggtaaatgtccgcccaaatgttcctagggatgacttcgacagattaaaagcctgcctgcatcaaagcgcgctgcacggccaggcctctcagaataaagagagactggccgattttagatcccacctcctaggccgcattggctgggtcggccagttcagcatgacccgtcaggcccgtctgatgagactgttcgacaaaatagattgggctaactga

SEQ ID NO: 12677 - RNA, 1389 nt, synthetic construct
  source 1..1389: mol_type = other RNA
atgcgcgatatctcatatcgcacatggattgctaggagcttggctcgcgccatgctggcggactcagatcaacctggcgggacttcggctgccgcattgcaagctagagcggcggctaccctcggcgataacccagcttggctgcacacagtcgtggcacccttagcccagcttcccgccgtatcttggcagaagatggatctcgactctctaacccaacgaatattggcacctgcccctcggcagccaaccgtagttgacgacgagaatgatgacgaagagatccaagccgagagtccttttgacgccgcgtttgccaatggcgcacgtccacacattcggcggctcatcttgcgccccgcatccatgcaacccaggcccttgggtctggaaggctgtgaactgccagacctgccaacggtacatgacctggctgagtggctcaagatgccgctggatagactggcatggctgggacctgaaaccccattgggagcagagcactatcggtacaaacttctccccaaaaggaccggcggcttacgactgttagaaatcccgaaagtcgacctaaagcaggtgcagagggccgtttatagcggactgctccagcatgtgccagtccacgaagccgcacatggctttgtgcccggcagatctgtggctactcatgctgccatgcacgccgggcaagccgttgtgatcaggttcgacctgagggattttttcggaggtataggggccgctcgagtcatggctctgtggcgtactcttggctaccccatcggggtggctagatgcctgaccgcactgtgtactcacagaactgccagaatggttgtggatcggctgcgggacgatggaggtctggactggcttggcgccaaaaggctgaggtccgcccatcttcctcagggtgcaccgacaagcccaacacttgcaaacttgtgcgcgtttggacttgacctcagattggatgggctagcgtgggcgttcggagctcgctacacgagatacgccgatgacctggtgttctccggaccggctgcactacgcccccagttcagagctctccaggcttgggtcgccgctattgcagaggatgaggggttcgccctgcaccctgccaagaaccgatgtctgcctcagcaccggcagcagcgcattaccggggtcgtggttaatgcccagcctaacacaccacgccaggactttgacaggctcaaggcatgcctgcaccagtgcgtgcatcagggtcccgctagtcagaaccacgccaatctcgtggatttccgagggcatctccagggccgtattggctgggtcgggcagtttaatgccgcacgggccgccaagctgatgggattattcgagcaaatcaggtggtga

SEQ ID NO: 12678 - RNA, 1359 nt, synthetic construct
  source 1..1359: mol_type = other RNA
atgccaccctccacccacagactgtggattgcccgcggtcttgcacacgctcttcaggcggattgtcaacagccgggtgggacggaagctcacgcgttactcgcaagagccaccagggcattgggacacaggccaccctggcttccaccagtgatcgaagccttaggagccgctgccgtgcggaggttggacttacagggcctcagcgaacggatcgctggactgcccgcatttgacgcagcctttgctccaggccaacctgcgccacgcattaggcggctaatgctaagaccgccacacatggccggtgcccccttaggactccatgaggcccccctgcccgcgttaactacacacgaggctctgggcgattggctagggcttgcccccgagagactggcatggctcgtgagtgaggcccagcactaccgcgaacctcctggtggaagacctggtgcagcccggcattatcacgcgcttctcagacccaagagacttggcgggctgagactcatcgaagccccaaaggccgagctcaaactggcccagaggcgattgctggacgggttgctcaatgccgttccggtgcacgaagccgctcagggatttgtgccgggtcgcagcgttcgagcccatgcacaggctcatgctggggcgccagttgtactgcggttcgatctgcaggatttcttccctagtgtgcctgcttcccgcgtccatgccatctggcgcaccttggggtaccctgctggagttgcacgcgccctgacagccttgtgtaccacaaggactcccgctgctgtgagagctaggctgcgggaggcaggcgctatagacggaggtggggcacaaaggctagcggctgcacacctgccccaaggagctcctacgtctcctgcgcttgccaacctgtgttgttttcgcctggatctccgtttagccggactggcagctcattggggagcccgatataccaggtacgcagacgacctggtcttctctggacccgccgtcttacgggagcggagactggctctgacatcatgggtaggcggcatttgcgcagacgaaggcttcaccctccatgccagaaaaactcgctgcatgcctcaacaccgtcagcagtgcatcactggcgtcgtcgtgaaccagcatcccaacctgccacgggatgagtttgaccgactcaaggcgtgcttgcatcgacggctcttgcacggcgccacagatgccgctgaaagggaggcactccgtggccgtattgcatgggccgcccagttgaatcctgcaaggggggagaaacttctggctctgttcgcccagatacgatggccacagcctggatcagtgcccgggtga

SEQ ID NO: 12679 - RNA, 1341 nt, synthetic construct
  source 1..1341: mol_type = other RNA
atgagatcgtggacttatagggagtggatcgctcgcgggatcgccagagccttacttgcgggcgatgaccgaagtatgcctgcactccgctcacgtgctgctcaagctctcggaggcagccccccttggctaggacactttctggggcgactcaaatccatggatgcgggaatctgggcccgcacagacttggatgcactgacatggcggctgctccgcggagaaacactgtcacgggccgtgggcgctgaagatcgaccaaggattcggaggctgatgcttgccagccccgtcatgttgcctccacccatgggcctggatgtgctgggcttacctgcactccccaccaccggcgacttggcagactggctgggacttactgtagaccggctcgattggttagccggcgagcagctagattggagggaagacgcgcgccgcgccagacattatgtactccacgcatcacctaagtccgctgggggtctgcgactgatcgagagccctaaaccagagctgaagcgtgcacagagacggctactggcgggtttgctcgaccgggtccctgtccatgaggggtgtcacggcttcgtgagaggccgtggagttcggtcccacgcccaagtacatgctggacaggcactcgtgctgcgactcgaccttcaggacttcttcccgtgtgtgagggccgctcaggttagggccgtgtggagaaccctgggataccccagggaggttgcggaggtgctgactagactttgcacgacaagagcgtgcgcagccgaccttaggcccctaagagctgccggcagactggaatggaccgccgctaaacgctacgcagccaggcatttgcctcagggggctccaaccagccccatgctggctaacttgtgtgcgtttgatctggatctcaggctggatgggttggctcaagctttcggaggtgaatacagtcgttacgccgacgacctcgcattctctttcgctcaaccacttggtggtcgccaggccgcctttcatgcatgggtggcagccattgccaaggacgagggttggtctttacacccacagaagtctcgagcaatgccggccggcgcacaacagagagtgactggcctggttgtcaacgaaaagccgcgcccagctagggtggattatgaccggctgaaggccgtgctacaccagtgcaccctgcatgggcccgccagtcagaatcacgcccaggtcgaagattttcgggcccacttgcttgggcgcattgcctggattgctcagggctccgaggcacgggctaggaaactgcaggccctgtttgagcggatagcctggacggggtga

SEQ ID NO: 12680 - RNA, 1206 nt, synthetic construct
  source 1..1206: mol_type = other RNA
atggcccagcggtgcgctgatatgcccggtgagagatggcgtcggctgaccgttagaagccttgcgacctggattgagcaggacggccactacgacgatgggtggcgtgctcacgagaaaccgcatgcccgccgttatattcttcgggaagcggccgtaatgcagcctcttccagtcggcttggagcagtgtcaggtcccatattggcctcacgtcggagcattagcagactggctaggagtgcccgcagccggtttatggagactcactcgagcacctcagtggcagaggcaagcccccctaggggagcaacattatcacgcccaacttctggccaagaggaccgggggctggagactgctcgaagttcccgctccccacctgatgccgctgcagagaagagtactcgatgacctgctggatagaatcccaccacatgaagccgcacacggatacacccgggaaaggtctgctcgtagtcacgctgccgcacataccggtcaggccgtggtgctcaaattcgatcttcaggattttttcaccaccgttcggccaagcagggtgtctgctctgtttgccaagctgggctacagtgaggaagtggctcgggcactcacagcactgtgcacgacagccacccccgagcctgtgttgcggaggatgcatgaggcggggcagctgacatgggaacagctacagagactccgcgaatcccacctgccccaaggagctccaacatcccctgccctggcaaatttgtgtgcgttccggctcgatctgcgattggacggcttagcttttgctctgggggcccgctatactcgctacgccgacgatttggtattctcaggacccactcatctcgccactgcacgcgagcgaataacggccaggataactcgaattgtcgtggaggagggattttccctgaacacacgcaaaacaaggtgtcagaaggccggtggccggcaaagcgtctgccacatcgttgtcaatgaacgacctaatctgccacgagacgagtttgataggttgaaggcaatcttacacctctgcgtgcgggacggagcctcaagacagaacagggatgctcatcctgactggcaagcgcatcttcgcgggagagtggcctgggctactcagctgaacccggctaaaggcctccgcctgaagagggtgttcgaccgcatcgactggggcgtgtga

SEQ ID NO: 12681 - RNA, 1335 nt, synthetic construct
  source 1..1335: mol_type = other RNA
atggcctccctagtgcgtctcacagcgctagctctggcccgagcgctccaagtaggacagcggactcctgacggaatggcagctaggatccgagcctgtctgggggctgaagcaagctggtgtggcccgctggtcgaaaggtgcgcagctatggccggggagaggtggagacggctgagtgtgcggagcttggccgatcttatagagcgcgaccagggcttccacttcgcctggattgcccacgagccgccctgtgtccgtaggtacctgctgcgggaagccgacagaatgaacccattacctctcggcctcgacagatgccaggtgccattttggccccatgcaggagctctcgcagcctggttgggaataggcacaggcggactgtggcgtctgactagaccctctgactggcaacggaggacccctatggtggagcagcattacaggtcacacctgcgaccgaaacggacgggtggttggcgccttctggaggtgcctgaaccttacctaatgcctctccagcgccgagtgctggatgatctgctcgatcgcattcccccacatgaagcggctcacgggtatacccgggaacggtcggtgatcgatcacgctcggcgccattgtggacaggccgtcgtactgcgctttgacctcaaggatttttttacagccgttaaggcctccagagtgcacgccttgttcacaacccttggctaccctgaagaagttgcgcgagccctgaccgccttgtgcaccgttgctactccagagccagctctgcgcagacttagagctgaggggggtatggattgggagcaggttcagcggttgagggatccccaccttccccaaggcgctcctaccagtccagccctcgcaaatctgtgcgcttttgggctggacgtgaggttagcccatctcgccacctcactcggagccaggtattcccgctatgcagacgacttggtcttaagcggccccgcccgcttgagaactgcattcgctaggattgagcgtcacgtgtctcggatcgtcatcgaggaaggatttgcactgaaccctaggaagacacgctgtactggggcaggcagaagacagacggtctgccatgttgtggtcaacgatcgacccaacctgccacgcgacgagttcgacaggctaaaagcaattttacaccagtgcgtacgagatggcccagcgacccaaaatcgggagaatcggcccgattggagggcccatcttcgtgggagagtggcttgggcaacacagctgaatgctgcaaaaggtgccagactggcgagacttttcgagaggatcgactgggccgcttga

SEQ ID NO: 12682 - RNA, 1305 nt, synthetic construct
  source 1..1305: mol_type = other RNA
atggccagggctatgcaagccggtccgagaacccctcagggcttagctgctaggatgcgggcatgtctgggctgtgcagagcacccttggatcaccgctctgagtgcccggtgcgctcgaatggcagccgaaagatggcagaggctctctgcacgggcacttgccgggctgattgaaagggacgcaggcttcgagcatgcgtggcaacaggaccccaggcctttcgtgcggagatatatcctgaggcctgggggacatttgcgcacagctccgctgggcctggataccgtggaaagacccgcctggacggacgaagctgctcttgcacagggattaggtctgagcgacgctgctttgtggcgtctgactctgccaacaccctggcagagagcggctcccctctctcagcagcactacgcttggaggtggcaactgaagcgccacggcggatggaggccgttagaggtgccagctgcctatctccgagccgctcagcgcaagttgctcaagcatctgctggatggcatcccaccccatgagaaagtgtatggttttgttagaggacgctcagtcatagatcacgcccaggtacacactggccagccagtggtcatcaagtttgatctccaggacttcttcacctccatcaaggcgtcaagagtgcatgcgttgtggaccacacttgggtatcccgagactgtggccacactgcttacccgcctgtgcactgtggcaacccccgaacctgtcctacaacggtggagacaagaaggtggggcgacgtggcaccaagtgctcagggctcgggagcctcacctacctcagggagccccaaccagtccagcactggcgaatctgtccgcctttcggttggaccttcgactggatggcctggcacaagcctacggagcccggtacagtcgctacgccgatgacgtcgtcattagcgggccaagggccttgttagcagccagaggcagactggaggctgctgttcaggggattgttgaagcagaggggttcgccctcaaccagcggaaaacacggtgcgaaactcaggcctcccgtcagacagtctgccatatcgtggtgaaccagcgccccaacgtagcccgcagcgagtttgaccgcctcaaggccatactacacggctgtcttagggaggggccctctgcccacaatcgagcaggattggccgactggcgtgcacatctccatggtcgagtagcatgggttgcccagctcaatcctgccaaagcgaaacgtctgcaggccatgcttcagcacattgattgggctctgtga

SEQ ID NO: 12683 - RNA, 1251 nt, synthetic construct
  source 1..1251: mol_type = other RNA
atgcatgcatgccttgataataaaccctcgtggtgtaagccgctcgcagaacggtgcgcacagatgcctagggaaagatggcgccgactctccgtacggaccttggcctctctcatcgaggaggacataggatttgctcatgcctggctggcccatcagaaacctggcgttaggaggtacatcctgagagtgaggcaggggatggggtcactccccttaggtctacaccgttgtcagctgccctactggccaaataccggcattcttggcccttggctgggcgtctctgctggaagcatgtggcggttgactagaccatctgcctggcaacggcgcatgcctctgggagaacagcattatcggtgtctgcttctgcccaagcgtacaggtggttggcgattgctggaagtgccccatccgtacctcatgcggctgcagagacagctcctggaccacttgctcgacaggattccagcccacgaagctgcgcatggatatgtcagagagcgctcagtggtgcaccatgcccaagctcacgcggggcaagcagtgattctgaagttcgatctgcaggacttcttcacaagtgttcgcgccagccgggtgcacgccttattccacacccttggctatcccgacagcgtcgccagagagctcacagcactgtgtaccactgctacacctgagccggtcttgaggcgcctgcaccaagagggacagctaccttggcaccgactgcagcagctccgagaaccccatttaccacagggcgcaccaagctcacccgcgttagctaacctctgtgcctttagacttgatctgcgcctagacggcctggcacacgctctggatgctcggtacacgagatacgctgatgatattgttataagcggtggaaccgggctgcgcgccagttatcagcggatcgcccaatgggtggccagaatcgcctccgaagagggctttgcattaaatttccgcaaatctaggtgccagacgatcgggagtagacagactgtatgcaatatcgtggtcaatcaacaccctaacctacttcgggaggagtttgacaggctcaaggctatccttcataactgcgtgaggcacggaccagcgtcccagaaccgtgatgcccaccctcagtggcagatgcatctgaaagggcgcttggactgggcctcccaattgaacccaggcaaggcagagaggctgcagcgactgtacgctcgtattgactggaagcagccctga

SEQ ID NO: 12684 - RNA, 1344 nt, synthetic construct
  source 1..1344: mol_type = other RNA
atgacaagcgtgagaaggttcaccgccctggccatggcaagggcgatgatggcgggtcccccaagagtcgatggactcgccgctagattgcaggcctgcctcggtcggaaggcagcttggtacagaagcctggccgagagggttgcccaacttcccggggagcattggagggcagccacaccacaagccctcaatcgactcgccgacctcgtggaggccgacgattcctttgaggcagcttggttagcccatgaacgcccccaggtgcggcactatttcctcgagttacccggtggtatgcagccccggccattgggacttgacgaactcgagctgccagattggcccgacgtccctgcactgtctagatggttggggatacctgccgcgggtttatggcgcctgactctcgcccgggagagacaaaggaaacagcctctgggacagcaacactatcgctcgcagttgctacctaagcgctccgggggattccgactgctggaagtgcctgaaccgtaccttatggcgctgcagaggaagcttctggacgctgtgctaaaccgagtcccaccgcacgaggcagcatgtgggtatactcccggccgtagtgtgctcgaccacgcaagagctcacgccggccaagctgtggtgctgaagttcgacctgcaggacttttttgctagtgtacgtcatagccgcgtccacgcgctgttcgcaacgcttggctatcccgctgccgtggcaagggctcttgctgctctttgtacagtcgccaccccagagcctgttctgcatagacggcaccaggccgggtcactgtcttggccacagttgcaacgtctgcgcgacgcccatttgccacagggtgctcctacctctgctgccctggcaaacctgtgcgcttttagactcgacctccgcctcgatggcctggcatttgccttgggagcaaggtacactcgatacgcggatgatctcgtcatttccggtggggccgaactagggggtcttgctgagagggtggaacgatgggtgggacgcatcgccttagaggagggcctggccttaaaccatcggaaaacccgatgtcaaacagccgggcgtcgccagtcagtttgcagcatcgttgtgaaccagaggccgaatctgccccgggatgaattcgatagattgaaggccgtactgcatcagtgcgtaaccgctggccctgcagcccagaatagggaaggccacgctgattggcggggccacttgcagggacgggttgcttgggctgcacagctgaatcctgccaaagcggccaaactgcagggactgctagcacagattgactgggcgcggtga

SEQ ID NO: 12685 - RNA, 1338 nt, synthetic construct
  source 1..1338: mol_type = other RNA
atgcctagcatccagcgagttactgctctggcgatcgcccgcgcgttattagccggtccacaggaaccaggagggctggcagccagggtcagactctgcctagggacaggggcctgcgactggcatggcgaactggctgccaggattgccaagttgtcggccctccattggcagtacctgaccccgcgggccttggcaagactggtggagatcgacccaggatatcagcacgcctggattagcgatgaacgccccactgctcaccggtggattctaagggaagctcaaggacctaggcccgcaccactcggacttgagaggatacaacgccccgcctggcctcatgctggtgctcttgcagcttttctcggaatgcctatcgaggggctgtggagattgacgcttcccgccgatcgccagaggagacgacccctagccgagcagcactatcggtgcaggttactggcaaaaagatccggcggcatgcggctgcttgaagttccggagccgcacttgatggcagtccagcggcgcctgttggacgcgttgctggattttgtgccaccccacgaagccgctttcggtcacgcccgtgggaggagtgtagtggaccatgctgccgcacatgctggccaggccgtagtcctgaaattcgacctgcgcgacttttactcaagtgtgcgggcctccagagtgcatgcactttttgcaaccctcggctattctgatgaagttgcccgagcactgaccgcgctcacaacagtggccaccccagaagcagttctccgacgcttacgggaggcgggttcactcacgtgggaacaactgcagcgtcttagggatccccacctgccacaaggggcgcctacttctgccgctttagctaacctctgcgccttcggcctggatctcaggctggacggactcgcctacgctctgggagccagatacaccagatatgccgacgatctcgtgcttagcggcggtcctgagcttgcccgatggagagatcggattgagagatgggtgggcagaatagctcgtgaggagggattcgcgctaaaccaccggaagactcgttgtcaaagaagcggcgctcgccagacagtgtgttctatcgtagtgaatgccaagcccaatctgcctcgtgctgaatttgatcgcttgaaggcaatcctgcacaggtgtgtcgtcgacgggcctgcagcacagaatcgcgacggcattgagaggtggcgggagcatctggcaggtcggatagcttgggccgctcagctgaacgctgccaaagcggcaaggctgcagtccctgttcgcccgaatcgactgggagcgatga

SEQ ID NO: 12686 - RNA, 1314 nt, synthetic construct
  source 1..1314: mol_type = other RNA
atgtcccacaggaccaccgctattgcaattgctcgcgccgtcctagccactcctgtctcacggtcccagatccttgagagaatggcacgctgtacaggcttttctgaggcaaccgaccgagccctcgtggacggtcttctcgaggctgggctggccagccattggactattgctcaggtggcagacgcccttggggcggatcctttcttccaggccacctgccaagagactcgccatcgcccactgatccgcggttggttcatgacacgcgcctctaccttggcagcaccgccagtgccgttaagggccgtagaacggcctgcatggccaggagttggacatctggccgatgacctgggcgtatccgccgaaggcttgtggcgcttgacaagatcggccagctggcaaagacaggctccattggccctgcagcactacaggtatgaactcctgcccaaaaggacagggggttggcgtctcctggaggtgcctgagccttacttgcgaacgctacagcggagagtgctggacaggctactggcacatgtcccccctcacgaggctgcatgcgcctatgtccgtggacggtctgtggccgaccatgccagagcccacgtcggtcaggcagtgctgcttaagtttgaccttcaagactttttcgctaccgttcgggcgagccgtgttcaggctaccttcgccaccttaggctactcacagccggtggccagagccctcgcaagactgtgcacgactgccacacctgagcccgtcttagaacgactgcggatcgaagggggactggcctggacacaagcaatgcgcctcagagatgcccacctaccccagggagcgcccactagtgctgcgttagccaacctgtgtgccttccggctcgacgtgaggatagcagctttggctcggactcttggggcccgctataccaggtacgctgacgatatagtcctcagtggggatgcaggccttttgcgggctgcggatcacgttgaagcccggctgggcgcttttgccctggatgagggctttgcactgaatcacagaaagactaggcgagtgacccgagcgaggagacagcaggtatgtaacatcgtggtgaatgctagacccaatctgccccgcgatgaattcgacaggctcaaagcccagctgcatctgtgcgcaacaagaggagctgccgctcagaaccgtgccggactgccagattgggagcaacacctcaggggcagggttgcatgggctgaaaccgtgcgagcggcatgtcgggagttttggacggcggatgctggcacaccatga

SEQ ID NO: 12687 - RNA, 1311 nt, synthetic construct
  source 1..1311: mol_type = other RNA
atggggcatgcaaggatgatgacagctagggcgttagcgcatgcaatgctggccggcgccccaagagaagaagcccttgcggcccgtatggcagcatgccttgacgccagaccaccctggctagcggacttagcacgtgccatggctcgcgttccgggggaagtttggcagcgcctcgacgtagcagctctaggagagcgcgtggaggctcacgcagggtttgccgatgcatgggtgagcgatgctcgccctgatgcgcgacggtggttgctgagaagtccggaagatctccctcccgctccagccggtttagcacgtcctcactggcctacggtgggcaccttggctagggggttgggactgactcctgccgggctgtggcgactcacattgccagctgactggcaacgaagacgccccctggcacaccagcattataggcagcaactggtgcctaagcgctctgaaggttggcggctactcgaggtcccagcccctcatctgagggctatccagcggcggcttctcgcgcagttattatccggcttgcccccgcatgacgccgcttttggatacacccctggccgatccgtggtagagcacgccatgcgtcacgccggacaagccagagtgctgcgcctcgacctgtcagatttcttcagcactgtcagggccgctagggtgcatgccctgttcagaacactcgggtattctgctgccgtcgccagggctttgactgcactttgtacaaccgctacgcccgaggcttggttaagggccgagcccagactggcctttctccagagacagcggttgcgcgacccacacttgccccaaggtgcacccacaagccctgcagttgccaatctgtgcgctttcgccctggacgcccgacttaccggcttagctgaggcctttggtgccagatactcgcgatacgctgatgatctcgtcttttcaggccccgcatccctaccagtccgcactctggtggcctgggtaaccgccatcgccgaagacgaaggcttcgccgtgaacccgaacaaaaccagggcacagggagtggcgcagagacagagtgtgtgcgggatagtagttaatgagcggccaaacctgccccgcgacgcatttgatcggctgaaggccactctgcaccggtgtgtggttgatggcccagccggacaaaatcgggagggccacgcagatttcagagcgcaccttcagggaagggtcgcatgggccgctcagctcaaccctgcgaaagctcggaagctgcaggctcttttcgaccggattgactggagggcttga

SEQ ID NO: 12688 - RNA, 1317 nt, synthetic construct
  source 1..1317: mol_type = other RNA
atggacgctgcacgaactacgaccgccagggccttggcaagagcaatgctggcgggacctcacgaagccggtggactagcagccaggatggccgcttgcttggacgccagaccaccatggttggctgctcttgccgaggccatggcaagggtgcctggcgaagtttggcgcaggcttgacgtggcaactttagcaagacgggtcgatgcccacgacggctttgcggaggcctggttctcggctgcacgtccagaggccagacgatggctgttaagagcaccagatgcacctgcaccagcccctgctggactggaaagaccagattggcctacggtaggagcgttggccagagggcttggaatgacccccgcaggcctttggcgactgactctgcccaccgattggcagagatgccggccgctcgcacaacaacactaccgccaggccctgattcctaaacgtggggaaggcgcggggtggagactccttgaggtgcctgagccccatctccgcgctgtccagaggagactgctggcacagctcctcaatggcttgcccccacatgacgccgccttcggatacgccaggggtaggtcagtggtccagcacgctgccaggcatgtcggtcagggacgggtgttacggtttgatctgggggatttcttctcaaccgttagggcggcccgcgtacacgctttgtttaaaactctgggctattccacagctgttgctagggccctgaccgcgctctgtaccactgccacacccgaggcttggctgagagctgaaccccgcctgggttggctccaacgccaacgtctacgggacccccatctcccccaaggtgcaccaacatctccggctgtggcaaacctctgcgcttttgccctggatgcacggctgacaggactggctgaacgcttcggggcccgctattctcgatacgctgacgatttagtgattagcggacctgcggccctcccagtacgtagtgtgggtgcctgggtcgctgctatcgccgaggacgaagggttcgtcgtgaacccgcgaaagacacgcagccttggcatagcccagcggcagtccgtgtgtgggattgtggtgaacgaccggcccaacctgcctcgcgatgagtttgatcggctgaaagccgtcttgcatcggtgtgttgtggacggccctgctgggcagaatcgggatggccacgctgactttcgaaggcacctgcagggcagagttgcctgggccacccagcttaatccgggcaaggccgagaagctgaaggcgctgctagacaggatcacatggcccggctga

SEQ ID NO: 12689 - RNA, 1317 nt, synthetic construct
  source 1..1317: mol_type = other RNA
atggatcacgctcgccgtatgacagctcgtgcactggcgcgggccatgttagcaggtgcgagacgcgaagacgcgcttgcagcccgtatggcagcttgtctggatgagtccccgccttggttggcgggattagccgcagccatggcacggatgcccggagaagtatggaggcgcctggacgtggatgcccttgctgctcgcgtggaagcgcatgaaggcttccttgaggcttggtgcggcgatggaagaccggaggcacgtaggtggctgttacgccctccacaggagcctggtgcagcaccagccggtctggaaagacctcactggccgaccgttggggcactagccagagggttggggatgactcccgcgggactgtggaggctgactctgccagctgattggcagagaaggaggcccctggcccgacaacactacacccagaggctgtgccctaaacgaggtgacggggcaggctggcgacttctcgaggtacccgctccccatttgcgcgccgtgcagagacgcctgttgacccagctactggacgggttaccccctcacgaggctgcgttcggctttacaagaggccggtccgtcgttcaacacgcagccagacacgtcgggcaaggtcgtgtgctccggtttgacctcgcagatttcttcagtaccgtgagagccgccagagtccacgctctgttcgccacactgggattttcaacggctgtagcccgagcactctccgccctgtgcacaacttctgcccccgaggcctggcttcgccaagaagctcggcttccatggctgcagcggcaaaggctgagggatccccatttgccacagggtgctcccacctcaccagctctggccaacctctgtgcattcgccctcgacgctaggttgagcggactggctgctgcgtttggcgccagatatagccgctacgctgatgacctcgtcatctctgggcccgccgcacttccagttagggctgtttcggcctgggtggccgccattgctgaagacgagggcttcgtggtgaacaggaggaaaactcggagtctaggtgccgcgggacgacaaagcgtttgcggcatcgtggtgaatgagcatccaaacctccctcgggacgcctttgaccgcctcaaggccatactgcaccgctgtgtcgtggatggccctgcagggcagaatagagagggtcgggccgactggcgagctcatctgcagggacgagtcgcttgggccgcccaattgaatcctgcccggggtgcaaggctcaaggccctatttgaccggattgattggcatcggtga

SEQ ID NO: 12690 - RNA, 1299 nt, synthetic construct
  source 1..1299: mol_type = other RNA
atgaccgctagggcactggctcgggcaatgctcgcaggaccacgggatgccgctgggttagctgcccgtatggcggtgtgcctgggggaaagacctccctggctagccgcgttagcccaggcaatggcgagagttcccgccgaggtttggaggcgtctggaggtcgccacacttgcggagagggtggaggcccacgaaggctttgccgctgcttgggccggagaagctcgtcctcgggctagacactggttgctgcgccctcccgatgagcttgctccagcacctgcaggcctcgagaggcctcactggccaactgtaggcgcactcgcacgcggattggggcttactccggcaggtctttggcgactcacactgcctgttgactggcaacgacggcgaccgctcgttcagcagcattacagacaagccctggtggccaaaaggggtgatggagccggctggcgactgttggaagtgcccgcaccccatcttcgcgctgtccaacgccggctgcttgctcagttgctcgacggactacccccccacgaagcagccttcggttatgccgctggccggtcggtcgtacagcatgctgcacagcatgcaggccaggcgagagtgttacggctggacctgagcgacttcttttccactgtgagggccgcccgcgttcatgctctgttcaagactctggggtactcaaccgctacagccagagcccttacagccctgtgtaccacggcagtcccggaagcatggctcaggggtgagcccagattatcctggccacagcgccaaagactgcgcgatcctcacctgccacaaggcgctcccacctcaccagcgctggctaacctgtgcgcctttggactggacgcccgtttggcaggactagcggcacggctgggtgctaggtacagccgatatgccgatgacctcgtgtttagtggcccagcctctctgccggtgcgacagatcgctgcctgggttagcgctatagcggccgatgaggggttcaccgtcaatcctagaaagaccaggagtctcggggtagcccagagacaggccgtgtgtggcattgtggtgaacgctcaccctaacctacccagggcggagttcgaccggttgaaagccacgctgcacagatgcgtcgtgaacggcccagccggggaaaatagggatgggcacgctgactggcgggcccatttgcagggaagagtggcatgggcagcccagctcaatccagctaaggccggcaaactgtcccgcttactcgcccgcatcgactggtctaggtga

SEQ ID NO: 12691 - RNA, 1293 nt, synthetic construct
  source 1..1293: mol_type = other RNA
atgacagccagagctttggcccacgcaatgctcgccggacccaggtttgaagctgctctggccgctcggatggcagtgtgcttggacgagcagccgccctggttagccggtctagctagggcaatggcccgggtacctggcgaagtttggcgacggttggacgtccagaccctgggagagagagtggaggcccacgagggtttcgcagaggcgtggttcggggaacatcgtcccgaagcccgacactggctccttcgctcccccgatgagttaccacctgcccccgcaggactcgaaagacctcactggcctactgtgggcgcgttggcaagaggccttgggatgaccccagccgggttatggcggttgacccttccacctgactggcaaagacgcagaccactggcccagcagcactacaggcagcagctgattccaaaaagaagcgctgggtggaggcttcttgaggttcctgcgccgcatctgctcgctgtgcagaggaggctgctgggccagctactgaatggattgccgccccacgccggggcttttggttatgccagaggccgctctgtggtgcaacatgccgccctccacgctggacaaggtcgcgtactgaggttcgacctgtcggatttcttctcaactgtacgcgccagtcgcgttcacgctctctttaagacgctggggtacagtgccgcagtcgctcgtgcactcacggcgttgtgtacaactagcacacccgaagcgtggctacgcgctcaagggcgactcgactggcagcagtgtcagagacttagggatgcacatctcccccagggtgcccctacatccccagctctggcaaacctgtgcgcatttgccttagatgcccggctggccggcttagccgagcaattcggcgctagatactctcgttatgctgacgatctggtcatctcaggtcctgccgctcttcccgtccaggccatcagcgcatgggtggctgcgattgcggccgatgaggggtttgtggtcaatcctcggaaaacccggtccctgggtgtggcacaacgccagagcgtttgtggcatagtcgtgaacacccatccaaacctgccacgggatgaatttgaccgcctcaaggcaactctgcatcggtgcgttgtggatggaccagcctctcagaatagggacggacatgccgactggcgagcacacctgcagggaagggtggcttgggctgcacagctgaaccccgctaaggccgagcgtctcaggaaactgctgggccggatcgactgggcgcgatga

SEQ ID NO: 12692 - RNA, 1344 nt, synthetic construct
  source 1..1344: mol_type = other RNA
atggcaaggctgtccagattgacagcccttgccctagccagggccctgttagcaggtccccatcaggcacaaggccttgcagcccggatgactaattgtctgggcttagggctcgagccacgcccatggttggaaactctggccctgcgattggctaggatgcccggcgaaagatgggcacgtctggagcccagatctctggccaccctgatagagaaagagcaagcgtttcgggatgcttgcgctagtgcggcacctccccgtccacaacggtatttgctcagaccacgcgaacacaaggctggcgcacccctaggcttagaggcctgtgatctcccggaccttccccacgttggagcactcgcggactggttagggcttcccttgggtggcttgtggcggctcagcaaaccgcgagactggcagaggcgtgagcctctctcagcccagcattacaggttccagctgatggctaaacgctcgggcgggtggagactgttagaggtgcctgaacctcaccttatgggagtccagagaaagatcctcaggggcctgctgcaacagctgcctctgcacgaggccgccatggcttatgctccgggaaggggtgtgcgagaacacgccgcactccatgctggacaggccgtgctgctgcgctacgatctctgcgacttctttgccgccgtgcaggccgcacgacttagagctctttttctcaccctgggatatccccacgaagtagcagtttccctcgccgcactctgcagcgtagctacgccagaacctgtcctgcgccgcatgcatgaggcaggacagttgacatggacccagctgcagaagctgagaggcgctcatctaccccagggtgccccaagctccgctaccctagccaacctgtgtgccttcaggctggatctgcggcttgacgggctggctcaagcgctaggggctaggtactcccgctacgcggacgacctggtgttctctggacctcagcatttgcggcaagctcaggcccgaatcagcgcatgggtcgggcgtattgccctggaggaggggttcgccctgaaccacaggaagtcacggtgtctcagtgccggaggtcgacagatggtctgcggcgtcgtggtgaatgccctccccaatctgccacgcgccgaatttgatagattgaaagctctgctgcaccaatgcgtgttgcacgggcctgcatctcagaaccggcagcagcatgctgattggccagcacaccttcggggtcgggttgcttgggctgcccagttaaaccctgccaaggcgcaacgcctccaggcactgcttgcgagggtggactggacaagatga

SEQ ID NO: 12693 - RNA, 1341 nt, synthetic construct
  source 1..1341: mol_type = other RNA
atgtatgcttctcgcctgcgtcacctggacgcccttgctctggcaagggcgctatgggcaggccctcaaacacccgcgtccctcaaggcacgcgctgaacaggctctgggagctagccctcactggctcgctgacttcattgacgagcttcccaccgtctcaggggccacttggcagaggcaggaggtagatgatctcgccgctcgaattgaacagactcgagcgtttgtgaatgcaccgcgggttccgggcttaccgtttgtccggcgctggatccttagggcatctcgcatgcgccccgcaccacttggactggatgatctggatctgccacccttgcctcattctgccgccatcgctgactggcttggaattacgctggacgacttagactggttcacccatgacagacggcccgcgttgccgcttcatgctcagcactatgccttcacactgcagcccaagagaagcggtgggggtagactcatcgagagcccacgttcacgactgaaagcgttgcagggtcgggcactgcacgagctgctcgacaaagtgcccgtacatgaggcgtgtcacggatttgtcgccggaaggagcgtgttgactcatgcccggctgcacgtaggacagcctgtggtcctacattttgacctaaagaacttcttcggccacatcctgtcgtcccaagtggccgccgttttccacacgctcggatatccacccggcgtcgcaaggcaacttgccgctctctgtaccgtgagtacacccgagcccgtgattgaacggttgagagatgacgggtgggttgattggcaggatgctagagccttacgtagagcccacttgcctcagggcgccccttcatcaccaatgctggctaatctgtctgccttccagttagatctgagattggatgggctggcacacgtcttgggggccacatacagccggtacgccgacgatctcgttctgtccggccctccatccctgaggaacagtttcgacagaatcgcagcttgggtggggaggatagccctcgaagaaggctacgctctgaatcatcgcaagacccggatggctacccaagcttccgcccaacgtgtgtgcggggtggtcgtgaacgcccacccaaatctcccaaggcgggagtttgacagactgagggcagtgctccatcgctgcgccttacacggcccagctagccagaacagggatggccacgccgactttcgagcacatctgtggggtcgcgttcagtgggctactcagctcaacgccgcaaaagcgcctcgactacatgcactgtggagtagaatcgagtggatagccagtcctgcctga

SEQ ID NO: 12694 - RNA, 1332 nt, synthetic construct
  source 1..1332: mol_type = other RNA
atgcacgcccacaggcaccgccaccttaacgcactcgcgttggcacgcgcattgtgggctggtccacaagctagaacctcacttagagctagggccacccacgccttagggcacgaacctgcttggctgacacttctgctggacgagctccagcctgtctccgaggctacatggcagcggcaatctgtcgaagatctggccgataggctcgagcggaccgatacttttgctgacgcagtgcggacaacgcccagacccttcgtgagacggtggattctgcgcgcaagtcgcatgcatccagcccccttaggactggaggggcttgggcttccgcctctccctcattccgccgcaatcgccgcatggttgggaatcaccctcgacgacctggattggtttactcatgatagacgtcatctgctccctctgcaatcccaacattacggctttactcttcagccaaaacgaagtgggggcggccgtgtgatagagtctccccgatcgaggctcaaagccctgcaggggagagttctgcatgatctgctggacaaggtcccggtgcacgaggcgtgtcacggcttcgttaccgggagatcagttctgacacatgctcggttgcataccggtcaacccgttgtcatgcacttcgacctcaaaaacttctttggcaggatcctgtcctctcaggtggccgcggtattccacactctgggttatcccagaggagtggcgcggcagcttgcagctctgtgcaccgtaagcacgcctgaaccggtgattgagcgcctgagggacgatggttgggtggattggcaagacgcccgcgccctaagacgagcacatgttccacagggcgctccttctagcccaatgttagcgaatctctgcgccttccagctggacctgcgcctcgatggactcgctcacgtgctgggagccacatatagtcggtacgctgacgacctagtcctatcaggacccgccagccttcggagtgcatttgagcgaatcgccacctgggtgggccggattgctttagaagaagggtacgccctcaatcacaggaagactcggttggctactcaggccagcgcacagagggtgtgtggcgtcgtggtcaatgagcacctgaatctgccacgtgccgaatttgatcgactaagggccgtactgcaccagtgcgcattgcacggacctgccagccagaaccgagacggccatgccgatttcagggcccatttatggggccgcgtgcagtgggcgacacagttgaaccccgcaaaggctgaacgcttgcaggcccgttggcagagaatagactgggctccatga

SEQ ID NO: 12695 - RNA, 1065 nt, synthetic construct
  source 1..1065: mol_type = other RNA
ccactcggcctgcacgatctgcttttaccagagctggatcacacagaggcactcgcccagtggctcggggtgtctctggaaacactcagatggttcacggcctgccctccgagacgaaggcatgctgatctgcagagacaacattatgcctttcgactattacccaagcgctccggagggggacgtctaattgaggctccccgctcacgccttaaggccctccaaagaagaatcctggacggcttgctcgacgccgtacctgttcatgaggcctgtcacggcttcaccagggacaggagcgtgttgacacatgcgcgagtccacgtgggtcagcctgttgtgatccggttcgatctgatgaactttttcgcctccatcacggcggcacaggttagggctacttttcagacattgggttacccagcaggtgtggcccaggacctgacagcgctgtgcactttgctgacccccgaacccgtcatagctcgtttacaggacgatggctggcttgattggcaccaagcccgctgtctgcggagtcctcacttagctcagggggctccgtcctctccaatactggcaaatttgtgcgccttccagctggatctgcgactggccggacttgccgatactatgggtgcccggtacagtcggtatgccgatgacctggtcttcagcggaccagcgtcagtaggcagttcctttgacagactggctgcatgggtcggccgtattgcactcgaagaaggctacaccgtgaaccatcggaaaacctggttggcatctcaggccacccagcaaagggtctgcggagtggtggttaatcagcatcctaacctgcctagggaggcgtttgaccgcctgagggccctactacaccagtgtgcaactcacgggcccgcaagccaatcggacagagctctcgatgaatttcgcctgcacgtgcttgggcggatgacctgggccgagcagatcaatccctcaaaagctcgccggcttagaaagctcttcgacaggattgtgtgggacgctgctccagcacaagagctcccccagagcggatga

SEQ ID NO: 12696 - RNA, 1317 nt, synthetic construct
  source 1..1317: mol_type = other RNA
atgaccagggaccgcagaactggcagcagactcgaactgctggctctggcctgcctggaactgtggcaggatgttgtgtcagcaggctggccccccagtgatactctgctgacagccctggaacgcgtctttgatgacgtgcctgccccccttagaactgctgctagagccgtgacgcccgcagatctaggtctgccaccgactgcaggcgtcgcagatgcagaggccgtagcagcccggttaggtgccctcttggacccagaggcccaggagctcttggcacgattacctgtgcggcgggtgcctctgcctcctcttagcaacgacgctcgcgtgttagcccccgctgatgtggcccaaagactggggttgaggtgggacgagctcatgtggctggctgacccacaggagagattacgcaggggtgcccccgagcaagggcattaccgctacgtgagagtgccaaaacgtcgggggggggagagacttctggaatgcccccggccacgtctcctatctgtccagagggccgtgttgaggagatttctggagcccttggtgccgcatgacgcagcaatggggttccgccctggcgttgggtttgttgatcatgctgcgttgcacgctggccaggctgtggtcctgcgactcgacctcgcgtcgtttttccaaacagtacggagggccctcgtcgtacgcgcattgatgcacggcgggctagcccgacctacagctcagctgctgggagcgattgcaacccatgttacccacccatccgctctgcgcggagttagcgagtctgaacgcgcgcgtcttcggagtccccatctcccacagggtgctcctacatccccggccctagctaatctcgtctgccggcggcttgacgccagactgacaggacttgcggcctcagtaggagcccggtatagcaggtatgctgacgaccttgtgctgtctggcggcggccaccttgctagagatgccgaacgcctggtgaccaccgtgggagctattgccatcgagtgtggcttcaccctcaacatgaggaagacgcgcgtcatgagggcatcccagcgtcagcagttggggggtgtcgtcatcaatgcaggcccaagtcttcctcgtcacgaactggagcggttagaagccactctcaccaactgtgtgcgacacggagtggccggacaaaatcgggcgggcgttcccgatttcagggctcacctgcaggggagagtagcctgggctcgagcactgcgaccatcaaggggagatgccctggccaggatattcgagcagatcgactggtccacatga

SEQ ID NO: 12697 - RNA, 1290 nt, synthetic construct
  source 1..1290: mol_type = other RNA
atggctctccgcctggaagccctggctctctcagctgttgagcagcacgcctcccgggaagacggcagtacactggccgatgcccttgatcacattgcgactgatgcatctccccgcttaaggcgtgcgtgccgcagagttcccctctctgcactgtcagctgagctggcccatcctcctgttgatcttgaccggctgatgcgggccattggtgcccgattgagcacacgggctcgcagcgaacttgccaccctgcgagtcagaaggtttcccttagtgagtttgggggacccagcccagcctttcccgtccttcggtccaagcggcctggacacccggttaggcttgagctctactgagttacattggctcgcagatcctcaatgtcggagagacagactgactgtgaccgaatcccactaccggtatgtggttgtgcccaagaggcggcacggggtgagacttcttgaatgccccttgcctcgcctgaggagagcgcagagggcactcttggatgaggttctggcccctctgccagtacacccctgtgctgccggattcaggcgaggaatggggtttgtcgagcacgcagcaaggcacgccggtcaggacgtagtgctccgtgtcgatctccgggatttctttccgagtatccatagaggcatggtggtccgagcccttgtggatggcggcactccactcgctaccgctcatctagctgcagccctggcaacgcatactacacatcgggacgtcgcaaggcggtttgacggaagcacaagggctaggctgcgatctgcccacctaccccagggtgctccatctagtcccgccctcgccaatttggtgtgccgacgtctggatgcaagactgcacggactagcggagtccctgggagcaacctatagccgctacgctgacgacctcgttttctccgggccgagacaccttctggatgacgccgcccgcatcgtctcactagtagggcgcattgctagctcttgtggcttcgctctgaggccagagaagaccagagtcatgtcagcggctcagaggcaatcgttgggcggggtggtagtgaatacccgacccacgctggccagacctgaactcgagcgcctggaagcaatactgacaaactgcgtgcgccatgggccagccggtcaaaaccgtgctgacgtggcagactttgcgtcccacttacgtggcagagtggcctgggtggagcagctgcatcctgcacggggagccaaacttcgcaacctctacgctcagatcgcctggggatga

SEQ ID NO: 12698 - RNA, 1338 nt, synthetic construct
  source 1..1338: mol_type = other RNA
atgaacgcgagcagacccctctggcggcatcgactcgctcgagcactagccgccgcatttctgtgcggtccgtggaggcacgctgaactcgtggctaggggagcggcctgcttaggtgaaaaaccgccttggctgcctattgcagcgcgctggacaagacacgcattcccctccccccccgcttctattgagccagtcgtagagcgactgctccgccttccctcctttcagcttgccactacaggccgtcccccaacccctaaatggcggaaggcattcctttatgttccccctgatcccgttgcccgcttcgccgtacctcctttgccgtctgacggggcattggctcgatggcttgcaatcccagaaccccttctggcttggctggcggatgttagggggctgaatcggaggactgctgaagccagactgcacaattaccatcccagatggctccctaaggctcacggcggggtcagactcctggaggaaccaaaacccctgttgaaacaggcccagcgccgtatcttggccggcctactggctcatctcccgccacacgcggctgcacaggctttctgctccggaagaagcgtgcacagtcacgccgccttacacgccggacaagctgtggtgatacggatcgacctggccgactttttcggaagcatcggccgtgccagagtacgggccctgtttgaggcagctggctatccacgacctgtggcgcgatctctagccggcctttgtacaactgccacgccaccactagtggttgcccgcttaccccggccagttgatgccgcagaggtgccttacgcagcctcgcagcgacggcatcttctggcacctcaccttccacaaggagccccaacaagtcccgctattgccaatttgtgtgcctgggaactggacgtcagactcactgcactggcaaccaccttcggcgctcgctactcacgttatgccgatgatctgacgttttcaggaggtcctgaggtggcgaggagggctggtcacctggttgaactggccatgttcgcggcttacgcttgtggctttgccgtccggcacggcaagaccagagtggtgaggagcggagccagacaggtcgtgaccgggttggtggtcaacgagaggccgcatgtcgcaagggccgagagggatcagctcaaggccatactgcacaactgcgtgagacatgggcccgccgggcaaaatcgcgagaaccatccagactttcgcgctcatctgttgggacgcttaggctgggtggctgcaggggaccctaggcatggtgcaaagctgcgggctctcttcgaccggatcgcctggtga

SEQ ID NO: 12699 - RNA, 1005 nt, synthetic construct
  source 1..1005: mol_type = other RNA
gacgctggtgtcccacctctgccaacccctggagatctggccgcttggctcggactgaccacagatcgggtcgactggctggccgataggcttcggccagaggaacgtcctgcagcaggggcagtgcactatcaccaccggtggaaaggcagacgactgattgaggcgcccaagaggactttgcgatctgtgcagagaaggatcctggacggcattctcgccgatgtcccacctcatccagcggcagtggcgttcaggccaggagtctccgtcgtagacggcgcagctcgtcacgtcggacagccaatggtggtgcgatttgatttgagagattttttcgcctcagttcggcgcgctagagtacgcgctatcttcgctcgcctaggttaccccgacccggttgccgatctgctggccaaccttacaacccatgccacccctgccgctgtgttcgatgccgtcgctccccgtgacgcagaagcccatagggctcacgtggaaaggcgccgcaggtttgccgaacgtcatcttcctcaaggggcgccgagtagccccgctttggctaatctcagcgtgtacggtctggactgccggttagcagcactggcccgcacgttgggggcaacttacacacggtatgccgatgaccttgtgctgtccggcgactttgctcccaaccccgtcgtgcgcctcgtagaccgaatcgtgcggtctgaggggtttgcgctgaacgccgccaaaacccgagtgatggccgcgtcccagcggcaaagagtgactggagtggttgttaatgctcgccctaacgtggccagggccgatttcgacaggctcaaggctgtattaacaaattgtgccagacacggcgcagccagccagaatagagatgctcaccccgcctggcaggcacatttggaggggagggtggcctgggttgcctcagttcaccccgagagaggcgctcggctaagagcactcctggcccagatagactggagtgcatga

SEQ ID NO: 12700 - RNA, 1254 nt, synthetic construct
  source 1..1254: mol_type = other RNA
atggacgcagacaccctcgctgacgcctggctaagtggcgactggactttggccggcatgcgatctagaacccagcgtcttatccatcccgacaggctttccaagagcctggcctctatgattttaggcttttggctggagctaagggatcggccgcacgaacggcgaagggcaactctggccgctgctattaccgctcatagagccttctttcgcatcgcccgaaccaacacgtatgggacagttctggacgcacctaaaatggtgcccccaccgagagcttgggatgtactgccactggatacacctgccacagcaggagcgtggttggggctcacggcaacagatgcgacctggctgactgatccaaggggaatcgccagacattacgacagatactggagtgggacaaggcttatcgaagccccccgacgtcgcttaaaggctgcccaacggcgcatcgctgccgaactcctggctgcaattcctccccacgaggctgcacacggatttcgcagaggaagatcagtcttgagcgcggtacacccacatgctggcagagaggtgttagttgtggccgacctcaccgccttttttccctccgtgcgggtgtctcgagttcacgcaatgttccagcgcgtcggctatcctgaagaggtcgcccggttcctgacccggatgtgcactacaagatgccggactctgcccaaagccgaacacgaggttacgcctggccaggctcagctgtatcgggcgagacatctgcctcaaggggcccctacatcccctgcacttgccaatctctgcgcttttcacctcgacgctcggctggctggattcgcctcgtcactagggggcacctacacccgctacgctgatgatctcattttctcaggtcccgcggtgcttggtaggggtggattcctggcaactgtgtccactatagccgtggagcagggcttccgcttgaacacagcgaagagccgggtcatgcgccgttctcagtgtcagctggtcttaggcatggtcgtgaacgaggcaccaaccctcccaagggcccagctggaactcctggaagccgagctgttccgttgtgcaaggcgcggtcccccggtacatcaccagcatggggttgcctggcttcgagatcatttggcgggaagggtggcctgggctaaacacgtgaatccaaggagagcacaaaggctggtggagttgctcgccgccatagactggagtggggcacacagctga

SEQ ID NO: 12701 - RNA, 1293 nt, synthetic construct
  source 1..1293: mol_type = other RNA
atgccaccagtcaacaaattgaatttcttctcaaagcaccttgccatgtggctgagccaggccgactggcatttcgtaactcttctgtctactgctattgaatgtgtcgatgaactgccggacgactgtgattcactcatcaacgagttactcctgcgatatcctgaaaagccgtctgagccggccttagccggtcaccttcagtcgtcataccggctgagttcctggttcaaaaggggccagtccgcacccaagatcatgagatttaaccttgatagccccacctttatagaaagggacaaccgggagtatcctagaattgacacaccaggagatctggctgactggctgaaaatcactccctcacaactcgagtggttcagtaattgctggaggttcgacagcaacactcctcggtacctacaacactaccagtaccagctaatggaaaagagagatggtaggatgaggctcatcgagaaacccaaaacaaccctgaaacgactacagcggaagatatatcaggagatactctctacgttagaaacacatcctgccgtgcacggctttcgcaaggacagaaactgcattagccatgcgtccgttcataccggcaagaagtaccttctgatgtttgacattacagattgttttcagtccattcactggcccatggtcaaagtggtgtttaaacggatggggtacccagatgccgtgtccatcctgctgacagccttatgcacccacagtgttagattgaagcctgcacagttgaaactgttcgataccgcgcagaggaaccgacttagacagagacacctaccacaaggagcccctacgtctcccgcgttgacgaatgctgccctgcataggctggatatccgactgaccggcctggcccatcactttggtctggactactcccgctacgctgatgatctcgctatgagcggcaatacacatcgggactggcggttccttgagccactgatcgggggaatttgcctcgacgaaggggttaccttgaattataagaagactcgcattaagaagagccaccagaagcagcgtgtggtcgggatagtggtgaacagtaagactaacatcgatcgtaattactttgacaccctcaaagcaatcctgacaaattgtaccaaatacgggctcgacagccaaaatcgttatcgccacccccacttcagagcacatttgctgggacgcatccaatatgtaaaatctttgaatgagaggcgcggcgctaagctcgagaagctgtatcaggcaattaactga

SEQ ID NO: 12702 - RNA, 1284 nt, synthetic construct
  source 1..1284: mol_type = other RNA
atgaacaccaaaggatttttctgtcggcatttggctatctggttctacgaagaaacctggcacttcaccaccctccttgccatctttatagacgtggtggagaacctcccgagtgatgctgatctgctggtgcacgagactctgctagaattccccgacaagacaagtgccgaaaacatcgctgcctttctctctcgttcccagcgggttttgcattggttttcagacggcgccgataaacccgccattataaggatcaacttacagcagtctcctgtagttaagctcgtgaacagcaagctccccgaactgaattctataggcgacctcgccgggtggctgggaatctctatcggccaactggactggctggccgacctcaagcgatatgattccagccgtccagaaagatttaaccactatcactaccgaacaactgagaagcgggatggtaggttacgcctgatcgagagcccaaaacgcctgctgaagtccattcagcgccaaatttccgatgatatcctgatttacgcgcctgtgcacaatgctgctcatgggttctgcaaaggtaggaactgccaatcacatgcctccaaccacattggaaagaattacctgtttctgttcgacttggcgcattgcttccagagcgtgcactggctgcaggtttttcgcgtatttacgcaactggggtatacgcggactattgcaagatatctgacatccctggcaacacacagggcatacagtaatcacgttttactagaccgtcttgatgtggaccagcgaatccgccttcgacagagacatctcccacagggcgcacctagttcgccagcccttagcaatgctgtcctctctagattggataaacggctaaacgggctggccaaaagccttcggctggactattctagatacgcggacgatctcgccttttcaggaaacgagcacagggactggcggttccttgagtccctggtcggcgctatatgtaacgaagagggcttcgcattgaattacaggaagacaagacttgtgcgccctggtcagaggcagaagattactggcgtggtcgtcaatcaaaagaccaatattgaccgccgatattacgattcattgaaagcagtcctgactaattgtctaagaaacgacttagacagccagaatagattcaatcattcagatttcagggctcacctgagggggcggatccagcatgtgaagagtctcaacgagagcaaaggaaccaaattggagaagatcttcgagcagtttccctga

SEQ ID NO: 12703 - RNA, 1293 nt, synthetic construct
  source 1..1293: mol_type = other RNA
atgaacaagaaaattcggttctgtcgccaacttgcagagtggttcctggtgtccgattggcactacagtacattactggccgtgtttattgatgtggccgatgaactgcccggagacgcagacgaccttgtctctgaattgctggctgaatttgacacgaaaccagagctgaaccctatcgtggactatctgatgcagtccctgaggcttggctgctggttctacgacgatcacggccccagggtggttccagtctgcttaattaacagtcagctcagcagactgtctaatgatgcactacccgtgctcaataccgagtctgacgtcgccaattggcttaacgttagtattcaggagctgacctggctggcggaactgtatcgtctggaccccacgagccctagctacttcaagcactaccactattccatcgctaagaagaggaacggttcgcccagactcatcgagtctccaaagtcaaggcttcgggctatccagaggaaggtgtactccgagattttggaccatgcagtgatccatgattccgctcatggattcctgaagggcaaaggatgcaagacccacgccagccagcacagtgggaaggatatcctctttactttcgatttgtcacattacttccattctatacgttggccgaatgtatatgccatcttctccggactagggtatactaattcggtgtcaaagattctcaccgcccttactactcatcgctgttacatgaaggatcggtgcttgggtgagctcgatacagatcacagaagtctcctccgagaacgacacctacctcagggagcccctacaagcccgagcctttcaaacgcagtactctattttttggactgtcgcttatccggactggccgcctccctgaacatgaaatactcacggtatgctgacgatctcgctttttcaggcgataccgggcgcgactggagatttttagagcctttggtcgggtctatctgtctggaacaagggtttaggctgaaccaccggaaaacacgcattatgaagagccaccagaagcagcggctgaccggcgtagttgtcaatacaaaaccaaatgttgacagaaaacactacgaccgactgaaagcaaccctcactaactgcctgagacatggcctagagtctcagaacagagacaatcatccagacttctttgcctatctggaaggcagcatagcgcatgtgggccacttgaatagcgctcgcgggaaaaccctgaaagccatgtacgatagggtgatagcgacacaaggttga

SEQ ID NO: 12704 - RNA, 1275 nt, synthetic construct
  source 1..1275: mol_type = other RNA
atgattcagacgtttaccagagagcttgcccagtgcctgtatcactccgagtggcactttaccaccctcctggctgcatgcattcagaggatagacaatcttcccgacgatattgacggcttcatctctcagctgcttaacgtgtacaatgaaaagcctgccctggagctcctggctggatttttggagcagtctcgctgggttcgaagctggtttgtggtgccagccagagcaccgcgattccgtatctataacctggaacccgtctcgggcactacaagagccgaactccctcctttagattcaccagccggtcttagcctctggcttgggttaagtccaggccacttggattggatcgcaggcctcaagagggtggatgcgtctaggccacgccgtctggataattaccactactccctcctgcggaagcgccatacaggcagccggctgatcgaatcccctaaaactatcctgaaggctgtgcagcggagaatcctaaacagaattctgtgtcacgctcccgtacacagggccgctatggggttcagaaaaggatgctcaagtctcgaccatgccaggttgcattgtcggaaacgctacgtgttttgttttgacctcgagaattatttccagtcaattcagtggctacctgtgtggcgcgtttttcgcacgctcggctatcccaagaagacagcaaattacctttccgccctgtgtactcatgcctgcccccctggagccctggctagatttggtttgggggaccattataaccgactgctgagggagcgccacttaccccaaggggcaccaaccagcccagcattgagcaacgcgatcatgctcggcctagacagacggctgagtggtttggcccggcgacttgagttggattattcaaggtacgcggacgatctcgtgctttctgggaacggaaaaaggaattgggacttcctggcccccttagtcggctctatttgcctggatgagggattcagcctgaaccacaggaagaccagacgtctcacaaggtcgcaatcccaaaaggtggtcggggtcgtcgtgaacgaaaaaattaacatagaccgccggtactatgatgatctgaaggcaaccctattcaattgtgttcgattcggaccggacagccaaaatcggggccagcacaaagatttttgcgctcatctgctggggaaaatccattacgtagcttccgttaacactagtaaaggtcagaagctgctgcagttattcgaccggatagcgttctga

SEQ ID NO: 12705 - RNA, 1335 nt, synthetic construct
  source 1..1335: mol_type = other RNA
atgcggtatgatcggtggctggccgctagactggcagatgcctaccagagcggggcacccatagccagagagatgcaacagcgagccgccatggcattaggcgagcagccagcttggcttgcaccactcaccaggaggatgtggcggagattccagcaggtgtgggaaaccacgtctgcacatactctgacagaagctatcctagccgacaggggattccaaaggggcctggccttatcatctaggcccattcaggtacggcgaatctttcttcctccacctcaggagttggctccagactccctggccgcacgttatagactgcccgcacttcgatgcgccggagacttaatgcactggttgcggctcactccggaagacctggattggttgacacaagccagaggcgcacccagtggtgccagttccgctttgggccactacatttaccgatggcttgataagccaagaggcggagctcgtttgctggaggcccccaagccttggctcaagaccatccaacgacggatccatcaggagattctggcccctctgccactgcatgaggctgtgcacgggtttcgcgcccagcgaagcagcttaacacacgcaaggattcacattggccaaaccctcctcctgaaatttgatctgaaagatttctttccctctgtgtcctatgcccagatttatcgtgccttccgcaggctggggtacgggcatcaagtggcccggttgctaagcaagctgtgttcccacgtaactcctgacgagatcctgcgccagccgcttgcaggctacctggagagggggaatgaactcttcagaagggcgcatctgccacagggtgctcccacctctcccgctttggctaacctagctgcggcgcacctcgatcggagactcagtgctcttgcagactcaatgggcagacggtactcgaggtacgccgacgatgtggtcctttcagggccccgcatgtcaccaggagcgatcgctcgcctccaggctctagttggcgccatcgcactggaagagggatttgtcttaaatacaagaaagtccgcagtgatcggtcagggagcccgccaacaggttggtgggctggtcgtgaatgccaaggccaacattcctaggaaagactacgacgaattgaaagccgtgctgcataactgcctccgcttcggacctgacggccagaatcgccagggacacggtgattgggctgctcacctccgcgggaaaatagcgtatatggccggaataaacccggagaagggccggaaactgctggcgctctatcagcgtatcgtctggcctcaggaaagcgtttga

SEQ ID NO: 12706 - RNA, 1335 nt, synthetic construct
  source 1..1335: mol_type = other RNA
atgagatatgataggtggcttgccgcccgccttgccgatgcttaccagtccggagccccgaccgttcgagaaatgcaacagcgcgccgtggtaactctcggtgaacagcccacatggttagcgtccctcacgaggcgcatgtggcggagatttcagcagggttgggaaggtgcaagcgcctacgcactgagtgaggctatactggcagaccgtggcttccagcagggacttgctgtcagcgccaggcccgttcaggtacggcatatctttctccctccaccgcgagctctccctcctgacagtctcgcctcccagtacggactccctgcgttgagatgcgcaggtgatttgatgcattggctaaggctgacacccgaggacctggactggttaacccaggcaaggggagcaccccggaaagctgcaagtgccctgggacattatacctatcggtggctggacaagcctagaggtggggcacgcctgcttgaagctccaaaagtgtggctgaagggaatccagcggagaatctatcaggagattctggcgcccttgccactgcacgaggccgttcatggcttccgcgctcagcgttcatccttgactcacgcccgggtgcacgttggacaagcgctgctgctcaaattcgacctgaaagacttttttccctccgtggggtatccccaggtctatcgcgtattgaggagactgggctacggtcacgaggtcactagactgctcagccgcctgtgtacccaagtgacaccaaatgaaatattacgatcgccagcagctcggcacctagaaagaggcgaggagctattccgtagggcccatttgcctcagggcgctccaacaagcccagccttggccaatctcgtggctgcgcacttagataggagactgtcagccctggccgattctatgggccgccggtattcaaggtacgctgacgactttgtgttatctggggctctgatgagcccgggcgctattgagcgactccaggcactagtcggagctattgcccttgaagaagggttcgtgcttaacacccgaaaatctgcggtcatcggccagggcgcacgacaacaagttgggggggtcgtggtgaatgctaaggccaacatctctcgcaaggactacgatgagctgaaggcagtgctccacaactgcctgcgtttcggccccgatggccaaaatagacaaggccacggggattgggcagcccatctgagggggaagatcgcctacgtggccgggattaaccctcagaaaggacggaagcttctggccctctaccagcggattatctggcctcaggagtcagcctga

SEQ ID NO: 12707 - RNA, 1338 nt, synthetic construct
  source 1..1338: mol_type = other RNA
atgaactatcagagatgggtcgctacgtcactggcagaaactctcctctcaggtcctagggacgtcgccagccagagacaacggctgaccaaagtgctgggagaagagcccgagtggctctccccattagtggccttgggtcggtccccagatttcgttaagggcgaggactctgagactctgaagcggcaactgaccgaggcaatcttggattgcgaagacttccttctcgctttcgtcgaagaagatactacaccccgcatacgccacatcaagtgtcagacattacccccaacatttccgagtaactgcccggtcgaagtttgtaatttacctaaactggccaccgaaggagacttgctggcttggttgcacttatcgcaccatgaccttctgtggttgatcaacgagtacagggaagagtttggccaggacagccgactccagcattaccattacagatggctggagaagccacgaggaggcgcacgacttctggagagcccaaaacctcttctgaagtctctccagagaaggattcacagggaaattctgagtcccctgccactccattcaggcgtacagggctataggcagggacactcctgtctcactcacgctcggctccatcagggccagagcctgctgctgaaattcgatctgaaggatttctttctgagtatcgggtaccagcaggtttacaggatctttaggagactgggatataaccaccgggtcacccagatcctgtccagattgtctactaataaaacaccccgagccaagcttagaccaccacccggcattatgacagaacgcgatatccaattgttcagacggcctcatttacctcagggggctccgacctcccccattctgtcgaaccttgctgcggcgatgctagacaatcgcctcagtggacttgccaaaaagatgggctatcgttacagccgttacgcagacgacttcgtgctctcagggcctgggatgtctcaacacgccgccgagaaattgcagcacctagtgggggccatcgctgaggaggaggggttcagcctgaatacccggaagtccgcggtggtgggacaaggtcaacgccagcaagtggcaggcatagtagtgaatgagaagacgaacctctctcgcaaacagtttgattctctcaaggcaatgctgaataactgcgccaggcatggtcccatttcccaaaatcatcagcaacttcccaactttcaggctcacctgaaggggaaaattgcctatctacgtagcctgaatcctcagaagggcgataaactgatgaccctatatcagaagatacagtggcctgaccagtga

SEQ ID NO: 12708 - RNA, 1323 nt, synthetic construct
  source 1..1323: mol_type = other RNA
atgaattataagcggtgggtggcatcatgtctcgctgacgctttcataataggcccccgggattctagtgctatcctgcttcggtggtcaaaagtgttgggggagcagcctgagtggctcaggagattgtctaaagagattctcagtccagaaactgcacaccacgaaaacctgaatttcagcatggtcctggagagaatccaggcttccgaggactttgacgaagcgtttagtgagagcgaccagcctccacgcgttcgatacgtatacctgccagaggccgagtatagcttctctgctgaacagcatgagctgccgaagctggcggggatctccgatgttctaaattggctcaacttgactgttaatgaccttgaatggttgtgtgggaattacagaaatgcacccggcgcttccagtaagctggcccattaccattataggtggctggaaaaaagaagaggcgggagccgccttttggagtctccgaagcctctgctgaaaagcatccagcagaagattctgcacgacattttaagtgccgtgcctcagcatcccgctgtccacggtttccgagccggccattcctgcgtgtcgcatgccagacaacacctggaacaacctttattgctgaaattcgatctcaaggatttcttcgcctccatccactatcccatggtcttccaggtatacagaaagctcggttaccctccaacggtgtgccgaatacttacaaagttatctactaacgtctcaccagtgaaaatcctcaaatccaggcccgacacctgcattgacaaggacgacaactattttaggcgtccccaccttcctcaaggtgccccgacctcaccagccctaagcaatctggccgcgtcgaaactggataaaaggctgacagggctggcagataccatgggatttaggtactccaggtatgcagatgaccttgtgtttagcggacctcggctcaaacgcggaagcattgataaacttcaatctctagtgggcgccatagtcctcgaagagggctttttattgaatacacgcaagtccgctgttgtgggacaggcgcagcgccaacaagtgaccgggattgtcgtaaaccggaaggccaacatttctcggcagcagtttgatcagatgaaggcaattctgcaccactgtatccaccagggtccacaccatcagaaccgtgaccaggtgcccgattttcaggcacatctcaagggcaaaatcagctacatgcagtcaatcaacccccagcgcggaaacaagctgatgaagctgttccaacaaatccagtggcagaacgccgattga

SEQ ID NO: 12709 - RNA, 1284 nt, synthetic construct
  source 1..1284: mol_type = other RNA
atgaatgcacatcgctactttgcttatactttagcccggatctgtctgcagagcagctgggagcgagaaccaatggccgaggccgtggagctgtcactacagggtcagggcccgtgggtcaatagcctgattaggcaggttttgcatcgtttccccagaaggcctgggctgccggcactgttcgattttttgcggcagtccgagggcctagccgcaatcaggctccggtaccagccgaggatctgcaggtatcctcttaccctccctcacgtggtgctcccatcttcattgccccctttagacagcgtgggcgcactgtgtgaatggctccggttggcacccgctgacctggattggttcgcggataggtcaaacagagcggccgggcacgcagctcctaaagtgcgacactaccacgtgactacgataccaaagcggcaaggtggcatgagactgctcgaggtacccaagtcaagattgaagcagatccagcggcgcattcatgacgatatccttctgcaactccccctgcacccagcagctcaagggttcgtccgaggacgatctccagttgcgcacgcgggccttcacgttggacaagccgtggtgcttcgctttgatctgcgggattgcttcctacatgtccacggcggacgagtgtttcaggccttccgcgccttagggtttcccgaggacgtctcccgccttctcatgggcctgtgtacacatcgcctcccacagtggctatccacacagcttcccttagacgaagttcagcgccagaaagctaggcagaaccacctgcctcaaggagcccctagttcccccctgctgagccattttgccctcagaggggtcgacgtgcgactcagcgcttacgctagtgcactgggtgccaattattccagatacgccgacgatctggtcctgtcgggcggtgagcatctcagacacagtttcagggccattgaagcgagggtgggcgccatcgtggcagaagagggattcgccttgaattttcgtaagagtcgctgcgtctctgctgcacagcgccagcaagtaaccggggtagtggtaaatcgtcagctgaacgtgccaagagtgcagtttgatgccttgaaggctgagcttcataactgcgtgcaacagggctgggtttctcagaggcctacccacgtcgccgactatcgggctcacctgcttggacggattggttgggttatgcaggtcaacccccaaagaggggctaaactgagaggactgttcgaacgtatagactggtga

SEQ ID NO: 12710 - RNA, 1395 nt, synthetic construct
  source 1..1395: mol_type = other RNA
atgtatggcggcgctcgctgtgcacggaaatacacacaaaaccaaaggctggtgctggaaccactgattctgaatgacatggacgcacactataagaagctgcttatcaggcaactcgctagggcagttcttataggcgagcattcccctgccggtattacgagaagcatcactcattgtctaggtataggtacagagcaggcacgcgctttggccgtggagatttccgccgaacatctgtttagagcctacccgcaccatgctgaattattccttcgtacaacactgcaggaaagcaccactttaaccgcaatttttgcgggacgggatctgagggttatcaactggccccttgccgctctgcagagtcagcagaatccacccgctaagtacctgtggcaactaccagtgataaagagtgcagagcaactggctgacttcttggacgtgcagctgaatgatctttattggttcgcacaacggttcgccaagcccaattcctcttttaagcagcagcactactactatcgctttatcactaagtctgacacctcactccgtttactggaaataccgaaatcacgcctccggtgcttgcagcgaactattctcaaaaaagtcctgcagccaatgcccgttcacgaggccgcccatgggtttgtgaaaaacaagaactgtgcatcttttgcggagccacatgtagccaagtccctgatcgtcagcatggatctcgagaattacttcctccacattcctgtcgcccggattacccgtctgttccaagtcgctggatacccagttgacgtagctagcttgctggctgggctctgcactcaccgaacacctaatcaaataatcgcaaacacccccggatctcacagtaaatatctgcacattaggcatttgcctcagggcgctcctaccagcccaatgttggccaacttagccagcttctggctggacgtgcgcctcaacgcgttggcgaaaacgatgggatatcactatacaagatacgcagatgacctggcattctcgtgcgattccgataaccataaccccaaaaggctgatccgctccgtgagtgatatcattcaggccgaagggtttcggctcaatcaccagaagacccgagtgcagaaacctggccagcgacagtgtctggcggggctagtagtcaatgagaagctcaccatccccagaaacatcgtgaagaggttgcaggccgaactttacaactgcgtgcagcacggccccgaaagccagaatagacttaacaaggccgattacaaatcacacctggctggaagaatcgcccaggtggccggggtgtcaaatgtcaaagccgagaagctattcgccctctttgaccagatctcttggcctcaggagagatga

SEQ ID NO: 12711 - RNA, 1299 nt, synthetic construct
  source 1..1299: mol_type = other RNA
atgaactaccgcaagctgctgatccgacagctggccctgtccctgttggaaggcgcccatcaccccgtcggattggctaactccatcgccggttgcgtaaacctcactcttcgcgatgccctccccctagccgaagaactggctcggaacttagattggggcagtctcactgttatgcagctggagcagtggcttgaagcatccgagaggctcgccgtgctgtatcgcagccagagactcagggtcgttaaatggcctttgacagcgatacctgcaccacagagagcagccttaggttccgcctggggccttcctccattccataatacagaccatctggcgcagtggtgcggattaagcccaggcgatctcaactggtactctcagcgataccctaatcagaggcccgacgcccggaaactgcagcactaccactaccaaccccggcacaagtctgatggtagtcaacgaattctggagacacctaaatcacgcttgaaatcactgcagagaaagttgaatcacgacttactcaacaaggtaccggtgcacgacgccgcacatggtttcgtggcgggacggtccgtcaaaagcttctctcggctgcacgtggaccgaccagtcgtgctggcaatggacctcaagcatttttttctttcgatagcacctggccggcttgtgaggctattccaacgtctgggatacgacctcgctgtgagtaaggcccttattggcttgtgcctaaaccagaccccagaggctgtgttaagcccaattcattgtctcgccacaaggcagaggtatagacaaccccatctcccccagggggcacctacctcaccggttcttgccaatctgatggcatttaggctcgacctgagactggaggctgccgctcatgggcagggattctgttatacgagatatgctgacgatctggcctttagtagccatcgccacgatcgcgccgctactcgcatcctgcaaagacaggtcagatctatcgcggcagatgaaggattcgcgattaaagaggaaaaaacccgggttatgaccagggcagggaggcagcaacttgctggggtggtggtgaacaagaaacagagcttgcccaaggcagagattaagcaactggaggccatcctgaataattgtgtacgatacggcccgcactcacaaaatcgcgctcgtcacccacagttccgtgcctggatggaggggaagctagcttatgtccagcatttggctccccaccactttgaacggctgcagagacactttgagctgatccagtggtga

SEQ ID NO: 12712 - RNA, 1338 nt, synthetic construct
  source 1..1338: mol_type = other RNA
atgtcaaatcagaaccagatcattggatttatctcacacgccattcttgccggcgagtggcagaccgacgctatcaaggaaaggattgggcgaagcattggctaccagtttaacgcaagactcctcataaaagaactgatgtctgagttcgaacttacacaggcccagacccagcataccgccatacagcagttcttgaagaacaatgtgacttttcagcagtgctggggggagcagaggcagctgatccagctcgataaaatctatatccccaagcaggatcgttgtcggcccccaagacaactcaaccacatcgagttgcctgccttaaatacggaacagcaactgggagactggttcaagattagtgtgaatgatcttatttggctgtcgggcatctgggagaagccatatgatgctaagagctgcaaattgtatcactaccactaccagtggctgaagaagcacaatggcaagaagcggttggttgagatcccaaaaagccggattaaatctcttcagaagaagatctccattcagtgccttgattccattccgatccaccagaacgcacatggttattgtaaaaacaaaagctgccaaacactggtgcaacaacacatcgcgaaacccactatcctgaagatggacctccagaatttcttcgcctctattgactaccggaagatatttaacttgttctttagcctagggtacaataaggatatctcgcgcctcttcgctcatctgtgtactacagctacaccattgtctgtcctgagtgctgaactcattgcgggacaacaaaaggactactggcaccaacgcaaactctatagagagagacatttaccgactggagcaccttccagtcccgtcatctcaaatctgtgcttttttaacctggactgtcgactgaccgcgtttgctgaaaaaatgggcctgaattatagtcgttatgtcgacgatatggttttctctggcggacgcgaattttacaataaatccgactacctgatcaaaaccatatcaaagatctgtcagagcgagtacttcttcataaaccataaaaagacgcagttactgaaacctcatcagagccagcaggtatgcggtctggtggtgaatcagaagcctaacttaacccgcaagaactacgaccagctgaaggccattctatataattgcgtgaggacatcccctaagcagcaaaataggcttaaccacgcaaacttcaaagagcatctcgcaggtaagattgcctacctgtcccagataaacccccaaaaagggcaaaaactggccgacctatttgatcagatctgttggatggagtga

SEQ ID NO: 12713 - RNA, 1296 nt, synthetic construct
  source 1..1296: mol_type = other RNA
atgcagaatttagcaagaactagccgactgctggcagcttccataatcgatggaccatgggagactgggcctctggcaaggcggatcgcacatgcgatttccctaaggggttttaatcctgagcgcctagccctggccttggtgagacggttcggcaagggaaaaacccccgtgctgcgggatctaaccgcagccattgctgccaacgaacacttcgccgtctgctttgagagtactggccggcctgcatggttccgtatgggagtcgagcccccgcaaatgacaagacctccaagcaatctcgtcactttccctctccccgtcattgaaacggccaaggagctgagcgcttggctgaatgtggatctgtctactctggaatggctggcggacacaaggcgaagacagaagaatgcaaaggacttccgcttcgtgaactattcctatatatggaaaaagcgaccaggcaagccaccgaggcttatcgaatcccctaagagcaagttaaaggccactcagcggaaaattttgaccgagatccttaacaaaatcccaccgcatgaggctgcccacggcttttgtagaaatcgttctatcattacgcacgccctgctccataccgagaaggacgcggtggcttgctttgacttgaaagacttcttccatagcatcccacccgctaggattatggctatgtttcggaccattggatatccccaagaagtctctaggagactcacaaatttgtgcatacacacccctaaccctgagtttctcgggaaaacgcttgaaaccctgccctgggccgtgcggaagaaaattctcattccccacttaccccagggggcacctacctcaccagctttggccaacctgtgtagctttcacctcgatacccgcctgcaggcccttgctgaaagtatgaacctgacatactcgcgctacgccgacgatttaacattcagtgggggtaaagaactcaagagtcgcttctcttatctgcggggtacagtacagggcatcgcccaagacgagggatttaccatcaatccagaaaagacaaggttgatgacacaggcgcagagacaggtagtgaccggggttgttgttaacaagcgaccaaacatatcacgtactgaatacgacagacttaaagccacgctttacacatactcaaaatcaactggcctggatggcctgatcaaggctcagctccgcgggaaagtggagtttgtgagggcactgtccccccaacgcggtgagaagctgttcgagctctggaaaaagatcccctga

SEQ ID NO: 12714 - RNA, 1299 nt, synthetic construct
  source 1..1299: mol_type = other RNA
atgcccggatataaacagaccactaggctgttggctgcctccattatcggaggcccttgggagtccgggccattaagcagaaggattcatcacgcgatatctctgaagggcctcaattcagagaggttagcccttgacctggtgcaccgattcggagaaggccgcacaccctctgtcaaggagctcgcctcagcaatcgcagctaacaaacacttcgaaaagtgcttcatggccagcgaaggtcaggcggagtggttgagaatgggcgtagaacctgcccaaatgaacccaccgaaaggggacctggccacattaccgttgcccgccttggcaacaagccgcgacgtgtgtgaatggctagagatcgatcagcccgccctcgaatggtttgctgacactaggaagcggcaaccgcatgttagggacgagcgccttctgcactacacctacctgtggaaaaggcggagggggaaaagtcccagactgattgagagcccaaaggggaaactgaagaagttccagcgtaagatcctctcggagatccttaataagataccacctcacgaagcagcgcatggttttgccagaaacagatcgatcattacgcacgccctgctgcataccgagaaagaatgtgtcgctagctttgatttgaaggacttcttccacgctgtgccacctgcacggatagcctccttatttcgagccctcggttaccctcacgaggtgtcaaggatcctatccggcttatgtcttcacgcgcctgatgcccattatctcggaagcccattgacaaaccttccttttcccgttcagaagaagattctgtctccccatctcccacaaggcgctcctacctctcccgcactggcaaatctttgcgcctttcgtttggatgtccgcctgcagtcactggctcaatccatggacctgacctatagtagatacgctgatgacctaaccttctccggtggaaaggatctaaagaaacaattcagttacctccgcgggactctcagcgagattgctgcccagcaggggtttaaactcaaccctgagaagacacgactgatgactcaggcccagcgtcaggtggtaaccggcgttgtggtgaataagcggccaaatattagtcgggcagagtacgaccggctgaaggctacactctatcagtgcgctgaaggagaggaaaaagatgcactgctgaaacagtctctgcggggcaaggtggaattcgtccgcactctgaacccccagagaggcgagaaacttctgcgactgtgggagaaaatcacgtga

SEQ ID NO: 12715 - RNA, 1053 nt, synthetic construct
  source 1..1053: mol_type = other RNA
atgggacctagtaaatggaacgtgcccgagctacacgtggttggggacgtcgcagcgtggctcagtgtcagccccgaggagttgcgttggttctcagacacatctggggtagaaagagcaaggcgccggcagtctgctcgcaactacgtgcatcagtgggtggcccgcggagagaagcttcccagattactggaggcacctaaagctaagttgaaggcactgcaaagggccgtcttgcacgggctcctcggtaagatcccagtgcatgatgccgcccacggctttgtcgctggacggtcagctctgacgcatgctcgattgcacgtaggcaaaaaggtggtagtgagatttgacctgaggcactttttcacatctattgataccgcaagagcctttggcgtgctgcgctggctcgggtatacacatgaagtgtcggccgtcctcattgggttatgcaccactcggactcccaaccacgtgctgggtagggccccgattccagatttggcggaaggcgaggtgctcaaccagagattcatgatgctgaggcagcttgaggcgtggcactttcctcagggcgcccctacttctccagcctgggctaatctctgtgcttggtggctggacgtcaggctgtcagcttacgccaaaaaattcggtctgacctacagccggtatgcagacgaccttgtgttttccggcgatcagctgtcctccataagccgcctacgtgatgttgtggatggcgtcgtgagagcagaaggtttcgtcatcaacagggctaagaccaaggttatgcatgcccatgctcgccaattcgtgaccggagttgtcgtaaatgagcgaccgaatgtgacacgtgttgaattcgatcaactgaaagcactgctacaccggtgcgaaatgaagggagccctttcccagagcaaaggaccagttgaccagttccgggcagagctggaaggcaaggttgcctgggtggcccaacttaatgcggctagaggggccaaactgaaggcccagttaagtcgaatcgactggacggagggctga

SEQ ID NO: 12716 - RNA, 1353 nt, synthetic construct
  source 1..1353: mol_type = other RNA
atgaatgagagggagcggagtccatggcccactcccactagtctaagaagaaacgatgccaggtttattgccaggcagccatggaataggaccgacctgctgcgcgccttatctgtggcattcggtagcagcggcatccctctgagagacttagtggaccgccttctcagggctgtcacggcaccccaacgggagcttatcgccatccagagggttctggagggctcaccattcggggtcgaacggtatcgtgcgttcgaacggcgtccaaacgctgtcgaccggttcgatctcccgcgtataagctccgcgcctgctctccacgattggctgggattgcctaccgagtgggctagttggtttaccgacttcagagagttggaacgcaaacggcagcccccgaaaaccaaacattaccctcgatggtggacggcgagaaggtggtctattccaagacttatcgaggcccccaagtcacaactgcgacggatgcagcgcaagctgctacacgaactgctcgagcgggtgccatttcacccagccgctcatggaggagtgcggggtaggtctgccgttacacatgccagcctccatactggccgacgcgtagttgctcagttcgacttggccgatttctttccttcaattacattcaaacgcgtgtccggattttttgtggcactcgggtaccccaagcctgtagcccgcgaggtagctgcactgacaacaaccaccacaccagctgagctgctggacctgcagcagctccactctggaggggatcgcgtggtgttccaccaacttgttatgcgattacgagaacggcatctgcctcaaggggccccaacctcgcctgctcttgcaaaccacctcacttttatgctggaccagcgactgtccgaagcggccaagagcatgggcttgacctattcccgctacgtcgatgatttggccttttccggggacgtccccgtgtcacttgaacgtctggagagaatagtcgagtctaatgtgatcagcgagggcttcactctgcggcatagaaaatctcgtctgcacacttcctcaaccaggcagcgcgtgacaggccttgtcgtgaacgttaagccccagcctggcagaagagaatttgaccggtttagggccctgttgcaccagcaggccaaaacgcccaccttaccgctggccgaactcgaagggaaggcagaatggttctccactggccgacccgcaaggagagctaagcttagaaggctactcgatgccattaatagcgcagctgcaagcgctgctgcaggagctgctgccagtacagcggccgagagtagagcaggtgcagatagggcccgctga

SEQ ID NO: 12717 - RNA, 1338 nt, synthetic construct
  source 1..1338: mol_type = other RNA
atggtgttcgataaacttgcagagttgctgctggattctgattggactcacgaggctattgtacgcttactaacagcgtgttaccggcccccacttagcctcaggaaaactcgccctccaaagcatgaactcttggctaccagtatccttacggctttcccaagtcctcccagccaggctaggctcatagagcatctgcgactgagtccaggcgccaggaggggattccggtatggaaaagtgcagcaggtaaaacttgatgcacagatggctggcggccaaatgcgacacacccccaccctgcaaagcggctgggattatccaaggatctcaaacctccgggagctagccgaatgtctggggatactcgatcagactctgaattggctggcgcggggccctcgtggtaatcatgcatgcgcagcgcattaccggatacaggcggtagagaagcgggctggtggctgcaggctgatcgaagcacccaaagccactcttaagagaacccagcgggaaatcctgaggcacgtgctaaatcgcctccctgtccacgttgccgcacatggatttgttccgcaacggtctacattatctcacgcccgcctgcatgttggacagaagtggatgctgagaatggacctcgaggacttcttcccctccatcgacggctctagggtgtttgggctctttcgctctctggggtatccgtacgaagtggtgcaggcattgaccaaccttacaactcacgtgctgtccattgatgccattcgcgagtcggtgcgccacttagcccgtaatgcccgtaatgaaagaacgatcacagacctggctaggctgtactttagacggcacctcccccaaggtgcccctacaagcccaatgctcgccaatttgattgcttaccggttcgactgccgtttgactggtctggctaagacctgccacgtgacctacagtagatatggagatgaccttctgttttcagggtcatccacctgtcactcatccctttccaaaatagaggaccacgtgggagccatcgccattgaagaaggattcagagtgcgacacagaaagacagcatttattcctaacagccagagacaggccgccgtcgggatcgtcttgaacgagaagcccaacgttgccagacatgagtatgaccagctgaaagccattctccataactgcgtcaggtacgggcctgaaagccaaaaccgcgtcggccacgacaattttgcagctcatctgctgggccgaatccagtggttgagatccttacacccgcagcgcggcgagaagctgttcgagtgttttaagcgaatccatttcgggtga

SEQ ID NO: 12718 - RNA, 1437 nt, synthetic construct
  source 1..1437: mol_type = other RNA
atggatgagttgagtgacagaagctcatatgcaagcgccgcccaacggagagttgccactgcgttagcccgggcatgtatggcaggggaggcatctcctcctgctatgcgagcccgggccgaaagagtcttaggccacccaaccccatggcttgtccccctggccctacaccttcacttcgagtgcgcgcctcctgccggtgaagtgtggcatcctagacagcatgaccaggtggtggccgccattcttgcatttcccgccttcctggccgctttcgagcagcctgaaggcgcacctggcgttagggcctactacccatttcaccaacccatgggacacccgcccgagccactagctggcttgcttctcccctctctggctacgatcggcgacctggccgactggctcgagatgacaccgtctctgctggactggtacgccgatgcggctgcatggtccgttagaagtagagtcgagaagagagatcattatcactcccgctgggtcgctaaagcagctggtggtgcgcgcctgatcgaagcccctaaagagaatcttcgctttatccagcgccgtattttgcgcgaaatactcaatcgcgtacccgtgcatgaagcggctcagggatgcgtgcggggaagaagtgtggtggataatgcacgaaggcatctgggcagcgctcttctgctcaagctggacctgcgggatttctttgttggcatcagcggcgcccgggttcacgctttatttaggacactcgggtacccacgtgagactgcaagatacctgaccggtctgaccacacgctgttctccggcctggcttctgaggcaagtgccgcaggaggcctacccaagccccgaagagagatgccgacgacgagattgggctcgccagtttatgggcagacacttaccacaaggggcccccactagcccagccttagccaacctgtgcgcatatcggttggatttgaggctggcgggagcagctagggaatgccaagcgggctattcacggtatgtggacgaccttgtgttctcctgtgccgacggagatctcgctcgtggacgccgtatcgtgtcaatggtacaggagattatcttggaagaggggttctccccaaactggaggaagacccggctggcccctgcttgtgcttcacagcggattacggggctagtcgtcaacgaacggctcaatttgcctcgaacagaatacgaccggctcaaagccatactgaccaactgtcgcaggcatgggcctgcaagtcagaaccacaggggagtgccagacttcggggctcatctgcagggacgcctctcgtggttcaggcaggtgaatcccgagagaggtgccaggctccaggcactgtttgatgctgtcccctgggagcacgaccgtcccgatgattccgtacccgggctggcaaggtga

SEQ ID NO: 12719 - RNA, 1398 nt, synthetic construct
  source 1..1398: mol_type = other RNA
atggacgaaatccctgacttgccaaactatcccctaaacgccacacgcaaagtggctatagccctggctcgagcgttcttggctggcgaaggttcaccggccgccatgagagttaggggcgagagggtcctgggacgctcctattcctggctggtgggcctgacccttcacatccattttgcgttagggccggctctcggacgtggatggcaacctgagttgcatgaccaaatcgtgacccacatcctcgcctttcctgacttcttggccgcctttgaaatacccgacgaggttcctcaggtccgaggctactttcccttccacgcatcgatgaggagtccccccgtacccttagccggccttgcacttccctcactggctactccgggggaccttgccgactggctagacgtttccccttctatgctggactggtatgccaacacggctgcttgggtatacgcacccggggcaagtaaactggaccattaccactatcggtgggttgctaaggccagggggggtgtgagattgattgaggccccaaaggaaaatctacgcttcattcagaggtgcatcttgcgcgaaattctcgatcgggtgcctgtgcacgaagcagcttacggatgtgtgcgcggtcggtctgcagtgtccaatgcgcgtcttcatagcgcctcaccactgctcctaaagctcgatttgagggactttttcgtctccattcctggcgccagagtacatgccatgttccgtactctggggtacccccaggagacagcacggtacctctctggcctctctacacacaataccccagcaagggtcctcagggaggtaccacaggaggagtatccaagccccgaggaacatagacaccggaaagagtgggccaggcagtttaccgggcgccatctgccacaaggagcaccaaccagtcctgcactggcaaacctctgcgcttaccgactggatctgcgcctgagcggagtcgcgcgagaatgccaagctcggtactcccgctatgtcgatgatctcgttttctcttgtgccgatgatgatcccgctcgaggccggcgtatcctgactatggtgcagggcataatccttgaagagggtttcgtgcccaattggaggaaaactcgaatggctccggcgagcacatcacagagagtgaccggactggtggtgaacgatcggccaaatcttcctagacgggagttcgacattttaaaggccatcctgacgaactgtagaaggcacggacctgccagccagaatcgcctcggtctgccagattttagagcacacattctgggcagactgagctggtttcagcaggtgaacgccgagagaggggaacggctgaagttactgttcgatcaggtcagttgggactga

SEQ ID NO: 12720 - RNA, 1380 nt, synthetic construct
  source 1..1380: mol_type = other RNA
atggacgagccctggtttcccccccctatcactccgcacatacgtcaggtggccgaggccctgactagagctttcctgtatggtgacgatcggcctggccctatgagggaacgcggaacacgcctactcggaagcccctggccttggcttacagatctgtgtctgagactgcatttcgaacttggtcagggcaggccctggcagcccgaacaacacgatgaaattctcgccctgattctggcgtatccacctttcttaggggccacacctccccgcgttcgtggcttttttcctcttcagcccagaatggcacctaggcccggagcactagccggagtagcccttcccgcgttggcctcaacaggagagctggccgactggctggagttgagccccacccagctggattggtttgcgaatcccgggggccgaagaccgcaagctccagaattggggcactaccattaccggtggatgcagaaacggcaaggtggcgcgcgactgatcgaagctccgaaggcccgtctcagggccttacagaggaggatcctggccgaaatcctgaaccgcgttcctgtgcatcccgctgctcagggctgtgttcgcggaaggtccgtcctgtccaatggggccctgcatacgggcgcaccgttactgctcaagctcgacctacgtgacttctttgtctctataccaggagcccgggtccacgctctctttagaacactcggctacccacgggagacggccagatacctgactggcttgaccacccacggtactccaccaggggtgttgcgccaggtccctcaggaggagtacccctccccagaggagcggagacagagacaggcatgggcccggcagtttatggaacgccatctccctcaaggagcccctacatcaccagcacttgctaatctctgcgcctatcgcctcgaccttagattagcaggggcagctagggaagccggggcagtatactctagatatgtggacgatctggtgttcagtcttcccagtcacgatccaggtcgagggcgccgaatcttgaccatggtgcaagagattatcttggaggaaggattcacccctcactggcggaagaccaggattctgccggcgagcacccgtcaatctgtgaccggcctcgtggtgaatcagcagctcaaccttccaaggcaggagtatgaccggctgaaagctatcctgactaactgccgacggcacggccctgctagccagaacagggaggggaggccagatttcagagctcatctacagggtcgcattgcctggttcgcacaagtccacccaccaagaggcgctcgactgatggcattattcgcaggcatagattgggacggactgcggtcgtga

SEQ ID NO: 12721 - RNA, 1497 nt, synthetic construct
  source 1..1497: mol_type = other RNA
atgagttcttcatccgcgacaaggcaggccggagagggtactgccttccaccggatcgccaaagcgccaatggacgagttttctgagtcgcccgaaccacctgacctgccagaaaaagctatgcggcaagttgccgtcgcccttgcacgcagtttcctagctggcgagagatccccagccggcatgaggcaacgaggaacggctgcactgggtcatgcttggccctggctcgtacagttgtccttgcatctgcattttgagcttgggcaggatttacaggctagaaagcacgatcagatcgtggccttcattctggcatttccgagattccgcgccgcatttgatactccgggccagcaccctcgggtacggtcttacttccccttccatccagtgatgggcacccccccacctcccttagcagggttagcgtttccagccctggccacacccggcgatctagctgattggctggggataactcctagggaactggattggttcgccaatgactggaactctaccgccgcacagcctaaatttaagcactaccactatagatggcttgcgaaaaggagcggcggggcaaggctgattgaagctcctaaggaaaatctcagggcgatccaacgccatatcctacatggaattctggaccacgtgccagtgcacgaggccgcacatggatgcgtgaagggcagatccacactcgataatgcccgtcgacatgccggcgctcctttgctgcttaagatggacttgcgggacttcttcgtttccatccccgcgagaaggatccatgcactctttcggtccttagggtaccccgtcgctaccgcatcatatttgacccgcctgaccacacacgcaacaccggcctacttgctccagcaggtgcctcaagctgagtaccccagccccgaggaacgtagacagaggcagatttgggcccgccaatttatggaacgccacctgccacaaggtgctccgacgagtcccgcccttgctaatctgtgttcatatcgtctagatcttcggctcgctggcgccgcacgagaatgcaatgctcgctatagccggtacgttgatgacctcgcattcagctgcgacgataaccaggcccacggaagacgaatactggccatgctgcaggatataatactggaagagggctttaccccaaattggaggaaaaccagactcgctagcgccgccacaactcagaggttgacagggcttgtgattaacgcacaccccaacctgcctcgcaaggagtttgacacgctgaaggctattctgaccaactgtcgccgattcggagctgcttcacagaaccgggacggtcggcctgacttcaggagccacctccaggggaggattgcctggtttcgtcaggtcaaccctgagcgaggagagaaactcagacgcctgttcgaacagatcgactgggcctctgcggagactatccggaatagagccagaatcagtctgacttga

SEQ ID NO: 12722 - RNA, 1389 nt, synthetic construct
  source 1..1389: mol_type = other RNA
atggatgagttctccgatgaccctgagctgcccgaacttcctacaaaggcgatgaggcaaatggccgtggccctcacacgggcctttttggctggagagcccaaccccgccggtatgagagagaggggagggatcgcactggggcaagcatggccatggttggttcctctctccctgcacttgcattttgagctcggcagcgagttacaggccagagagcacgaccggattgtggctctgatcctggcctatccccgcttcagggctgcatttgctgtccccggagagcgccctaaggttagggggtactttccgtttcatcccccaatggggaggccaccacctgccttggcagacctagctctgcctgctctggctacccctggcgatttggccggttggttgggcctgacaccgggtgaacttgactggttcgcgaatgcatggcaccagcccgcggcaaccggtaagcttgatcattaccactaccggtggctcgcaaaaaggtctggcggagcgcggttaatcgaagcccctaaggagaacctgcgtgccattcagagacgtatcctgcacggcatactggaccgggttcctgtccatgaagcggctatgggatgcgtaaaagggcgaagcgtgttggataatgctagacgccatgccggctcacccttactactcaaaatggaccttcgcgactttttcgtatcaattccagcgcgacgcgtgcacgcgttgttcagaagcctcgggtacccaagcgccacagcaaggtgtctcactggcctgacgactcacgctacccccgcagctcttctaagacaggcaccgcagaccaaatatccttctccagaagagcggcgccagcggcaacaatgggctcgacagttcatggaacaccaccttccgcaaggagctccaacttcgcccgccctggccaacctgtgtgcctatcgcctggacctgagactcgctggggctgctagagccggacaagccaggtactcccggtatgtggacgatctggccttcagttgcgccaatggcgatccccgacatggcaggagactcctgaacatgctgcaggatatcgtgctcgaagagggtttcaccccaaattggcgcaaaacccggctggcacctgccagtacggcacagaggcttacaggtctgctagtcaatgcccatccaaacctgccaagaggagagtacgaccgcttaaaggccatccttactaactgccgtcgacacggccccgcctctcagaatcgtgatgggctgcctgacttcagagcccacctcttagggaggattggctggtttggacaggtgaaccccgcacgaggcgaaaagctgcatcggctctttgaacagatagattgggcatga

SEQ ID NO: 12723 - RNA, 1401 nt, synthetic construct
  source 1..1401: mol_type = other RNA
atgaacgatcccgacgactttgacgatgacttcgacccagatgaccttctaccggcaagggcaatgcgcagtgtggccattggcctggtaagggcctttctggccggctcgtcagatcctgccagccttcgggagcggggacgtagagcattgggagagtcacctcggtggctgccctccttagtgctgcacctgcacctcgagctgggtagtcagtttaccactcgacagcatgacgcactccttgatgccgttctggcgtacaggcaattcagaaatgccttcctgcctggctctaccagacccaggatcctgtgtcacttcaccttccatccccctatggatgaacctcccgccgtattggccggagtggcagttccgactctgcctaccagtggggatcttgctgactggctggggctactgcccaacgaattggcctggttttgtggaaactggcgagaacagccatcacagccaaagctgggccattatcggtataggtggctcaacaaagctaatggtggacgacgcttaatcgaggccccaaaggagacactcagatctatccagagacgaattctgcacggcatccttgacaaattgccggctcataccgctgcaacggggtgcgtgagagggctgagcgttgtcgacaatgcccggagacacgctgactcccctctgctgcttaaaatggatttacgcgacttctttgcaagcattccagccggtcgggtgttcgcactcttcaggactcttggatacccccccgcgtccgctcactgccttacacaactctgcacacacgccacgcctatgcgagtgctccgcgaactgccacaggatggtcacgggagctgggagtggagacgccagcagcaggaatgggctcgtcggtttaatacccgccatctgccgcagggggcaccaacaagccctgctttggctaacctgtgtgcgtacaggctcgacttgagactggcagggctagcaagagaatgcagggccacctattctcgttacgtcgacgacctagctttctctctgccaagacacgattccgcccgcgcccataggatacagttactcgccgaggaaattatcctgcaggagggatttgcgcccaatcggaggaaaacacggttgtgcccagcgggccaaactcagactctcaccggcctggtcgtgaataggcatcccaatctccccagagctgagtatgatcggcttaaggccatattgactaactgtcgtaggcatgggcctacaggacagaaccacgatcagcaccccgattttcgcgcccacctgcaaggccgcttagcttggctccgacaagttaaccctccaaagggcgaaaagctactggtcctcttcggtgagatcgactggggctga

SEQ ID NO: 12724 - RNA, 1398 nt, synthetic construct
  source 1..1398: mol_type = other RNA
atggacgatgaggaggcacacccaccctttggaccggagcatgccggcagggataaggcccgagtggctctggggcttgctagtgcctttttagcaggctcacccgagcccgccagtttgcgagagaggggaaggcgcgcgcttggtagagattggccgtggcttcctgctctcgctttgcggctgcaccacacattcggcaaagccttcccaccacaccgactcgatgatctgcaaagactgatcgtgcgcgaccctgatttcatagcatcattcgctgattctgaaggcggtcctagaatccgggcctggtttccactgcaccccagaatggctccccccacaatcccaggtttgcccgccctcccacagcttgctaccctggacgcactcgcagactggctggaagtgaggttagaagacctggatcggctcgctgaacctcaggcgtggcgtcctcccagatcagcatcgcctctggaacattaccggtatcactggaggcagaagcgtgatgggggccttcggctgattgaggcccctaaacctcggctgcgacgcttgcagcggcgcattctgcacggtctgctagacctggtgccagtgcaccctgccgcaatggggtgtgtcagaggccgcagcgtgatcgaccatgctggtcagcatgccgggcagcccagacttgtcaagctcgaccttcgtgatttcttccccgggaacagagcctcccggattcacgcgctgtttagatctctcggataccctaccatggttgctaggcacttaaccggccttacaacgcactgctccccaccgcgcatactcagaaccctgccccacggagagtatgatagccccgagcagcggctgaggactagaaggcgtgccatggccttatgcgaccggcatctcccacaaggcgcaccatcttccccggcgctggctaatctgtgtgccttccgcctagacctgcgattagccggggctgctttggcatgtggagctcggtattcccgttacgtcgacgatctgtcttttagcggagcgttcgacgctgcccggggtcataggatgctggccatgattgacgacatcgtgcgagatgaaggctttgacccaaattggcgcaaggcggcagtagtgggagcaggagctgcccagagactcaccggcctcacagttaacaggcaccccaacctgccgagggcagagtacgacaggctcaaagccatcttgactaactgccgccgccatgggcctactagccaaaataaagccgggcatcgcgatttcagggcacatctattgggccgagttgcctgggcctgcgccgtaaatccagccagaggcgaaaagctacggagtatctttgacaggattgtctggcctgagggatga

SEQ ID NO: 12725 - RNA, 1398 nt, synthetic construct
  source 1..1398: mol_type = other RNA
atggatgaggaagaggccgatctgccctttgggcctgcgcatgcaggtagagggctagcccgcgtagccttggggttagccgcagcttttctcgcgggctctagtgaggcagcggggttacgggaaaggggtcggcaagccttgggtcgcgattggccttggctgccctcccttgcgcttcggatacacttcgccttcggcagcgaattctctcctgatcgcctagaagatctgcagtccctgattctgggagatccaggctttgccaaggcattggctgaccccgatggcgggcctagaatccgcgcttggttcccattacacccacagatggccagccctgttgtgcccggcttgcaagctctgcctcagctcgccactctggatcagttagccgatctcctggagttgagcgtcgacgacctggactggtttgctgacccacaggcctggagagcaccgaaaccagactctcccatcgccaggtatagataccactggcgacgtaaacgtgacggcggcctaaggcttatcgaggcacctaagccccgccttaggaggctccagcggaggatactgcacggactcctggatcccgtacccgtacaacccgccgctatgggatgtgtgcggggtaggggagtgatcgatcatgctggcctccacgccgggcaaccaagactggttaaactggatctgcgggatttctacccagggattcgggcctcaagaatacacgccctgttcagatccctgggctatcctaccaaggtcgcccgctatctcactggactcacaacgcattgtagcccccctcgcattcttcgggctctgccttacggcgagtacgacagtccggagcagaggatgcgtacccgacgacgagccgtctccctttgcgaccggcatctcccacaaggcgcacccagtagcccagcactggcaaacttgtgcgcgtacagactggaccttcgacttgctggagctgcgcgggcatgtggtgcacgatattcgcgctacgtggacgatctgtgcttttccggcgcttttgacgcagcccagggacacaggattctcgccatgatcgacgatatcgtgcgggaagagggattcgaaccgaactggcggaaggctgcagtggttggtgcgggagctgctcagcgtctaacaggactgaccgtcaatcgccacccaaatctgcctagagctgaatatgacaggctgaaagccattttgacaaattgccagcgccatgggccgtcatcacagaacaaggggaaccatcgcgactttagagctcacctccagggcagagtggcctgggcatgtgccgttaatcccgcccgtggggagaagctcaggtctttattcgacagaatcgactggaggcagggctga

SEQ ID NO: 12726 - RNA, 1383 nt, synthetic construct
  source 1..1383: mol_type = other RNA
atgtcaaggcttccaaagccccctatcgatccggctattctgcatgtggcacgcggactcgcacgggcttttctacacgaagctggcggcatcaccgatctccaacagcggggcaaggccgcgttaggcactgcacatgactggcttccacgcatggtgcgccgtctggatcagcatttcggcctgccgctcagaccagcccaatttgaggatatcgtgacctgtattgctacactccctagcttcatcggtgcctttgaacggcggcccgtgcccaaaattcggagatatttttcctttcagcctcaaatggctgcgcttcctagaaccctggcaggcctggatttaccagcccttccaaccgttggagacttagccgcctggttagccctgagtatggacgagctggagtggctggccgacgtacactctattagcagcaaaacagggagcgaggccctgcgccactaccattatcagtggaaggcaaaggcgtccggtgggcatagactgatagagagtccaaaacccctcctgtgtgcaatccaacggaagatcctgcacggactccttgacaaaatacctgtacacgatgcggctcacggatgcgttccccatcggtccatactttcaaacgcccaagtgcacgctggatctcctctgatcctgaagatggatttgcaggatttcttcacatctattcgtgccagccgcgtccacgccttgttcaggacactgggttaccccgaggaagtcacaaggtaccttaccgccttgacaacgcacgtgacaccgtcgtttatcttccacactcagcctagacctgagggcctgactagtaaagcactccagaccagacgaaagcaggccgagtcctaccgagcccgacacttgcctcaaggagcacccacctccgctgctctcgctaatctctgcgcctggaggttggacctacggttggctgcagcggctcaggaaagtggggtgcgctatactcgatacgtggatgacctgattgtctctttcccatcacatactcgcgcacatgcctggagaatttcactcatgattgacaccatcatactggaagaagggttcactccgcaccccagaaaaacgaggctaacctctcagagccaggcgcagtgggttactggtgtcttggtgaacgagaagcccaatatcgctcgctccgattatgacaggctgaaggccaccttgacaaactgcatgaggcatggcccccacggacagaatagggaagccctgccagacttccgagcaagactgcagggccgtatcgcccatgtcaaacacataaacccagcaaggggggagaagctccagacgctgtttgacgccatcgggtggcaggctatttga

SEQ ID NO: 12727 - RNA, 1524 nt, synthetic construct
  source 1..1524: mol_type = other RNA
atggaggggcggactgcttttggcgccaaagctgccgagggcggaagagtcgaggacagttacgatgacgaggaagcagccgccgcttggttagctgcccgagctagggccacacaggcagttgcaacggccttggcccgagcctttctcgctgcctgtgcttctcaggcgcaaacagcggcagatgcaggaggtcccgttgctgctcctcacacagctactggcgccagagctgctgcagcagccatgcaggcatgcggccgacgagtgctgcgtaggaagtacccctggctcgcgcggcttgttagacacgtccaggccgcagcaggagactgtccaaggcctgcgcagcatgatgaagtccgggccctcatcctggagtttcccccgtttcggtctgccttcgaagacgatgaaccccctagggtgcacgcctggttcccatggcacgagtgcatgcgtgcacccccacggagacttgctggcctgaatcttcctcagctcgacacccccggcgacttggcagcatggttgcacgtgagcgtgggggaactggcctggtttgcggaccctggtggatgggctgaggcaagcggagtagaggccctgagacactatcggtatcgctggaatgccaaagccggcggcggatggaggctgttagaaatcccgaagcctagactagccgcactgcagcggaagatcctcagagagattctggaccgtgtccctccccatgctgcggctcaaggcgctgtccgaggaagatccgcactgggcaacgcagcgatgcatgccgattgtgggctggtacttcgcctggatattgaagatttcttcccaaggctggccggcgcacgtatagctgccttgttccgcactctgggttatgctcctgcggttgcccgtttgctcgccggtctatgttcccacgctacccccgccgcggtgtcaagtactgcaccatgcgccggcctaccaggcatcgatggacttcgcgccaggagggacttggccgacatgtacggtagcccacatctgcctcaaggggccccgacatcaccagccctggcaaacctggccgcctacagactggatctccgacttgacggagcagctagggcctgcggttggaggtacaccagatatgtggatgatctgtttttctccggccctggaggaagcccagcacatgctctgcgcaccgcccaaatgctccaggggatcgtgctggacgaagggtaccggccgaactttaggaaaacccgcgtgatgccccgggggaggagacaattagtgaccgggctcgttgtgaatcggagagcagccataccccgcgaccagttcgatcgcttcaaggctatgttgacgaattgcctccgccatggggctgcctctcagaaccgcgatggggtagctgacttcagagcttcggtggcgggtcggttagcttggttcgagcaggtcaatgtggccagggccgccaagctgcgagctctttttgacgcaattaactgggcgtga

SEQ ID NO: 12728 - RNA, 1464 nt, synthetic construct
  source 1..1464: mol_type = other RNA
atgcgaatagctcagcagggggaaggggaagagccctatgcacacagatttgcagcccctactgctgcgatggatgccgttgctattgcgctggccagagcttttcttgcagcggtcacacagaccgccgattccgctgctggtgctgctgaggccatggaacccagccaacgtgccttggctgccgctatgcaggcatgtggcaggcgggtgttggcgaggaaatggccttggctggcaaggcttgtgcgccacatcctcagcgaaaccggaccccaattacgcccagcccagcacgatgaagtcagagcgctgattctcggctttcctcccttccggcttgcttttgccgcagatcagccacccgccgttcatgcctggttcccctggcatgatgccatgcgctctgcgccaagggcactggcacagcttgctttgccgcagatcgacacacctggcgatctagctgcctggctcggactaacggtgggcgagctcgcatggtttgccgactcgggaggatgggccgcacgttctgacaccgagaggcttcgccactaccgctaccggtggcttgcaaagccttccgggggttggcggctgctggaaatcccgaagcctagactggctgcgctgcagcggaaactcttgagagaaatcctcgacagagtgcctccacatggtgccgcacagggagcggtcagagggtgtagtgccgctaccaatgccgccgcacatacaggcagagggctggtgttgcggctggacatcgagaacttctttcccactttaggggctgggcgcatcgctgctctgtttagaaccctggggtatcctggggcagtcgccagtctcttagccgccctcacaacccacggaactccagccgctatagccggcgctgcacccttgggagagtatgctggagccgccgatctgcgagcaaggcgagatatagcccagctgtatcggagagcacacctgccccaaggtgcaccatcttcccccgccctcgccaatttggccgcgtacagactcgatgtaaggcttgctggagcagcccgagcatgcggctggatttacaccaggtacgtcgacgacctttttttctccggcccagcgactactccggctcaagcacgccggaacgcccaaatgttcctgtcaattctgtgtgacgagggctacacgcctaattgccggaaaacaaggatcatgccacggggcaggaggcagtgcgtaacaggactggtggtgaacgagcgtccaggcattgcccgggacgaattcgaccgtttcaaggccctcctgaccaattgcctacgccatggcgcagctagccagaacagggccggtgtggccgatttccgcgcttcagttgccggtcgactggcctggttcgagcagattgacagcgccagagcagcgaagctgcgccgattattcgaggctatcgagttttga

SEQ ID NO: 12729 - RNA, 1434 nt, synthetic construct
  source 1..1434: mol_type = other RNA
atgcgcgccgcaccaatgcacgatgaaagtcatccccgcttcgactcgcaatacatcgagcctgatctgctggccctcgccacccaactagcaaatgccctccttgcgggcgagcagcgaagtccagcattacggaaaagacttcaaacagtgcttggacggaattggccgtggttggcgcagctcatcagacaggtccggctggattttggcgacgggatctccagcgccgagcacgatgaacttgtcaggagcatcctggccttcgctccacttcgccgagcctttgagtccgatggtgaggtgcctcgcgttcgcggatggttcccttttcaaccaccgatgggggctcccccagcacgattaggtgccattgacctgccagccttggcaacgcccggagacttggctgactggctcgggttgcgaatcggcgaactggactggtttgccggctcactaaggccccaggttgcggctaacgggcccctttggcactacagctattgctggctggcaaaacgtaggggaggatacaggctcatcgaaattcccaagccccggctgcggaatttgcagcggaggattctgagagacattcttgaaagggtgccagtacatccagcagctcatggctgtgtccgtggacggtccgttgtgtcagccgccttgcctcacaccgggaccgatgtagttctgcagatcgatctgcgcgagttcttttctacggtgacagccgcccgggtgcatgctgtctttaggactttaggctacccaccggccgtagcccgtctgctaacaggtctagcgactcacagtactccccacagcgtgttacgggcagcgcctgtagctgagcatgcggacgcccaggctaaaagatctcagatgcaaagacaggtgctgctgacagtgccgcacctgcctcagggagcaccatcatctcccgcgttgaccaacctgtgcgcataccgactcgacctccggctctcaggtgctgctgcagcttgcggcgtggggtatacccgttatgtcgacgacctcatattctccggggatgtggccttcgcccgcaaaattgaacggtttaagagcatggtttatagcattatagtcgatgaaggtttcgagccccacttccagaagactagagccaggacccaggccactcctcagcacgttgtgggcctggtggtcaacagaagactgaatgtgcctagatgcgagttcgatgctctgaaggcactgctccacaactgcaggtgccatggaccagccggccagaacagacatgcccatcccatgtttaggcaacacctgcttgggtgtatcgctagggtggcccaggtcaatcctgctcgagccgcacgcggctgttgtggtatatctgcaccctccacaggccctgaccgcgctaagcctagatgtgcttga

SEQ ID NO: 12730 - RNA, 1107 nt, synthetic construct
  source 1..1107: mol_type = other RNA
atgggtgagccaccagcctcacttagggccaaggccaaggagttaccccggcttgccactcctggagacttggctgactggctgggcctccctattggcgaactggactggttcgccgcgtccttgaggtcggacctaacagcagatggccccctctgccattatcgctacaggtataggtacagatggctggccaaacggcgagggggttaccgactgattgaaattcccaaacctcgcatgcggggcttacaacgccgggtgctccatcggatcctggagcaggtgccggcacacgatgctgcgcatgggtgcgtgtcagggcgcagtaccattagcgcggccttgccccattccggcaaaaatctggtactgcagatctacctgcaggacttctttactggggttaccgccggtcgacttcacgctatgttcaggacactgggctaccctccagctgccgctagaacactgacgggccttgtgacgcattctaccccctatagcatactgagagcatctccttcaccagaactcggtcagaacgatgatgcgggaaccaagagcagaaggcacgctatgctccgaatcgcacacctaccacagggagccccctccagtcctgctcttgccaatctgtgcgcttatcgactggatctgcgtctctctggggccgcagcagcttgtggaattggatatactcgctacgtggatgacctgatattctccggggacgacgcatttgccaggaagatggaacgtgtcaaaagcatgctctactccattatcgtggacgagggctttgagccgcactatcggaaaactagagcacaacgtcaggcaacctctcagagaatagtcggcatggttgtcaaccagaagccaaacgtacctcggagagagtttgatacactgaaggccatcctgcacaactgtcgcaggcacggaccacaagggcaaaaccatttgtgtcatccccactttcgccagcacctcctaggccggatcagtcgcgttgcccagctcaatgctaatagaggtgagcggttattgagagaattcaggcagatcgattggagccccgctgtgttgccgaaggccggatga

SEQ ID NO: 12731 - RNA, 1509 nt, synthetic construct
  source 1..1509: mol_type = other RNA
atggccttcgcactaccacaccccatgggcctcaatccgcacgacgacgtcgcactaagagccttcgcacagcatctggcacgtgcactcctggctggcccttggactccgatggctatgcgagcccgactcaggagggccttaggccttgctcggggaggagcttctcctgattggctgcgtcagctcgtgagacagttacacgcacaaccaccattcgccctcccagcacagccacaacgcagaaaagctgcaggtgctgccacagggcctgtcccaggttcagcccatttgcaggctgtggctgacgcagttgcccagtgtcccgcgctccagcaagcatggagcgccactcccgctcatgctccatggcggattaaaggattctttttgccccctcctcctcctaagccggcagccatcgccaaactgcagcctttcgtgagagagctgccccccttagcgcaggtgggagatatcgcggcctggctggagctggaaccaggtcagctggactggcttgcaaattgccaggataggcccacccccagccctaagctagcccactatagggcccactggctccctaaaggccaaggcgggttaccccgcttgatcgaggctcccaaagcccgcctgaagcagattcagcggcggatccttcaggagcttctggcccccattccactccataacgctgcccatggaggggttaggggaaggtcggccctgtcccatgcccaagcccatgctgggatgcccgtcctgttgaagttcgatctgcgcgatttttttcccagtatacgggctgcccggatccacgccatctttgcatgcctgggacacaccccagccgtctgtcgagttctgaccgcgctcgtcacaacgcgcactgctcatggggtgcttcggacagccccgctaaccgctccaccacagagtgctccgtgtggcgcgggaacaggtccttctctcgcagtgcaacaggcgcagctgagacagctgtatggccagcgccatctccctcaaggcgcacctagctccactctcctggcaaaccttgcaacggcccggttggatatgaggcttgcggcagcagctgccgccttacagggtaggtacacaagatacgtggatgatctcgccatttcacttccacagctgcctcgcgcgcaattgttgcgcatgcagcgcctggtacggaggatcgtgcatgaggaagggtttgtgctgaatgaagccaagtgtgggctgtacaccgcctcccaggcgcactacttgaccggcatttgcataaacgctcaccccaatctgcctcgagccgcctatgaccaactgaaggccatattgcaccagtgcgtactacacggcccctctagccagaacagggacgggcaccgtgacttccgagctcaccttcagggcagaattgcctggtgcagatccctgaacccagctcgtgctgctaagctgcagagactgtttgaaagaatcgactggcaagactga

SEQ ID NO: 12732 - RNA, 1296 nt, synthetic construct
  source 1..1296: mol_type = other RNA
atggacaagagactgtttagtcacaatttggccgtccacctttcgctctgcccctggagcctagatcagatctctgcttgtttgcgcagaaatctgcctaagggcgctcataaatataccaccgaaattgctaacgagctccatatcgggttacccacaatctttacaccatcagtttcggcgatagaaattgtgctccgtagggcgatacggctggaaagtacttaccagttttgccggaaacaagggaaatggccggctctcaacctgagctccccaactatgtgtcctacccccgcatttgaaggccttgacattcctcagctgcctacaactgcctctgtcgcggactggctgtcaataagcgagagaaggctagattacctggccgatgagcagaatcggcatgaggagcacggcgaggccagcattaaccactaccactacattttcaaaaacaagaatggagggggtattagggtgatagaggcccccaaggaaaacctcaaatcaatccagagggccatcctgaagaatatcattggaatcgtgcctcctcatgatgccgcctttgggttcgtgaaagggcgaaattgcctcaaagcggcaaacagacatgtcggcgaaaaggtggtgctgtgcttcgacctgaagaatttttttccctccattggcgcaggtcgggtgttcggcttattccgctgtttggggtatccagatgccgttgctcgggtgcttacgagcctgtgcacctccttgaccccaagaaggatactggaacgctttcccttggaggaaaggtcaatttataacaaacgtcatctcccacaaggagctccgacatccccagccctggcaaatcaaatctgtttcggactcgacaagcgccttaatgccctggcaaagtgtctcggcgcacagtattctcgatacgctgacgacctgacattcagcggcgataagcatatcgctaggcccctgcagtacttcctgccagtaatcgcccaggacgaggggttttctctgaatcgcgccaaaacgcgcgtgatgcctcgagcatctcggcagaccgtcactggcgtgctggttaacgagcacttaaacatcgaccgccgttccttcgataaactcaaggctatcattcacgcatgcggtaagcctggagatcgaagacttttggaccccagtttccggaaatccttaatgggaaagatcgattgggtagagagcgtcaacccgcacaggggtcaaagactgagacagctacttagtaaggccgttgagaaccacatctga

SEQ ID NO: 12733 - RNA, 1293 nt, synthetic construct
  source 1..1293: mol_type = other RNA
atgaaccggaatgaagtatctcttaatctcgcccgaagcataactagaggtgaatggtccaaggagttcattaactctaatctcctcagaaggctgcctagcactgtccacaagctggtaccagctatctcagaggatctggtgaccgagctgtcagcacggtatgccccgacagagaaatacgttgctgagcatctgctatatgaccgtaacttcgagaggatctatcgctactgcgcccgaaaaggtatatggcccacccccgatttgtcaccccccgtcatggcacccatcccagcctttcaaaagatcgacctgcctcaaatccccacactttctgctctcgccgaatttctgtttctgactccagagcagctcgagtacctggcggacaggaatgggcgccatgaagaacatggggacatggccgtgaatcattatcattacgtgctgaaacctaagaggaccagtgggcatcggctcattgaagcacctaaagagcggttaaaagccattcagcgccacattttgcgtagtatactggataaactccctacccaccccgacactttcgggttcgtgagatccagaaactgcctgcagggagctaatcggcacgccggtgaacaggtggtactcagatttgacctcaagaatttctttccaagcattagcgcaggcaggatctttggactgttccggtgtctgggatacccccacaacgttgctgttgatctgacggcactgtcaacaaccaagacgccagcccgtgtcttggagagattgttctaccccgacagagggctatacaagaccacccatctgccacaaggagccccactttcccctgccctcgcgaaccacgctgcctttggcttagataggaggttggccggactcgcaaagagattggacgctaactatagtcgctatgctgatgatttgactgtgtctggcgatcacactattacgtccaaccttctaaggctagttccgcagatcattaaggatgaaggcttcgccttaaacacctccaagacacgggtcctgcctcagacaacacgccagactgtgacaggcattgtggtgaatgaccacctgaacatagaccgcaaaaccttcgatcaccttaaagcagtcatccatgcttttcagaaggaaggcgatcaccgactgagtgacccagcgttccgggcaagccttgagggcaaaatcgcttgggtggaggccatcaatcctagccgaggtcagaagctttggcgcttactggacaacgcggagaagccgtcgtga

SEQ ID NO: 12734 - RNA, 1275 nt, synthetic construct
  source 1..1275: mol_type = other RNA
atggccgcctcattatccgcaacacagtggcaagctcatgccctggaaagggttttcaggagccgcttaccaactccactggcccagtacgcagccgagtttagcgctggtcttatcgccgccctgccgtctgcttatgctccggaacctgccgcagtggctgccgttctcgtccatttgacctcctttgagcaggtcacagcctgggctgtgaagaacggccactggcctgtgcctgacctcagagaaactcagtttctgcccatcgccgctttcgctgacctcagtgtccccaagctcgccacaatggcacagctaggcgactggctggggctgagccaggagagactcgcctacctcgccgatactcaggcccgacacgaagagcacggcgagacagcaattaaccactaccattacgtactgcagcgcaagaaggggcccggacttcggttgatcgaagcgcctaaacaaaggctgaaggcagctcaacaccagatccttagacaaatgctggatccactgccagtgcacgacgatgcatacggattcgtgcgcggccgtagttgccaggcacatgcagctcgccatgcaggaacacaaatggttgtgtccttcgacatgagacagttttttcccagcatttccgccggaagggtgttcggcctgttccggtgtcttggttatccctctgctgtggcccaccacctgaccggactctgtacttctgccacgcctcccaggattttgcagagattaccatacgctgatcgagtcgtctatagagccgctcatcttccccagggagctccgagctcaccagcgcttgcataccatgttgcgttccggctagacaggcgactcagcgccttggcggacagtttagacgccacctatggcagatatgctgacgatctaagtttttcaggggaccggcgcataaccgaaccactgatgagactggtacctcagattttgcgtgaggagggcttctgcctcaacccctccaaaacccgcgcaatgcctcagactgctcggcagtcagtgacggggatagtggtgaatcagcacctcaatatcgcgcggggccagtatgatcggctgaaagcagttgtgcacgcctgcggaaagcctgacgattctaggttggccgatcccgtcttccgagggaggctggagggccaaatcgggtgggtagcatcgctgaaccgtgcgcgcggtgctaaactgcaagccctgtttaataccgcgcttgatggggccctgggtggctga

SEQ ID NO: 12735 - RNA, 1368 nt, synthetic construct
  source 1..1368: mol_type = other RNA
atgtcttgcactttgagattgacaatggaacgccacgagcgtcacatgaatgatcagcatttggccttgcttctggctacgagactgaccggaccgtggagcgtgcaggatatcactcagtccctgtgtagacatctacccgccccactgcacacacaagctgaagcaatttcccagaagctgctgagaatccacccagggccctatgctcctcccatcaaacagatcgcaagaacactcagaaacgcggacgaatttccccgcattaaggcccattgtgttcgatacaatgtctggccagcggccaaccttacgcctcctcagatgatgccaatcggggcccttgcttctctcgatctacctcagattcccaccctggaggatctcgccgactggctcctgatccctactgatcagctgaactacctggccgacccgcaaaagaggcacgaggcccacaacgagatggctgttaaccattaccactatcatattcaccccaagagtaatggagcatcccgattaatcgaggcccccaaacagcgcttaaaggctgcacaggctcagatcctgaggggcattctggcacacgtccctgatcacgacgaagcatttgggttcaccaagggccgtaactgcatgtcaggggccaccagacatgtgggcgagcaggtagtagtcggattcgacgtgaagaatttcttcccaagtataggagctggccgaatttttggcttatttcgctgcctaggatatccggagagcgtcgcaaggtttctcaccgctatttgtacaaatgtgactcccagccggatcctgaatcgactgcaggcgcctgagaggcaacaatttaggcatcctcatctgccacagggtgccccaacttcaccagctctctccaacaaggtcgccttcacgctggacaggcggctttctgggttagcaactcggcttggggccaattactcgcgctatgcggatgacatatctttcagtggggacgtgggtataacacatcctctactgcaacaggtgccaaggatcctccggaatgaaggcttcgcccccaatccggccaaaacccgcgtgatgcctaggggaggtagacagagcgtgacaggcattgttgtgaaccagcaccttaacatatcacgagagaaattcgaccacttgaaggcggttattcacgcttgtcggctgcccacagatctgcggcttgatgacctcgcatttaggatgaaattggaaggccaaatcacctggatcgagtgcattaaccccgtgagaggttgcaagttgcggcggctcctcaaaaagagcctgaaagcccgcatcgccgaaaccaccaaaactggccgtgcactgtga

SEQ ID NO: 12736 - RNA, 1332 nt, synthetic construct
  source 1..1332: mol_type = other RNA
atggacaaacgcgatctggccagtaatatcgccatctcccttactaacgggacctggtcgaaagatcaggtgaccgcgcagttaatgcgtcggtttcctaaatccctgcaccgatttagtaaccagctgtctgcagaactgcttgctgcgtgccccacaatttatgctccgagtgccaatgctgtgcaaaacgtgcttcagatgtctgcaatttttgaacgaatattccgatactgccagagacgcaatatctggccaaacccggtcttggtcgagcctataatggcccctacagccacattctccgaactcgagattccccagcttccaacagtggaggccctggcagattggctcctcgtgccgatcgacagaatagattacctagccgaccccattggccggcacgaaaaccacgaggtcgcagccgtgaaccattatcactatctgttgcacccaaagaagtccggggggttaaggctgattgaggcccccaagcatgccctgaagagcattcaacgccaaattctgcgaggtattctcgataaggtccccacccatgatgatgcttttgggtttgtgcgtggaaggtgctgtgtgggggcagcagctagacatgcaggagagcaggtcgtggtaaattttgaccttaaggacttcttccccagcgtaggtaccggccgcgtttttggactgttcaggtgcctcggttacccaaacactgttgcaggcctgctcacgggcctttgtacaactagaaccccccatcgcttgttaaagcgcttgaaccccgcggacagggcccaatatcgtgaacgccatctccctcagggtgctcctacttccccagctctggctaaccacgtggcattcgctctggatcggcggctagccggcttagctcgatctataggagccaactactctaggtacgccgatgatctcagtttctctggcgacctacagatatcagcaacactcctgggcattgtgccacagatcgtccacgaagagggcctgagcctcaatcctcacaaaacccacatcatgagcgctggatcaagacaattggtgactaatatcgttgtaaaccggcatgtgaatgttaccagagaaaagttcgacaaaatcaaggccaccatccacgcgtgtgccaagcccgacgacgagagactgtcagacccagtcttcagggccaaattgctgggacagatcgggtgggttgagacagtaaatcctaagaggggcctgaaactgagaaaacgggcgatcgaggctattcggaaagccacgatcaggtcacctagccggaatacgagcactcagatctga

SEQ ID NO: 12737 - RNA, 1299 nt, synthetic construct
  source 1..1299: mol_type = other RNA
atggattccaagagccttgctagaaatctggcccaatccctggccatggggccatggtctaggcagttcataagagccactttagttcgacggctgccgcgtcaactgcacaggatgattgctgggctcagtgaggaactgattaaatccctgccatgcgcctacgcgccctctgtgaaaacagtggcaggcgctctgggacgaagcgacagatttgaaaagattcttaggcattgcatcagacatgacgtttggcctgatcccgacctgtcaagtcctgcaatggcccctgtggctgcgttcgcgactctggatctccctcagctcgctaccctcgacgcacttgcggagtggcttttcttacctccagaccgccttgagtacttggctgacaaagattcacggtatgaggagcatcgggacgccgccgtccaccattaccactatatcgagaaagtgaaggcgtcgggcggagtgcgcatcatagaagccccaaagcctcatcttaaggcagctcagcgacggatcttgcgaggcatcctcgacaaagttcccgtgcacgccgacgcttttggtttcgtgtcgggcaggaattgtttgaatggtgccaataggcacgtcggcgaagatgtagtggtctgcttcgatctccgcaacttctttcccagtattgggctggcccgcatttttggcctctttcgatgtataggctacccgcacgaggtagcaaggctgttgaccggcctgtgcgttacgaccacacctatgcacgtggctaatacactgacaaccgtcgacaggcagacctatagacgcccccatctgccacagggatctcccgcttctccagccctggcaaacctggcagccttcccgctggatcggagattaagcggattggcaaagtcactggacacgaactactcccgctatgccgacgatctctcctttagcggggaccgggaaagtgtgggggcactactaagagctgtacccggaatcgtcgccgatgaaggattcgagctgaatcagacaaagacacggattatgagcgctacttctaggcagatggtgactggaatcgtggtcaacgatcacctcaacatcgatagacgtgagtttgacaggctaaaagccatcatccatgcttgtggtcggcccggggacactagattggccgatccagttttccgctctgccctgctcggtaagattgcctgggtggaagcagtcaacagccagcgtggccaaaagctacttaccctgttatcattgagcataacctcccgccacgcatga

SEQ ID NO: 12738 - RNA, 945 nt, synthetic construct
  source 1..945: mol_type = other RNA
atgagtcctgtggcggtcttcgccgcactcgacatcccacaacttgccaccttagacgctttgtccgattggctcctcttacccatagaaagattggactatctggcggaccttcatagtcggtacgagaaccacggcgacacacaggtaaatcactaccactatgtcctccaccgaaagaagtcgggggggatgcgagtaatcgaggccccgaaggcaaccctgaagactgttcagaggcagattcttcatgggatcctagataaggtgcctgctcaccccgatgctttcgggtttgctaagggaaggaactgtctggatgccgcaaaccgtcacgcgggagaacaggtagtgatctgtttcgacctgaaagacttctttccctccattggcgccggaaggatctttggtctgttccgctgtctcgggtatcctcatcaagtggcaagctgcttggccgctctgtgcacgtccgtgactccgagtcgcgttgtcgagcacatgtctggtccagatcgggatacatatcgcaaaccacacctgcctcagggttctccagcctcaccaggcttggcaaatcttgcagtgttcacactggacaaacggctgagcgccctggccaagtcagtcgacgccaattactctagatacgctgatgacctctctttttcaggcgattcccacgttgcaggcattctgctgcgtgccgtgccccagattattgaagatgagggctttcagcctaatagcgccaaaacccggataatgagcaagactagcagacaagtggtgacaggcgtcgtggtgaaccatcatctaaatgtcacccgcaaagctttcgaccagctgaaagctataatccatgcctgcgggaaggctggagatttgaggttaaacgaccccgtgtttagaacctccctgctcggtaaaatcggatgggtttga

SEQ ID NO: 12739 - RNA, 960 nt, synthetic construct
  source 1..960: mol_type = other RNA
atggacagaggtgccctggcagttaacctggctcagggcctgtgtagcgggggatggtcagctcctgaggtgggagctatactggcacgtcgtctccctggagcagcgaggagattggcccctcggatcgcgtccgaattagtcactgcagcccccggcccgtatgcaccaactgctcgaattacacgcgccgttctgcaacggtgcgagagcttcgagcgcctctaccgctggtgtaatagaaatgatatctggcctgctcccgacttgagcaggccctctatggctccagtcgccgcctttgcccgactggatctgcctggccttgcgacacagaaagccctcgccgactggcttctgctaccaccagagcgccttgactacctcagtgatcctgcgtctagacatgaaagacacggtgactttgcagtgaaccactatgcttatgttctccaccggaagacacatggcggactgcggcttgtcgaggcacccaaaccgaccctcaagtcactgcagaggcagattctgcggggcatactcaatcgagtgcctccccacgatgacgccttcggtttcgtgagaggtcgcaattgtagaggcgctgcccggagacatgcaggcgaacaggtggtaatctgctttgatctgaaggacttcttccccagcattggagctgggcgggtatttgggttgtttaggtgcttaggctacccccagccagtggcccgacatttaaccggactgtgcaccaacaccagtccttccaggatcacggatcggctaccaccccccgataggcccatgtatcgccgcccacacttaccgcaaggagccccttgttctccagccatggccaacttggcagctttcgggttggatcgttcactgtccgggcttgctaggagtctcggggctgggttttcgaggtacgccgacgacctggccttctccggctga

SEQ ID NO: 12740 - RNA, 1305 nt, synthetic construct
  source 1..1305: mol_type = other RNA
atgaaaccccgtgcactggcctatcgcctggctgtcagtgccacccagggtgcttggagcctgccagaagtccaggctgttctcgcacggcgacttcctcccgcacacagacatctcgccaaggatatcgcggcagcgatgctgtcatgcggcgaaggctccgaccttactccaccaccccaggtggttgctcgcgctttacctggcacccccgccttcgaaaacctctacctgcactgtaggaacacaaacgtgtggcctgctccagaaaccgagcctccagtgatgaggccactgcctccgtttgacgggctggatctgccccaactgccaacggaaggagagctagccgcttggctcatgctgagcccagagaggctggctcaatttgccgacttggctggcagagctgaggcctctcccgaaacagcgattaaccattacttctacagggtcgtacctaagcgggctggaggcgtgcggcttattgaggccccgaaaccggccctgaagggccttcagagacaggtgctgcgcggcatcctggatcctgtgcctgtgcatcgcgacgccttcgggtttgtgaggggacgcggtgtcactgcaggagcagcacgtcatgccggggaagcagttgttctgcgcttcgacctggccgattttttccactcagtggggcgggggagagtctttggcattttcagagccatggggtaccctcacaatgctgccagatgcttggccgggttgactaccacagctgcacctccgtggataatggagaggcttggagcgggtgaccgcccctatttgcggatcccccacttgccccaaggagcacccacctccccagcactcgccaacctcagcgccttcggactcgacagacgactcgccggtttagcgaggcggcttggagctgcatggagtcggtatgccgatgacatctgcttttctggcgacccagacattgttgcgcctttaatggccgccgtccccggaatcgtggctgaagaggggttccgcctcaatgctgccaaaacacgggtaatgcgcgcccaggcaagacagtgtgtcacgggcctagtggtgaatcgacatctcaatctgcccagagaggagttcgataggttgaaggcgatcatacacagggcggcctccccaggcgatgctagactagctgatccccgttttcgagccgccttagccggccgtattgcatgggcagaggccgtaaatcctgctcgaggtgcaaagctgcgggctaggctggaggccgcattagctcagaaagtggccctgtga

SEQ ID NO: 12741 - RNA, 1275 nt, synthetic construct
  source 1..1275: mol_type = other RNA
atgaccccgcaatcccctaaacgccttgcccaaaacttagcggagtctttaagtctgtccgtgtgggataaaagagggattgctgactgcctgtgtaggcgctttcccccagcgctgcaacggttcacccagctgcaaactcaaggtctgctcgaccattttccaacacagattgcccccggacgaaccgcagtggcttcagcactcgctcagtcatctgtgtttgcccgcattcatcgctactgcgtcctgaactcggtgtggccagctccagaccttagggccccaaagatgcagcctctgcaggcctttgcccacctcgagatacctcagctggccactctaggggacttggctgattggatgctgctaacaccccagcagctggattattatgctgaccagaccggccggcatgaggagcacggagacatggctgttaatcattatcactaccaccttagcccaaaaatcggcggaggacatcggctgatcgaagcgcctaagccccgattaaaaagcctccagcgactgattctcagagccatcctagaccacatcctgccgcaccccaacgcatacgggtttgtgcagggcaggaattgcatagaagccgcagcccggcacgtgggagaaaaggcagtagttgctcacgacctgagggattttttctcaagcatccagggaggccgaatctacggcattttccgcgctttgggctatccgccaaatgtggcccatgccctcactgggttatgtacagtcaccactcctgccagaattcggaacaggatgggtttccatcagcgccaggcattgagagtggcacacctcccccagggtgctccaaccagtcctgcactcggtaatcttgcggcccatggacttgatcgaaggctgaccgggcttgctagatccctcggggctacatacacaagatacgccgatgacctgaccttcagtggggatgagcacataatccgtgcaatttgtgtcgcagtgcctgacatagtctccgaggaaggcttcgccttgaaccccgctaagactagactgatgcccagccaccgtcggcaggtagttacgggcattgtagtgaataacgccacgaacgttgacaggagggagttcgatcaaatcaaggccgctatccacgccagagcatggcagacagatcccgcgctccaagcgcgtttgtctggccagatcgcctgggtccggcagctgaatcctgctaggggcgcaaagttggaacgcctgatggcccgggcctga

SEQ ID NO: 12742 - RNA, 1161 nt, synthetic construct
  source 1..1161: mol_type = other RNA
atgatcgtcgagtttccccagcgctacgctcccgatgccaatcggatagcagaaatgctctctaagcaactggtggtgagacggctgtttaaacattgtaataaggccgacgtgtggccatctttgcctcttgaaccccccaggatgctgccagtggccccattcgatgcgcttgtactgcccactttgcataccgccatcgacctggctgactggttgctgcttacgcctgagcagttggacgccttcgttgataggaatggttggagggagacacaccccatgcctggcgtgaataactacttctacagaatgagccccaagagctcaggaggtctgcgtctcatcgaggcaccgaagccgcgacttaagtcactgcagcggctcattaaccaccgcatcctcgcaaaagtgccaacccatccagactcctttggcttcgtccgcggtcgcaactgtataggagccgcgcaacgccatgccggagaagaggtcgtaatcgggctggacctaaagaactacttctctagccttcggtatggaagagtgtacgccttctttcgtcacctgggctatccagtttcagtggcccatggcctgagcggcatctgcacaattgttaccccttccaggatcagacagcgaatgccatatgagcagcggcagacactgatggagcctcacttacctcagggcgctccgagttcccctgctttagccaacttacttacatacagactcgataggaggctggcgggtctggcacgtagtttgggcgcaaattatacaaggtacgccgatgacctcaccttcagcggagatagtggcgtgcgggatgccgtgctaaccaccgtccccgaaatcgtcgaagaagaggggttcagaatccgaactgggaaaactcggattatgccttgctataggagacagatggtactggggatagtggtcaacgagacgattaatatttcccgaaaggaatttgacagactgaaggctatcatacaccagaaggcatggaaaaacgaccccgctgagtttgagaaaattctggggcaaattgggtgggttgagcaggttaacccatcgaaagcgcaaaagctctatgcaaaactcgaactagctaatgctcgcgaacacgtgcagggatcctctacttga

SEQ ID NO: 12743 - RNA, 1311 nt, synthetic construct
  source 1..1311: mol_type = other RNA
atgcaccccgaccagcggaattcgctcaagattttcgccagattggtggccccatcccttgccaaaggtcggtgggccgtttcagacgtaacgggggcgctgaaaagacggctaccagcccagttccagagagaagcacagctcatcgcagaggacctcgtggccttcctacccgcaatgactgcaccaaacgccggggctatcagtaaggctctttgcgcgtgtgacgcatttgtgcgactgcacggtgagtgtctgcgccgagggttgtggcctgacccagatctgaattctgggaagatgctccctttgttcccctttgccaggctggatctccctaacatcccgactttcgccgcgctggcagactggctcgttatagacggaggaagattgatgtacatggctgatatagccaaccggcacaatgagcatcctgatgcacccgtgcatcactacctgtatggcctgcggcctaaacctaccgggggttatagggttatcgaagcacccaaaagtggtctgaaggcccttcagcgccagatcctgagggggattttggataaggtgcccgtgcactctgacgctttcggcttcgtacggggcaaatcctgtgcccaggctgccaatcgacattgcggagctcagaccgttgtgggctttgatttacgagactttttcccaaatttggctgccgccagagtatttggtttatttaggagactaggataccctgacgccgtcgcacgcactctgactggactatgcacaacaaccacaccccagagagtccgtgcccggcttccacatcttcagggccaacttatgagaacaccccacctgccgcaaggagcaccttcctcacccgctttggcaaacctcatcgcgttcactctggataggcgcctcgctggcttagctagagccctggatgctcagtatagccgctacgcggatgatctgacctttagcggagacgcgggaattgcacccgtgctgaccagggccgtgccacatatactccaggaagagggctttgtcctgaatccacgcaagacaagggtcaggaacgctgcccagcgccaagtcgtgaccggcatcgtggttaaccagcatatcaatgtcccgcgagctcggtatgacctgattaaggctaagattaacgctctgcgccacaccgatgaccttggccgtctgggccacgcacactgcctctctctcgagggccaaattgattgggtgtgtacgctgaaccctagccgggggcagaaattaaggcaactgtacgcccgtgccattaatggtgggtga

SEQ ID NO: 12744 - RNA, 1236 nt, synthetic construct
  source 1..1236: mol_type = other RNA
atgccagaactgactggggctttgcagaggcggctacctccccagttccaccgcgaagcccagctcattgctgctgacctgatccctttattgcccgtcatggttgcaccaaccgacggcgcaatcacaaagggactgctgaactgcggcgcattcgctcggctgcatcgggaatgccttaggttaggtatttggcccgccgcagatctgcagtctgaccaaatgaggccttacgcgccattcgcccaattggacttgcctgatctgcgcactgaagccaatctggccgactggctcatgctcgattattctagagtagcctatttcacggatattagtaatcgtcagaatgaccaccccgatgcgcctgttcatcactacctctacggactgcgacggaaaagctccggtggcctgagagtgatagaggccccaaaatcaaacctgaaaagtatccagaggaggatcctgcacggaatattagaccaggtccccgtacataccgacgcatttggttttgttcggggaagaagctgcgtccaaggagctgcgagacactgcggagaggagtgtgtggtgcgtttcgacttgagagattttttcccctcaatccagagcaagcgagttcttggcctgtttagaaggcttgggtacccgaggtgggtcgcacagagccttacaggcctgtgtactacagctactcctggtcgcgtactggtcggcctacccccacagcaacgccagcagatgagggtgccacacttacctcaaggcgccgcaacctcgccagctcttgccaatcttatagcctttacactcgaccggcggttgtccggtctagctcgctctgtgggggcagggtactcacgatatgccgatgatctgacattcagtggagacattggcatcaccggcgtgctcgaggatgccattccccagatcatcgctgatgaggggtttgtcattaacccgaacaagactagggtgacccacagatccgagcgccagaccgtgacggggatcgttgtgaatcagcatctcaatatctctagaaagcagtatgatcagattaaggccattatccacgctttgcgacgacctgacgacccgcggagactcgatcaagcgttttgtctgtccctggaagggaagatagactgggtgtgtgccgtgaacccccatcgcggaaacaaactccgtcgcctgtaccaggtgaccattgaggacttcggctga

SEQ ID NO: 12745 - RNA, 1302 nt, synthetic construct
  source 1..1302: mol_type = other RNA
atgaaccgcacccagttcgcatcgagcctcgctcctagtctgctggcccctagatggtccgagactgagctatctcagtgtttgttgcagagactccccgggcagcaaaaagctctgtccgctcgacttacagccgaattattgcagaccttccccggcccagtagctcctcccgaaaggcagctggtcgcaggacttagaggcaggcccacattcgaacggctgtaccggcattgtgctaagcaggctatttggcctgcccccgtcctcactcagacgagaatgcaaccggcgtcaggattagggcggccagaagtgccacacctcgatactcccggcgattttgccgattggttgcctctgcctgaagatcgcttgaactatctggccgatgtggacggccgctacgcttgccacgcttaccgcacaataagacactaccacgccgtcgctgaagctaagaagagcgggggccatcgtctgattgaagcgcccaaatcccaactgaaagcagttcagcgacagatcctgcagggcatcctacgtcagattccagtgcatgaggccgcctacggatttgcacccggtaagggttgcgccgacgcagcaagacttcactgcggaagggacgaggtggtgtgtttcgatctcgcggacttcttcccttcagtgtcctttgcgtgggtctttggagtcttccgtcacctcggttatccggaggcagtgacaaggcttctggccggcttatgcaccacggagactgccccggacgtgcttgtgcagtttccttttgccatgcgacaattgtataggatcccacatctcccacagggtgcaccaaccagccctgctctggcggacattctgctctttaatctcgactgtcggctgaatgctcttgccacaaaactcggggcctcttatacccggtacgttgacgatttgacattctctggccccgccggcttaggcagaggactactgaagctggtaccggagataatccgagacgaggggtttcgcagcaacccaggaaaggtgagggttatgcccagtggggggcgccaagttgtaaccggtatcgtcgtgaatgcacatcttaacatgcgaagagcagagttcgatcagctaaaagccgagattcatgcctgcggcagacctggggatctgaggttgtcagacccacactatcgggcaaggctgatcggacggatacaatggctgcggcacctgaatcccatcaggggcgagaagctgctgactctcctgggacgcgccgaagctcagaaaattaccgcctga

SEQ ID NO: 12746 - RNA, 1314 nt, synthetic construct
  source 1..1314: mol_type = other RNA
atggccaggtataccaaacaggacctgttgtttgggcccttgagccagggcctttcccagctggaatggacgttctgggatatcagacaccacctggagcagcgtctaccctctcggctcaggtctgtctctcacagattagcgcgcgaactcaagcagacatttcctgccactgcagcccccgacgacaggcaaatcctgctttacctgaagcagtcaccagctacagacccgttgttcagacacttcacgctgacaggtgccattccagatccattgatcgaccctcctcagttccgccctgtacccgccttggatggccttggcttacctgtgctgactacatccgacgacctggctgcatggctggctctgcctcccctacagctgactaggtttgcggacttattgggactcagtgccaatgcagatagcgcctttgctcctcactaccggcatcacctgatcgccaaacgaaatggaaccctccgacttatcgaggagccccgccccttcctgaaaaagttgcagcggcgcatactccgggacatgatcgctcatattcccacccaccctgccgcctttggcttttgcagaggtaagaattgtgctcaagcagccgcacgccatgcgggagaagagatggtagtgagttttgatctcagcggcttctttccgtccattcatcaccaccggatttatgggctgtttcgttccttcggataccctgcagcagttgcccgacatctggccggactgaccacagccctcacacccagagacgtcctggctacagcccatctagctgatagggatcaccttaccgggaggcatctgccacaaggggcgccaactagcccggcacttgccaacctggccgctttcaccctggatacccgattggcgggcctcgcaagatcgctgggtgctaactacacgagatatgccgacgaccttaccttctcaggagatgctccaattgcaaacccactccagcgcatggtccctcaaatagttcgggattgcggctttgtgctgaacgccgcaaagactagaatacagccagctcatcgccggcagacagtgactgggttagttgtgaacaggcacctcaatctgccaagggcggactatgaccatctcaaagctgtcatccaccacctcagagatcccgtggatccgcgccgagcagaccgtatcttcatcgatcaacttgccggtcggattgcttggttcgaacaggtgaatcccaccaagggcgctaaactaagggagtggctggccaacgccttacagactgggaccattggctga

SEQ ID NO: 12747 - RNA, 1326 nt, synthetic construct
  source 1..1326: mol_type = other RNA
atgtccggtcgtagcgtgtctgaccgggtgtttggccccctggcagctagccttgtacgtcaggcttggactgccctgacactgaggcaacacttacaggcccggttgccacaggctctaagtgctgaggcgcccgggcttgctagagatctgaaagcagctttccctgggacagcagctcccgaccggaaacgggtggccttgtggctgtcgatgtgcccgctagccggcgatctcgtgactatcgccagggcatctggagccccaatcccacctcccttagaccccgaccgatttcagcccccacctgcgttcgctggactcgacctcccacctctgggtacccttgccgacctggccgactggttagccctgaccctgccccagctcagtcgcttctctgatctccacggtattagcgccgctcaggataacccatttgcacctcattatcaccaccacctgctcgagaagcgcgatggaactcagcggctcttggaggaacccaagcccgttctgaagcatctccagaggagagtactgaggcagatcctggccagaatcccacctcatcctgccgccttcgggttttgtgcgggacggagctgtctgcaagcagcccaacgtcacgccggcgaagcccttgtagtgtgctttgacctgaaagccttcttcccctcaattggctggcaccgcgtctacggcctgtttcgcgcattcgggtacccccctgccgttgcaagacatcttgcgggtctgtgcactgccataacaccgccaagggtcctagctgctccacggctcgcagccagggaccttctgacgaatagacacttgccgcaaggagcccccacatcccctgcactggcaaatcttacggcctatgcgctcgatgccagattagcgggccttgccagatccctaggcctgacatacacccgctatgccgacgatctgaccttctcaggggatacacgaccggctgcagctttgcaccgggctgttgcagacatagtgcgcgattgtggctttaccttaaaccgagacaagaccagggtccagccacgacatcggaggcaggtcgtgactggagtggtggtcaatcggcatctcaaccttcctagagcagattacgaccgcctgaaagcagttattcaccatttgcgtaacccagacgatccccgaagggctgatagggtgttcctggatagattggccggcagaatcgcgtggctcgaacagattaatcctgccaagggggctaagctgcgcgacagactggctgcagctttggccaccacaagggctacccgccaccatggatga

SEQ ID NO: 12748 - RNA, 1302 nt, synthetic construct
  source 1..1302: mol_type = other RNA
atgtccgtgctagtggaccccgtcttcgctgcccttgccagtggcctcgtgcacgtggattggactgcggatcaaatcgctgcccacttgcgcagacgcctcccaaggaggttccagtcaagagcgggggacatagccagacatctgcatgatcggtttccaggcgcggctagccccgacgaagaacgtatcgcagccgcactgtcagatgggcctgctgcaagggccttggtgcggttctccgacaagactggggaactacctgcatacatttggacgcccgctagattccaacccattccagctttcgccacatgtggattgcccgcccttaccactcctgaggagctggccgactggttggggctgaccactgcgcaactgacaaggtttgctgatctgaaaggtctgtcagcgcagacggataatgcttttgctcctcattataggcaccatctgcgacccaagcgcgacggaactctccgcctcatcgaggagccgaagccgctattgaaaacacttcagcggaggattctgcgcgggattctggcacgagtcccacctcacgatgccgccttcgggtttcgggctggacgtaactgtaccatggcagcagctagacacgcgggagaaggtggtgtggtccggttcgacctggctgcattctttccctccattgcccagcaccgggtctacggcctctttagagggtttgggtatcctgccccagtggcccgtcatctgaccggactttgcactgcccacacacccgccagggttctgacaacgcctggcctggcagcagctggtcacctgtctagccggcacctaccacagggagcaccgacctcgcctgctctcgctaatctggtggcctttaccctggacaccagactcgcaggccttgccaggcgcttagacgcaacctacacacgctatgccgacgatctttgcttctctggcgatgctcgtatagccccagtactgcgggctgcattacccggcatcgttgccgattgcggctttcacctcaacccggctaagaccagagttcagccagcccatcatagacagacagtaactggaatcgtggtcaaccaacatttgaatctgagcaggcgggactacgataggctcaaggcccagatccaccacctgagtgaccctgccgaccctagacggggtgatcgagcgttcctcacccgcctggagggacgaatcgcctggttagagcagcttaacccccataaaggcgcaaaactccgagctcgcttagcagccgccttgtctccaggcccctga

SEQ ID NO: 12749 - RNA, 1317 nt, synthetic construct
  source 1..1317: mol_type = other RNA
atgctctccctacatgtacttctccctttggcccaccggctggcaaaccagccttgggaccagccattactggcggcctgtctgcggagttatttacctccccccctgaatcggcaggctaatcgcctggcgaaccggctgattaaagatttccccggaacaactgctcccgatgcgcagcagattgccaaggctttgggccagacgaccaccgcagccagacttgccactctcgcgcgtcaacaaactcggcctcctagccctgatctaaatcccccacacttccgcccaaatcccgctctccacatcccagccatccctgttatggaaaccatccccgacctggcattttggctcgggctgaccgaggaccaactaacacgctttgccgacctcagggggctctcagcccgtagtcatccggagttcgggtcgcattacaggcagcacctgatccctaaaagcgacgggactctgaggctgatagaagagcctcgcccgttcctgaagagacttcagagacgaatcttgaccggactgcttaatcatgtcccacctcatcctgccgcccacggattcagacctggccacagcgtccttacagcagctagggcgcacgccggcgaacaaattgtgctcaggttcgacttgaggcacttttttgcttctatcacaatcgctagagtctacggactgttcagaacaatgggctatcccgcaaccattgctcggcccttagccgggctcacaactgccattaccccaacagaggtgcataaaacccctcacttggccggagcagagctctttgcagctcgacatctgccacagggtgcgccgacttctccagcattggccaacctggccgcttggtttctggatctgcgtctggctggtctagcccgctctgttaacgcccagtacacacgctacgccgatgacctcaccttctccggggataggcgaatagctccagtgctgttggatgcacttccccacattattacggaaaccggctttcgactgaacctctcaaagacccggataatgcccgctcatcagcgacagactgtgactggcttgacggtgaacaggcatcttaacctgccccgcgaccagtatgatcggctcaaggccacaatccaccacttaacgtgcccagatgaccccagacgccaggacccagcattcctggcccagttaagcggcagaatcacctgggcagagcaagccaatccccacaggggtgcaaagctgcgggaggcacttgctgctgccctggaaagactgccgccaccgccaatatcccccatctga

SEQ ID NO: 12750 - RNA, 1326 nt, synthetic construct
  source 1..1326: mol_type = other RNA
atgactcgtcctctccggcctccgtttccagacagggctgctcttgcccctttagccgcctccttggctcagcaagactggacagaggcagccttggtgctgcacctgcggcaacgtctaccaggggaccagcctgccagagccgcaagactggccaggagcctcttgcagtcgttccccgcaaggtcagcccccgatgcagctcagatcttgcgccacctccagcaatcaccacagggaagagccgtacttgcccacgcacgccgttatcagcttctccccgcccatagtttaacccctcccgcacataggcccattccaccacttcatcacttggccctgccaccactcgcaacggaggcagagctggccgactggcttgctatcacccctgaccagctgacccggttcgccgatctacggggccttagcgctcgaactgactcaccgtgggctccccactatcaccaccacctgatcgcaaaatctaatgggcaactccgtctgatcgaggaacctaagccattcctcaaaaggctacagagacgaattctcgccggtctgctgaatcacattccgccacaccccgctgcgtatggtttcgtccccggtcgcaattgtatacaggctgcggcacggcacgctggcgaacaaattgtgctgtgcttcgacctggcccagttttttcccagcataaccgatcgccgcatctacgcgctgttccgcgcactcggatatccagcacattgcgcaagaagtctcgccgggttgacaactgcactcacgccggctcatgtgctccataccgccaacttggccgctagggaccagcttagcaaccgacatttacctcagggagcgcccacttcccccgccttagctaatctgagcgccctgcagctggatagaaggctggccggactggctcattctctgggcgcgtcctacactaggtacgccgacgatctgacctttagtggcgatgcgcggattgctccgattctgcagagggcggttccacaaatcgttgcagaacaggggtttagactgaatcccgccaaaacaagagctcagcctgcccatcaccgccagactgtgaccggcataacagtgaacgagacattgaacccagctcggggctcctacgatcttcttaaggcaaccatccaccacttatctcgacctacggatcctagacggcacgatcgggcgtttttggccaacctacacgggcgaatcgcttgggtcgcccaaattaaccctgccaagggagccaagctccatgaccgcctgcatgctgcactgctgacaccccaggactcttga

SEQ ID NO: 12751 - RNA, 1188 nt, synthetic construct
  source 1..1188: mol_type = other RNA
atgccagcctccttcgttcgggcccccgaaacgctagccgaagcactcatcagggcttttcccggacccgtagcccccgatcctgcacttattttaggcctgctggcccaccaacctgaaatcgcacgcctgctcagtcacgccaggaggcacgatgtggcgccagctgtatggttacagccgcccccatttagacctgctccggctctcgctgacctacctctccccaggctcgccacgtgcgatgcattggccgactggttagcactccccccagaccgcctgaccctttacgcagacctccgcggactaagtgcccgcacagactctccctttgccccccactatcaccaccaccttcttcctaaagcggatgggtccttgcggcttctggaggaaccaaagccaatactgaaacgacagcagcgacaggtcttgcatggcctgcttagccgtgtgccaccacatgatgcggcgttcggcttctgccctggacggaattgcatcggggcagctgctagacatgcgggtgaggccgttgtgctggggttcgatctggtcgatttcttcccgtcgatcgggatacagagagtttacgccgtgtaccgaaccctggggtaccccagagctgttgcttgggcactcgccggcttgtgtaccgcgttaactccgcctaagatcctcgctaccccagctctggctgccagagaggccctgtccaccaggcacctgccacaaggtgcccctacaagccctgccctagccaacttgtgtgcacatgccttggacagaaggctggccggactggccaggtcacttggtgcaagctatactcgatatgccgacgacctggccttctctggcgacacaaggatcgctcccattctgcggactgcagtccctcggattgtggcggaggagggatttagactgaatcctgccaaaacccggcagatgccggctcatcaccgccaatgtgtgactggcctggtcgtgaacgccggggtgaacacacctcgtgcagccttcgaccagctcaaggcaactttgcatcgccttgcacgggctggcgatcccaggagaacagatcccggctttctggctcgtctgtcaggtcagattgcttgggtggagcaggtcaatccagctcggggagctagactccgcacccgatttgacgcactgtga

SEQ ID NO: 12752 - RNA, 1338 nt, synthetic construct
  source 1..1338: mol_type = other RNA
atgcccccagccttcaaccgaccagtggtttccctagcggtactgggccctattgcctcaagcctcgtgcaggccgaatggaaagaagccagcttgaagcaggtgctcctgcaacggctgcccgtgaggatgcgtaaccaggcgggtcgagtggctggtcgcctgatccaggcctttcctggaggatccgcacccgatgttgggcgcctgagacgaatgctgcaggatctgtcaatatcagccaggctgcgggaccatgcgaggcgaacagacagtctgcccgcacccgtactcgaccctcctcgatttcggcccgtcagtgctctcgacagacttgatctgcctaagctcgcgactccgggggacctagctgacttcctggccattactcccgagcagctgatccggttcgcagacttaagaggcctatcggcacattccacggacccgttcggccctcattacttatgccaccttaggccaaaaagaaatggtggccaccgcctcatcgaggctccaaggccttttttaaagacacttcagaggaggatcctacgtggcatactggaccacgtcccaccacaccacgctgcttttggcttcaggaggggacgcaattgtgtccaggcagcagctcgacacgctggagaacgggtggtcttagggtttgacctgacagatttctttcccggcttggacgtggcaagagtatacggactgttccggtctttggggtaccctgctgcaactgcccgggatcttgccgggctctgctctgctctgacccctcgtagatatctgctcggtcacgatcccacgctcaccggcagacttcatgccaggcacctgccacaaggcgcaccaaccagccctgctttggccaatctcctggccttccggctggactgtagactcgcagccttggctagaagccttgatgcccagtatagtagatatgccgatgatttaagtttctcaggcgacgcgagaattgcgcctatcctgttgcgcgccgttcccgaaatctgcgcagaggaggggtttcgccccaaccatcggaagacacgcgtgatgccatcccatcagcagcagaaagtgaccggaattcttgtgaatcaccacaccaacctgccgcgggtcgagtacgatagactgaaggccattctccatcgcctgcagcaacccgatgacccaaggcgccaagatatggcctttttggggcatctcagcggacggatcgcctggcttgcccaactaaacccgcaccgcgcagctaggttgtctcagtctctgcagctggtgagcgcctccgctcgtactgttcccccagctcggtga

SEQ ID NO: 12753 - RNA, 1323 nt, synthetic construct
  source 1..1323: mol_type = other RNA
atggcacccttgcaccctgacgatccacccccactaccccctgttgccgctgtgttcggacctctggccgctagcctcagccagtctccctggcaggaggacgcccttcatcgcttgctgttgacccggcttcctggccccctgagagctcaagctcgccgaatagctcagggcctgatcggcgcctttccaggaagtgttgcccccgatgccgcacgcctctgcaaggttctgagggatctcccaggcgcgagaggactgagagctcacgcagctcggacaggtttacgcccggcacccgaactgacccctccaacatttctgccagcccccggtttagccgggttagccctcccagtgctcacatctccggcagacgtcgcggacttcctggccatttcaccagaccagctgatccggtttgccgatctccgggggttaagtgctaggtcaccagatcctttcggcccacattacctatgtcagctgcgtcctaaacggcgggggggatggagattgatcgaggcccctcgcccgtttcttaagaccctgcagaggagggtgctctccagccttctggcccacgtaccgcctcatcccgcagcatatggctttcgcagaggtcgtaattgcataatggctgcagcacgccatgctggagagccccttgtagccggctttgacattgcagacttctttcctagactcacagtagcccgcgtgtacggcctcttccgagcgttgggatatcccgccgccgtagcgagagacttagcaggtctgtgtactgccataaccccagccgccactctagcagcgctacctgcccgagacgctcctatttggaggacgcgccacttgcctcaaggcgctcccacttcccctgcactggctaacctgcttgcttggaggcttgactgccggttggctgggttggcccggattctgggggcaacatacactaggtatgccgacgatctgaccttctcggggccagctaggattggcccaatccttagggatgctgtgccagcgatcctccgaggagaaggcttcgcgcccaacctggccaagacgaggctgatgaccgcccagggtgcgcaaattgtcaccggggtgatggtgaaccggcatgtgaatctgccccgagcagagttcgaccgtctgaaagctgtcctgcaccacctcgccagacccgatgatccgaggcgacaggatgccgggttcctcgcagctctgtccgggagaatcggatgggtggaacagatcaatcccgcccgtggcgctaaactgcgggcaagactcgtcgccctgactggatga

SEQ ID NO: 12754 - RNA, 1284 nt, synthetic construct
  source 1..1284: mol_type = other RNA
atgcatctccagcaggccataaggtccttggcagcgagcctctctcaagctcagtggacttactttgataccaagctcattctgcagcagagactccccccacgccttcgaaacttggcccccagcttagcacgccgactggttagcgcacttccccaaccctacgccccttctgccagaactattgcccagaccctagcctccttcccggagacagggcagatcgctcgatataccgaaccaaggaagctggtggctcccttcccgattgccccacagaagtttgcccctattgatatcttcaggtcgctaaacctcccagatctgagttcctgtgacgagttggctgagtggctggccatccctcccattcagctcgtcagatttgccgatctcaatgggctcagcaacaggaccaagaatgcattcgcaccgcactatcgctttcacatcatcccgaaaagagacggaacaagccggttgatagaggagccaaagcccgccttgaaacggctgcagagacgcatccttaggtcaatccttaatcaagtacctaccagtcctcacgctttcggattcgtccaggaccggacatgcatccaagctgccgcacgccactgtggagaaccagtggtggtgtcttttgacctaaagaactacttcactagtattacttaccccaggatctttggcgtcttcaggtgcctgggttacccagcggatgttgctcggcatctgaccgggctggtgacgctggtgattccagctcatgtgcgggcccagttgggccgtattggccaccacgacctgcgaaggcgccacttaccccaaggggctcctacaagtcccgctctggcgaacttatgttcatataacctggaccgacgtttagctggactggcgcagagcctggacgcaacttatacccgttacgcagatgacttgacgttttccggtgagacacatattgccagaacactgtgctccgtggttcctgatatcataagagacgaaagattcactaccaatcctgataagacgcgcgtgatgccatctcatacctctcaggtcgtaactggtatcgttgtgaaccaccatgtgaatatcaccaggaaagactttgacagacttaaagcacgcattcatcggctgcggtcacagggcaaggacgatctggaaacactgcagcaccttgatggccaaatagcctgggtcgaacaggtaaatcctctgaaaggcgccaaacttcggcagcggttcgagcacgcgctctcactcacatga

SEQ ID NO: 12755 - RNA, 1188 nt, synthetic construct
  source 1..1188: mol_type = other RNA
atggcgttcgcctctcacctggccagcgagatactgctgtggtacccgaaaacttatagcccctgtcagtctgacctggctacgacccttagtagacttcccgagatcgccgacgtgtggaattatgcacgtcagaaaaatgtgtggcctaggagtagaattgacactcctgagttcctgcccgctccggccttagagggcctagacatcccacacctggctacatgcgcagatttagccgattggctactcatctcccaggaccagctgactcgatttgccgatttgaagagcctgtctgcttccactgataatgcatttgcaccccactacaggtaccacacaatctctaaagccagcggccaggcgcgactcatagaagagcctaaaccctttctgaagaccctccaaaagagaatccttaaaggcattctcaaccatgtgccaacaagcgaaatctcgttcgggttcacccgaggaagagactgcctgcaagcagcttcaaagcactgcggagaagacgtcgtggtgacatttgatctcaggtcattctttccatcagtgcggcagagtagggtgatcgggttgtttcgttgtctgggatatcctgatgcagttgctcgtcatctggcaggcctgactaccgtcattacgcctgccttcgtcttaaagcgcttacggctcgaaaatgataggtttctcccaaaccgccatcttcctcaaggcgcctccacctcccctgctatcgctaacctttctgcatacgcgttggaccgcagactgatgggcttggccaggagactggacgcccaggttacccggtacgcggacgacatcactttctcaggaccccgagagattactacccccctgaagcatgccgttccagaaataattgccgacagcggttttgtcgtaaacccgcagaaaacacatattatgccccgcacacagtgtcaggtgacgacagggcttgttgtcaacgatcacattaacatactgcggcgggactatgataacctccgggctgaattgcaccatctgcttaccctggatgacccaaggagacgcgatgccagttacctattcgctctcgatgggcgcatcacctgggtggagagggtacacccagtaagaggtcagaagctccgcgagtccttcaatcaagtgttgctgcggggtaattga

SEQ ID NO: 12756 - RNA, 1290 nt, synthetic construct
  source 1..1290: mol_type = other RNA
atgaatcgggcaaatcttgctcagagtttagccggctcactggtgtgctgcgactggactctctgggccgtggagcaccaccttactagccggctgccctctgggtggtctaagaccgcctcaaacttggcctccgaactcattgcagcgtttcccgcaccgtatgtgccatcccaagcagccctggttcagagacttatctccagcgactatctcacccggattctggatcacgctatgaaacatgacctccggttcagcccgatactggattcggctcgttttgcgcctatccctgccttcgagggcctggacatccctcagatgacaaccctgtctgacttggctgactatctagcactaaacaccgatcagttagtgaggttcacggacttgatgggcctgtcaaatggtacagataacgtgttcgctccacattaccgctttcacctgattgccaagcggaacggtagacagagattaatcgaggaacctaagccggttctgaaatccctccagaggcgcgttttccagactatcctgaacaaagtccccgtacatgacgaggcttatggatttgtccctggacgatcctgtcgcgacgcagctgcaaggcataccggcgaacaggtagtcatcggcttcgatctgagaaattttttcccttcagtgagctatggaaggatttacggtctgttccgagcccttgggtacccagacggggttgcgcaccatctgtgtggactctgcaccattaggacgccaccccacataagagcacgtatgtcttacgatgatggacgggggctagaagccaggcatctcccacaaggcgcccctacctctcccgcattggctaacttagtgtgccacaggctcgactgtagactgagcggcctggctcacagtctagatgcgcgatttactcgatacgccgatgaccttactttctccggcgaccggcgcatggccaatgctatactcaaagtggtgcctcaaattgtcacaagcgaaggcttcgccttgaatcccaccaaaacacgctgtcaaggacagcatgggagacaggtcactacaggaatcgtggtcaattctcacattaacctgcccagggagacatacgactacctgaaagccgtactgcatcacctgatccagccaaaggatccccgcagaggcgatccagcctttctcaagagtttgagtggtcagatcggttgggtggagcaaattaaccccgggaagggggccaagcttcgtgagaagtttgatcagatcatacagcactga

SEQ ID NO: 12757 - RNA, 1332 nt, synthetic construct
  source 1..1332: mol_type = other RNA
atgcaggaggagagaactcctcccataggccgtactgcactagcatctgctctggtccatgcactgagtaccaccgcagcatggactgaaacggcactggtggacaccttcactcatgtcttgcaaggggctgcacccggttccgtggcttccttagctaggctgctggccgcggatgctagtgttgcctgcggtcccgaaaggcggttgggacagattatcgaggacgctccgtcattcgtcaggatcctccaaaccgtccaaaggcgacgcttggttctcgctcctcccctaaccccacccctgtttcggcctgcctctagatttgcagggctaccccttccttgcctcgcgacctccggggaacttgcagcgtggttggggttaacaccaactgagctcgattggtttgcagccaccctgccccaacgtggagagacacagccgccactgcagcactacagcctgagggccgtggctaaggcttcgggcaggttacggctgatcgaggcgccgaaaacgagactgaaagccattcagcgccagattctggccgggatcctcgcacatgtaccagcacatcccgcggcccacggcttcattgctggacgatcagtgctgacagccgtgaatcctcacgcaggagaaggcctggtggtggcggtagacctcgcagacttctttccctctactcctataggacgagtttggcgcctctttaggcaccttggatatcccgacgccgtggctcacctgttaacgggcctggtaaccactaggaccccgagccctgctcttgacggtctgttgctgcctccagagacacgtagacgccttcgagtccggcatctcccacaaggggctcctacaagtcccgcccttgccaatctggctgcctacggtctggatgtgagactctcatccctagccagcagactggatgccagctactctcggtatgccgatgacctcgttttctccggcagcggccctcagttgagacagagccagcgatttctccggctcgtctctgagattgctgccgccgagggatatgcgctccacccagacaaaaccaggataatgccatcaagcgggcggcagcaggttctgggtgtgacagtgaacgcccatctgaacttgccacgcccatcctacgatcttcttaaggctatccttacaaatgcctgtagacacggcctggccagtcagaaccgggaaggactgccccacttcagagatcacctaaatggccgcatcgcctggttcgaacaggtgaaccctgcccgcggcttaaagttgcgggccctgttcgaccgcatcgccgaatga

SEQ ID NO: 12758 - RNA, 1323 nt, synthetic construct
  source 1..1323: mol_type = other RNA
atgaccgctagagccgcacagtacctgggcaaaagggccccacgttccctccagcgtctgatcgagcatgtgatagcctccgccagaacgccctatccccctagttcggaacacgtggctagggcactgctgaactccacatattttgatgctgctgcccgcgctgttcttcaggcagactcccccccaaaagccgtccttcattcacccgcctttgcccctgcccgggcttttgctggactgccaattccccgaatcgagacagccggcgaactagcagcgtggttcaagctaagcgtggacgagttggattggcttgcggacactcggaggggacacggtagagcgtctcaggcccagctccagcactacagctacgccctggctgcgaaacgggttggagctcccagacttattgaatctcccaagcctcgtctcaaggccgcacagcgccgcatcctccatgaaattctggatcacgccccatcacattctaacgcacatggcttcgtgcgaggacgatcctgcatcagcggagcacaaattcacgccggtgaaccggtggtgctgcggttggatttgcagagattctttaccgggattcgagcaagtcgcgtccacggccttttccgggccttaggctacccaagcgagacagcccgcctcttgactggcctgtgcactacctgcactccccagatagctactgcagccatcgaggattggaggatcagacaggaatatggtgcccctcacctacctcagggcgctcctacaagtccttccctggcgaatctctgtgcgtggcgcctggaccaaaggttaggggggttggctcggaggctggcaatcaactacagcaggtatgctgacgatctctgtttttcaggcgatcgggcccttgctgctagagcaccgtctttcgtttctctcgtggagacaatcgccagcgaggaggggttcgtagtgaactcggataaaaccaaagtcatgcgcgcctcctcaagtcaacgggttaccggggtggtcgtgaatcagcacgtcaatgcacagcgtcatgactacgacgctctgaaggcaaccttgcataattgtcggacctctggggaccctgaaacgcaaaacaggaagggactcccagacttccgagcccacctggagggcagaataaactgggtagaacaactgaatccccaccgcggcatgaagctgcgcctgatgtttgacgccattcattggccagctggggccagagacgctggtgatagaagggccgatgcgagcaggaggccgcctttaccattcgcaggagaggcagactga

SEQ ID NO: 12759 - RNA, 1329 nt, synthetic construct
  source 1..1329: mol_type = other RNA
atggccgacagggctctcatcgcgagggagctagctgcgtttctgttagcaggggcttggacaaagggccgcttgctggctcgaaccaggcagtacataggcaattcagccccaaaggccctgcagagactcatcgaacacgtgtttgccctggtcgaaacaccttatccccccgcacctgacgaactggcacgcatgctcatggcctctcgggactttgatgttgccgctagacgcatgctgcgcgctgatagacccctgcagctggcactccacagtccgaagtttgccccatgtcggagcctggctggattgcccgtgcctaaattggaaaccccgggagacttagccgcctggctgggattacccatggaactggtcgactggcttgcggatactagacggggacacgcccatgccgctactacccagctccaacattattcctatacttttgtcccaaagcggatcggcgcaccccgattaattgaggcgcccaaggctcgactcaaagccgtacaacgtaggatcctacacgagatactagaccatcttcccccacatagtagcgcccacggcttcgtgcgcggacgttcatgcatatccggtgcccagctgcacgtgggtgagtacattgtggtacgactggaccttcgcaggttcttctcctcaatcggctcggcccgcgttcatggtttattccgtagtattggctacccttgggcagccgctaggttgctgaccgggctctgtacaacctgcacaccagcgaaaactctcgcagctctgaccgattggcgtgaaaggcaggagtacactgcacctcaccttccgcaaggagcccctactagccccacgctcgccaacctttgcgcttggcggctggataacagattgacaggcctgggcagaaggctcgggatcaattattctcgctacgctgacgacctctgtttctctggggggcgggccttcgctaaacacatgcctagatttctttccctggttggcacaattgtgggcgaggagggatttgcgctgaacggtagaaagaccagcttgctgagggcaaacgcagcacagagggtgacgggaatcgtggtaaatcagcacgtgaatgtcgcccgggagcagtacgatgcccttaaatccatcctgcataactgccgcgtttcatctgatccaaccacgcagaaccgggacagccacccagacttcaaagcacatctagatgggcggattggttgggtcgagcaagtgaatcctcatagagggagaaagttgcgactgatgttcgatcagattaagtgggctagcgctcgggcctga

SEQ ID NO: 12760 - RNA, 1317 nt, synthetic construct
  source 1..1317: mol_type = other RNA
atggcctcttccacgaccatagctaagggactcgccgccgcacttgtcgctggagtgtggaccgagagagccctgctcgcacgatgtgagggcttcctgggtgcggctacacgagccagtcagaaaaaacttatatccgcccttttggtaagggcctacgaccgatatccacactccccagcaagcttggtgcggtggctcctgagaagccctgcttttgagcgagccgcagcccccttattacgtgccggacccaagcctcccgtcgttctcaagccaccactcttctggccagctcctcccctggcaggcctagatgtaccgaagctggccacacctagagacttagccgattggctggagatctcagtggaacaactggactggtttgcctgtgcgaagcggcaggccatagctctgtcgttcccaaagttgcgccactacgagtgtgcactggtgaggaaacggtccgggggaagcagactcatcgaagctcctaggcggaggctgaaagcgattcagcgtaggctacttcgggaggttctggaccacgttcccaccagcgatcgcgcctacggttttgtgcgggggcgctcatgcattgacggggctcaggtgcatgcggcggaggaagtggtggtcaccctggaccttcaacgcttttttcagtctatcgcagcaagaagagtgcatgccactttcagaggcatcggctatccttgggccgttgcacggctcttgaccgggctgtgcacaactagggctcccagttggggtttcgcagatgtcccctatacagagtttgactggcgcgcccgcaagatgttggaagcaccgcatctgcctcagggggcaccgacttctccaactctggccaatctggcggcctggaggttagatcggaggttggccggcctcgcaaggaggctagatgctaactacactcgttatgctgacgatctcgccttctcaggccggcggaatatcgctagtccaacatttctgcgcgctgtgggagagattgtagtcgatgaggggttcgtgcttaatcgtcctaaaacgcacattatgagacgaggagccagacaggaagtcaccggcattgtagtgaacgaacacgtcaacctccccagagatgcctacgatgctctgaaagcgaccttgcacaactgcattcgcaacggtgctgcagtggagaatcgcgacggacacacagacttcagagcccatctggacggcaggatcggctgggctgaaaccgttaatccccatagaggggctcggctgcgcgcaatgttcgaacgaatcacttggtga

SEQ ID NO: 12761 - RNA, 1302 nt, synthetic construct
  source 1..1302: mol_type = other RNA
atgcccactagacattgggcggcgaataatctagcggccaggcttctggcaggtccctggactcaggaggcaatcgcaattgtcatcgacgccgtgcttgggccggttgaccttagagcccgcgctgatctgataactgacgtggccgcgctggccgaagctacgtatcctcccacacctcaagcattgactacgtatttagtcagaagcagaagctttaaacctcaccccgagcgtccgataccagccgttcttgcccctcctcgattcgcccccacaccaccatttgccggtctgcctattcccgctctggcgacgcagggcgatttggctgcctggcttgggcagagcccagaacagctggactggctggctgatgaaaggcgaaggcattcgagggttacccgccctcctctccgccactatcattatacatttgcctctaagcggaccggtgcccccaggttaatcgaagcacccaagccacgcctgaaagcaatccagcggcgcattctacgggagatcctgtcacccgtacccacacacccgagaatccacggctttgtggccggacggtcatgtctcaccggggcacaaattcacgctggggaagctattgtcgctaccttcgacctcactcaatttttccccagtatcggcctgccgcggattcatggcctcttcaggtccctgggatacccctgggccgtagcacgacgattgactggattgtgtactaccacaaccccatctggcgtgttccccgatccacagcacccggaccatgcactgtaccgcgttcctcatctccctcaaggtgctcccacctccccagccctcgctaacctgctggcctggacactggaccgccgcttggatggcttagccagatccgcagaggctaattacaccagatacgccgatgatctcgctttcagtggggacgaggcgttcgtcgctagaatcgatagatttcgtcggacagtcgagactattttggaagaggaaggctttgcccttaatacagccaaaacccgcataatgcctcgatctacgaggcagagggtgaccgggatcgtggtgaacgagcactgcaacataggacgtgctgagttcgacaccctgaaggcaatcctccacaactgcacccggacaggcccagcagcccagaacagagaagccatccctgattttaggacacacctggacggaaggattgcttgggtggagcaggtgaatttcccacggggactcaagctgcggcgtctattcgatcagattgactggactcctccaccatga

SEQ ID NO: 12762 - RNA, 1257 nt, synthetic construct
  source 1..1257: mol_type = other RNA
atggaggctcgcgcagcagcctacttgggcaagtcaacaaaacgctggcagaaaaggcttatcgctgagattgtatccgctaatggggcaggttatccaccctctcctgccgccttagcagatcgcctcctggcttcatcgcattttgacagagctgtggctatagtgcttcgccaaaagactccccctcctatggtgctggatcctcccgccttcgcacctgcaccagcgtttgccgcaatgcaccccccacgcatagagactattggagatctggccacctggctagaaatccccatagcaaggctggactggctggctgacgagaagagacagcattcacgggcaaatctcccaattctccaacactatcactaccggttcgtgcctaagtctagcggtgcgcccagactcatagaggctccaaaggcccagctcaaagccctccagagacgtattttggttgaaattctcgatttggcgcccgtgcatcccagggctcatgggtttgtcagaggtaggagttgtctgacgggcgcccaagttcacgctggggaacagcttgtggtctgcgctgatctgcgagactttttcccctctatccgagcggcacggatccacgggctgtttagaagctttggatacccgaccgccgtcgctagagcacttaccggactgtgtacgaccagcacaccccggagcatcttccagcgaattgacgagggacagcagttcgactggttcacacgacggcgctactccgcacctcacttgccacagggtgcccctacatccccggccttagctaatctgtgtgcctggcgttttgaccaacggtgcgatggcttggccagggccctaggaggcagctatacccgctacgccgatgatctgaccttctccggggacgcagccttcgctgccagaactagtaggctgattgctgccctcggcaaaatcatcggcgaagaaggcttcgcgatcaacgagtctaaaaccaggcttatgcgtagggcccgcccacagcgtgttacaggcatcgtggttaacgaccatgtgaacgtaccacggagagggtatgatgagttaaaagccctgctgcacaactgctgcaagcacggacctgcctcccagaatcgcgaccggaggactgacttcagggctcatctggatggcagagtggggtgggtcgaacaggtcaatccgaaccggggagcgaagctacgaactgcctttgacgccatcagttggagttga

SEQ ID NO: 12763 - RNA, 1332 nt, synthetic construct
  source 1..1332: mol_type = other RNA
atgtcatttgagaactggactgcctggcacctggccgagatcctgattgctaccgactggaccccgcaggcgatggaagatgccgctcggaaagcactcggaggcaacagacagaggaaatggttgccacggctgatagcagacatcatggggtccagccccaccgcatacgctccaagtcctagaaccgtggccggcttgatcctggacagcagggcgtttcgaggactgcgccttaatgacagagagcggccactgtttgataggtattttctacctgcccccattttctcccccacacccgctttccgtgatcttgcagtgcccgagttggccaacgctctcgattctgctcggtggttgaacctgtcccccaggcacctggattggttcgccgacatcgaaggctatcgatcttcagctgccgccgagtccacacgccattacgtacaggcttggattcctaagcgaacaggcccaccccgattaatcgaggccccgaaacagattctgaaagatctgcaacgcaagattctgcgcgagattttagaccctgtcgctgttcacgacagtgcacatggatttcggcgcggtcgttcttgcatcactgcagctcagctccatgccggggaggatatggtgataaccatggatctgaaggacttcttcccatcagtgcctatcagaagcgtacacgggatctttaggtcacttggttacccctgggcggtggcacgtcttctcacaggcttatgcagcaccactgccccggcaagcctattcgacaatccaccaggcgactctggtcatgacgaagagacgaggcggctctttcaccagcgacaccttcctcagggcgcgccaacttcccctgccttggctaatctgtgcgcgagacgcctcgacggtagactcaacggcctcgctcattgcatggaggcccggtacactaggtatggagacgatctggcattcagcggggatcgtgattttgccgctcgctcgggcgcctttctgagaatggcgagtgcaatatgtgcagctgaaggattcgccgtcaatcaccgaaagacccggataatgaggcaaggggattgtcaacgcatcacagggttgacggtgaatagtcacatcaatgtgcctaggggcgcatatgacagactgaaggccattcttcataactgtaccaggcatgggcctgccaatcagaacagagaaaaccacccagacttccgcgcccacctagatggacggattacatgggttgaaaacgttaatcccccccggggtctgagactcaggctgatgttcatggccgtcgaatggggatga

SEQ ID NO: 12764 - RNA, 1203 nt, synthetic construct
  source 1..1203: mol_type = other RNA
atgttacggagactggcagcctttgccgatcactctggccaaccaccctcccccgactggttgaccgacttttttctcgcagctccagagttcgctggagcagtggcccgtatcctaaaggagccacagattcttcattgtgtgctcaagcccgcaaaattcgcgcctgctaaaaaattcgccggacttaatgtccccaaaatcaactcctcaggagacttggccgcatggctgggcctctccaatgagcacctggagtggctgagtgatactagaaggcagcatagtcggactgccatcccagttctccagaactaccagtacacattcgtgttgaagaaacatgggccgcctcggctgatagaagagcctaagccccgacttaagaccatccagcgacgaatcctgcgagagattctcgatagagttcccgtgcacgcctgtgcccacggcttcgttgctaagagaagctgtgtcacgagtgcccaggctcactgcggagaattcatcgtgctggccgcagatttaaaggactattttgcaagcatcccagctgcgagaatccagggcatctttcgtgctattgggtatccatcttctgtagcccgcttactgacaggcttgtgcacctccggtacccctactagcgtgttcgcttctaggagcggtgggcgcatgtgcgattggcagaccaggaaactgtatgaacagccgcacctaccccaaggggcacctacaagccccgctctggctaatctggtcagttttagcttggaccgcaggatttcaggccttgccgcccggttcggagccaagtacactagatacgccgatgacctggctttttccggcgatgaaatatttgataggcgggtcgacactttcctggagcatgtggcgatgattgccgtcgacgaaggcttcatgcttaatgcggccaaaaccaggattatgcgccgctcgcaatcacagaggataataggagtgacagtgaacgaccacattaacctccctcgcgggacgtttgacgaactaaaggctatcctccataattgccgtaagttcggccctaatacccaaaacctgctcggtgtagcaaactttgaggagcacctgagaggtcggatcgcctgggctgcctcactgaacccagcaaggggggcgaaacttcatgcaatgttcaatctgattcggtggacatga

SEQ ID NO: 12765 - RNA, 1326 nt, synthetic construct
  source 1..1326: mol_type = other RNA
atgaatacccctccatggattgcacgaaatctggccgccagctttctgggctccgcttggaacaagaacgatttacgccttgccgcaactaagacactgggactagccacgagggctgcacagcgagcgctcataaatcgcctgttcgacgcacacaatgcccccacaccaccctcagaggactggctaaccagttactttctcatgtccgaatggtttgagatagcttccctccgggcccgtgaacatcctagaggggtgaatgccgtcctaactccaccacgtttcgcgccaagccagcgatttgccgattttggtgctcctaagctgacagctccgggggaactcgccaaatggctggcagtctcaatcgagtatctggactggtttgccgatcggaagaggatgcaagctaagaccgatattcccttgctgcagcactattcttataaattcgcgccgaaaaagagtggccctcctaggctgatcgaatcccctaagccgcagctgaaagccatgcaccggttgattctgcgggaaatgcttaattgtgcccccgtgcacgagtgcgctcaaggtttcgtacgccgccggagctgcttaactgccgccaagatccatgctggagaacatgtattgattaccgcagatctcaaagatttcttcctgaacactaggctcagcagagtgcatggcgttttccgcaacctgggttacgcccagccagttgctagactgctcacagccctctgcagtaccagcaccccccagtcgctgttcgccagacttcccgtgtctcagaggcatgactgggaaacccgtaagcggttcgaagcccctcacttgccccaaggggctcccacatccccagccttggctaacctgtgtgcatggagactggattgccgattattcggcttggccaaatctttcggagccaattatacccggtacgctgacgacatggcattctcaggggataaggcctttgccgacagagtggctgggtttgtcgcggcactggagacgattgcagcggacgagggttttgcactcaacagacgcaaaacaagggtgatgagaggccacacttctcagcgcgtgacgggcgttgtcgtgaatgagcacgtgaacatcgctagaaaggactacgatcgcttaaaagcgatccttcataactgtaggagaaatggacccgaggcagagaaccgagcacagatacggacatttagggctcaccttgacggccgggtgaactgggtcgagactgttaaccctaacaggggaaccaaacttaggcgtatctttaatgagatctcatggtga

SEQ ID NO: 12766 - RNA, 1131 nt, synthetic construct
  source 1..1131: mol_type = other RNA
atgaaaaaggatgacccagccaaggcactagccgctgctcttcttgcaggggaatggagccgatcagcactggagaaaagagccataacagccctgggcgctaggtctaaacgccgcgcttcccgtattgtggacgatatctggactaaccacaaggccccatacgtgccccatcgcaacgaactgaggaggctgatatatgcatcgaacgcgttcgccggcttgggtgagactgccattaccaggctgaatgagcttaaacccaaggaacagccgcctcggtttgcacccctgcctaggtttcagaatgctaacctccctccactcgccaccgctggagacttggcccagtggctcgggttaagtccgtcacaattagattggtttgcggacgagcgcaggacactagcgagagcttcagacacactccagcactattcccagacgtggctgcctaaacgttctagcggctggcgcctgatcgaagctcccaaaccgaggctgaaggacatccagcgacgaatcctccgggggatcctggatcccattcctacccatgatgcagcattcggcttcgtgccaggtcggagttgcactacagcagccgctaagcacgccggtgaaggcgtggtagttaccctcgatctgcgagatttctttgtgtccgtgcctgcccacagagtgcacgcacttttccggtgcttaggatacctgtggagtgttgcgcgtctcctgactggactttgtaccgccgccactccacacgcaaccttggcttccgaccagctggaccatgagactcggcaaaggctcagggctagacatctgccacagggggcaccaacaagccccactttggctaattttgccgcccgcagactagatgcccggctcgatggactggcgcggagatttgaggcccgatatacacgctacgcggacgatctgaccttcagcggggacgagagattccacacctctgtcccccgcttcttgattgccgtagcccaaatcgccagggacgagggctttgcacttaatgctgccaagacaagaattatgcctcggcacacgagacagaccgtcacgggaatagtcgttaacgaccatatcaatgtcgctcggccctga

SEQ ID NO: 12767 - RNA, 1326 nt, synthetic construct
  source 1..1326: mol_type = other RNA
atgaaaagcaacaggcacttggttccaattcttgcattcatgctgttggatgggccttggacccccatggccttgaaacggcgcgctgtcagaatcctgggtaggcgatcaaggacccgggccatcgagctcgtggaagagatcctggcatccataaaaacaccttacgctccacagtttaaacagctggaacgcgcgatcgtgagctgttccagcctgcacaagattggcgaagcgacagccgacaggctaggcaaactgtctgtgacagtgccccctccacgctttgctcccttagcccccttcagaggagccggacttcctggcttcacaaccactgcagccctggctcattggctggccgtaccactcggccaaatcgagtggctcgctgacagcaaacatactctttcccacgccacttcagacgttctacatcactatgcctgtcattggatccctaagcaaaccggatcgtggcgcctgattgaaagccccaagccgcggctcaaggcaatccagcgccgcatcctgcacgacatactcgaccacatgccagtgcacgacagtgcgtttgctttcatcaagggcaggtcatgcgccacagctgccgctaggcatgcaggagaggatgtggtgattaccgtggatctcaaggattttttcttaaccactcctcctcgtcgaattcatgctatcttccgttgcctggggtacccgacgtctgtcactagggtcctgaccgggatttgcacgacagccacccccgcagcagtgcttgaaaccaatgccgacatagctgctcgtaaccatgagactcggaagagatatgcctctccccacttaccacagggtgcccccacgtctcccaccctagctaatctggcagccagaggactggattgccggcttacgggcctggcttcaaggttcaatgcaaggtacaccagatatgccgatgacctcaccttcagtggggacaaggcgttgcttgcaagaagcaatcggtttattcgggccattcaggagattgttcaggatgagggctttgctctcaatgccagtaaaactcggatcatgccgcgaagtactagacaatccgtaacaggattggttgtgaaccagcatatcaacatagcccgccctgattacgataacctcaaagcgacactgacaaactgtgcacgacacggggccccatcccagaatagagagggccacgcggacttcagggcacacatggacggtcgcgtagcctgggtcgaaaacgtcaatcgtagacgaggggagaagctgcggagaatttttgaaaagatctcttggtga

SEQ ID NO: 12768 - RNA, 1311 nt, synthetic construct
  source 1..1311: mol_type = other RNA
atgtcccgccggacagaccatttcccggtattggcactggcgttgttacagggccgctggacacgaaacgccctgagaaaaagagcaagagatctgctggggccccgttctaagactcgggcgaacaggcttgtcgatgagatcttagctgtgcacaggttaccgtacactcctggttggcgtacgctcacgaagattgtggcaggagcgagcgccctgcatgggttaagtgatgctaccatcgagcgagtagcttcaacccctggccggcagcaccctcctcgatttgagccgattgcgccccttcaacctgccagcgctccaacactggctactaccgccgatctggctacctggctagaaatcccaatcgatcacctcgactggttcgccgacgaacgcagaacactggaccgagagcaggacaaggccctgtcccactatgcctaccattggaggctgaaacggagcggtgcatggagattgatagaggcccccaaaccacgcatgatggcggtgcagcggaggattctgaaggacattctgaatcggcttgccccacatgaggccgcacacggttttgttgccggacggtcctgtgttactgcagccgccaagcatgcaggtgagcacgtggtggttacagtcgatctcagagacttttttctaagtgcccccgtgggaagagtgcacgcaatattcaggtgcctgggctacccccatgcagtagcacgcgcactcaccggactgtgttcaacctccacaccacggcatgtcgctgcggaacacttcgaccacgaagctcagaggaggcatgctacgaggcacttgcctcagggagcacccacttctccagcattgtcaaaccttgctgccttgggcctggatagaaggctggctggcctagccaatcgctttggggctcggtatactagatacgctgatgatctcactttcagtggggactctccattctgcgcccgtgtgcctggcctccttaaagcggtggctgacattgcccgtgatgaaggcttcgcccttaacgccgcaaaaacccgcatcatgccccgccaccaacggcaaagcgttaccgggattgtggtcaacgatcacatcaactttgccagagatgacttctataggctcaaggccgctctgaccaattgcgtgaggcatggacccgcctcgcagaatcgcgacgctcatcctgactttcgcgcccaccttgacgggcggatcacatgggtcgaaagactcaatctccgacgaggcgagaagctgagaaggctgttcgacgctatagcctggtga

SEQ ID NO: 12769 - RNA, 1344 nt, synthetic construct
  source 1..1344: mol_type = other RNA
atgccctcccagaaccaaatagctggcgaccttgccgccgctctcctaggaggagcatggacccgtagggccctgctgaggagactgtctgggtatttgcggaataaagctgcccgctcaaatgcccgactggtggacgagattctggaacgtaccgaaggctcctacccacccagtccattcgccttaaagaggttcattcttgactcccgggcctttccacgcgcagcagcagtacttcttcgcacaacggtccccgtggcagctgtgttgacaccgccaaggttctggcctgctgccggtaatgcagctccaggagttcccgagatcgaaactcctggggacctggccatttggctgggcgtgcctatctctcgactgcaatggctagccgacgagcagcgaagacaccacactactgcaatcccgatgttccagaactataggtaccgtttcatgcccaaggctagtggcggttggcggctcatcgagtggcctaaaccccacctgcgggctatccaggtcaagatactgcgagagatattagatcggttgagcgtccatgaggccgctcacggctttgtacgcggccgatcctgtaaaacggcagccgccatgcatgcaggtgaggctgtggtggcatgcatggacatcagagattttttcggaagcgtgcggctccagcgtattcatgccattttcagaagaattgggtatccctgggccgtggcgcgcttactgagctgtctgtgcgtgacctctactccagcgtccgtttttgcgcgcgcccctgatgacgcaggcttggattgggagacaaggaaaagattctcagaacgccaccttcctcagggagcaccgacaagtcctgctctggctaacctcgtcgttggggaaatggacagacggctggaaggcctagcccggcattgcgatgccaggtacactcgctatgccgatgatctgtcattttcaggtgacgagacattcgccaggaggatagggggttttctggggtcggccaccgatattgtacgagacgagggctttagcatccacaccgcgaaaaccagaatcatgaggcggggagcgagacaagtggtcactggactcgtagtcaacgagcacgtgaacattctcaggcacgattacgacacactcaaggcgatcctgcacaactgtgccaagcatggggctgaatctcagaatcggagcggggttcctaactttccagctcatttggccggccgcatcgcctgggtcgaacatgttaatcccgtgagaggagctagacttcgcaccctctacaataaggtggcatggaccccccgggctgagatctga

SEQ ID NO: 12770 - RNA, 957 nt, synthetic construct
  source 1..957: mol_type = other RNA
cttccacctgagctagactggtttgccgacacccgacggcagcatggggtgactgagaagcgcccgctccagcactacagctacgcctgggtccctaaaaggcggggagcaccccggttaatcgaagcaccaaagcccagacttaaagccctgcagaggcagattctccgcgatattctggacagaattcccgtacacgaagctgcccacgggttcgtcaagggcaggagttgtttgggaggagcagcaaggcacggtggtgaggcagtggttgccacgcttgatctggccgacttttttccttcagtaccactcgagcgcgtccacggcatatttcgctgcctgggctatcctacagccgtggcccggttattgaccggcctgtgctccacaactactcctagaggagtcctggcagccgcccctggagttaaaagaccccccggcgcgttcgttcctgaagctgctccgcatcttccccagggggcacctacaagcccagccttggcgaatctgtctgccaatcgtctggatgcccgtctggaccagttagcagagtacgctggtgccaggtataccagatacgctgacgatctcgctttctccggggatgacgagtttgccgcgggtatcggctctttcctggctaccgtggaggaaattatccgggctgaaagattcgccccaaatcggcggaaaacccgcatcatgaggcgagcaggaaggcaacaagtcacggggttggtggtgaaccagcacctcaatgtgcccagaccggactatgatcgactcaaggcgatactgcataactgtgctaggcacggcccagcaggccaaaacagagacgggcacccagatttccgcgctcatctggatggccgagtgggatgggttcagacagtgaacccccatcgcgggctcaagctgcgtctgctatttgaggccatcgcttggtga

SEQ ID NO: 12771 - RNA, 1338 nt, synthetic construct
  source 1..1338: mol_type = other RNA
atgcactggcccaattcttcccgtcaccggctcatagccagaaatattgccgtgactcttctggccggcgcatggactgagagagcgatggccgatcgcctggagactctattggggagcaccacaagaagtactcagcggggactgatcggcgctatctttgataagtctgggggtccatatcctccatcacttgctgagctgaccgcctccatactggaagcgcctcaatttccagcagcggcccgactcgcattagaatatactaccagattagatatcgcaaccagacagcctaggtttgcacccattgcccgctttgcagacctagagatcccacggctgacaactcctggcgatgtggctgcctgggctggcttgagtattcccgaactggaatggttcgcagacgagcgtcgccagcacggcagaacagccattcccatttttcagcattatacctacgccttcaggaaaaagtcaagcgggcccccacgactgatcgaggcaccaaagccacgtctcaaaactatccagaggaagattctgcgagatatcctcgaccacattcccgttcaccccgccgcgcatggcttcgtagaaggaaggtcaccacgcaccggcgccgctcaacatgttggtgctcccgtggtgattgccgtcgatcttgagaacttctttctgtcagttcctgtgggaaggatccatgctttgttccggtctgttgggtatcctgacgaagccgctagagctctcacccggctgtgcacgaccatgacaccacgctccgtaattgacagggtcccgaatcctgcacgacatacgcgtgccgctttggccccgtacctcgatccccaccttcctcaaggcgcacccacatccccggctcttgccaatctggtcgcttggcgcctcgacgtgagactcgctggtctagctaattcctttggagccaaactgaccaggtacgccgacgacatagtgttctctggagacttaacggcccctggtaagacccagtctctgatcgccgccatcgcggagatcgtcgaggacgaggggttcggactgaacgataaaaagacacggataatgaccgcaagccagcgacagagtgtcacagggatcgtggtgaactcgcgcctgaacgcacggagagacagctacgacagccttaaagccatcctccacaattgtcgcctgaacggtttcgaagcggaaaaccgggagggacatgcagatttccgggctcacttggagggccggattgggtggatcgaaagtctgaacccgacaaggggcaggcgcttgagagatatttttagcaggataccttga

SEQ ID NO: 12772 - RNA, 1305 nt, synthetic construct
  source 1..1305: mol_type = other RNA
atggctcggaacattgcaaatgtgctgctgagcggcctgtgggctgaaagggctatgctgctgaggttgcagaccgccctgggcaaggccacagccaagagtcagcgcgccctgatcgcggaggtactcaaagccaacccagcgtcttatccccctcctgccgccgaactggtacgcactattttctcagcaccgagctttgagaaggccgccgctagtgccctgctaagcaaggctccattacacatggccttacgcccccctaaattcgcccctaccgcagacctgagcgactgcgatgtgccggcacttcccaccagcggagacgttgctcggtggctgggtttacctctcgagcacttagattggtttactgacgagcggagacagcacggtcgtactgccataccagacctccagcattacgtctacgcctttcgagccaagccacacggacccccgaggcttattgaagcccctaaacctcggctgaaaactatgcagaaacggattctacacggaatcctggatagtgtccctgtgcacgaggcagcacatgggttcgtgaaaggccgaagctgcaagtcaggagctgagcaacatgcagaggcagccatcgtcatatgtttcgatatcgcagacttctttctgacgtcccccctgggccgagttcatgctctgttcagagggctcggatacccacatgcggctgctcgagttctcacacgcctttgttctacctcaacgcccgagacagtctttgacagaatctcttctccaaggaagcacacccgggcggcccttcaagcttactgtgaaccccacttgccacaaggcgcacctacatctcccgcactcgcgaatctcgtggccagaagacttgatatacggctgacagggctcgctttgagtttgggtgggaggtattcaagatatgcagatgacctgaccttctccggcgatgccgcattcgctaaaaagacaaactcgttgatggctgctgtggcgggtatcgtggaagatgaggggtatgccctcaacgaaaggaagacccgggttatgacgtcctcccgtagacagcagattactggaatcgtggtgaatgctaggaccaacgcacccagagacgcctacgatcagctgaaggctactctgcataattgcaggaaaaccgggctagccgctgaaaaccgagacggccacgccgattttcgcgcgcatttggccggccgcattggatgggtcgcatcccttaatccagcccgcggcgacaggctacgtgcaatgctcacagagatcgcctga

SEQ ID NO: 12773 - RNA, 1350 nt, synthetic construct
  source 1..1350: mol_type = other RNA
atgaggttcgaggagctaattgccaggaacctggctgctgcctggctagcaggcccttggaccgaagccggactctttgagcgagggcaggaggtgattgggaaggcgggcaggagaagattcctgcaattagtaagggccgccattcaggctgcaccatctgattaccctccctctcccggttggatcacagcctttcttcgagaacgtgacggtctgcctgattacacagagaggttcctgaacagcagacggtccatcagcctagccctggaacctgcccacttcagtagcagtctcagcttggcacctctggacgtccccagactggaaacaccacacgatttagctgtctggatcggtgtaccgatcgagcatcttgattggttggcggatagtcgcaggcaggcctactcaacggacatccccatgcttcagaattatcgctacgcattcgtgcccaaacgtactggcccaccacgcctgctcgagtgtccgaagcctctcttgatggcggctcagcggaagatcctttccggcatcctggacaagatacgcgcccacgacgccgctcatgggtttgttgctggccgaagctgccttagcggagctagtagacatgctggagaggatattgtgattgccttagatctcaaggatttcttcctgactaccccagtcagacgggtgcacgggatctttcgcgcactgggctatccttgggccgttgcgcgcctgttaaccgggttgtgtacttcagctgtgcccctgtccgtgttcagacgtctccctccagcagagcggcacgactggaagactaggcagctctttaactcacgacacttgccccagggtgccccgacatctccagcacttgccaatctggcagcttaccgcctggatgtccgtttgaccggacttgcccgatctctcgacgcaacatacacgaggtatgccgatgacctcgccgtgtccggttctctgacagaccgaaatgctcagaagatactggccaccgttagatcgattgctagggaagaaggatatgaggtgcatccttccaaacaacgggtaatgcgctccgacgcgcggcaatgcattactggagtggttgtgaaccggcacgtgaatgtgccccgcgaagactttgacaggctcaaagccaccctgcacaatgcagcacggcatgggccaaggagccagaacagagacgggcacgccgatttccgggcacatctggatggccgggtcacctgggttgagaatgtcaaccccaacagaggagccaaactgagacggttgtttgacgcgatagtctggaaagaaggctcaggcgacgctatcggctga

SEQ ID NO: 12774 - RNA, 1065 nt, synthetic construct
  source 1..1065: mol_type = other RNA
atgcttgatgcactggacctgcctccacttccccacgccgaagccttggcttcctggttaggaatagatgccgacgagttggtggtgctcgccgactgtgagggcagagagcgaagacgtgcagccagagcccaacactaccattatcggagggttgctaaacccgggggcggggaacgacttattgaggcgccaaagccacggctgaaggcagtgcagaggcacatcctccacgggatactggatcgtgtcccacctcatgacgccgctcacggattcgtgcccggtaggtccgtgtggacaggagctgggcgacatacaggccgcgaaatggtaatcagggtggatctccgggacttctttgcctccgtgcgtggcgctcgggtatttgccttgttcgaaactatcgggtaccctaggagtgtatgcagcctgctgactggattgtgcaccaatgccacacccgcgacagtttggggtaccccctctcatgccattagcaccgctgcactgagagaacgctggcaccgcatccaacgatatgctgcacctcacctgcccgctggtgcaccttcatcccctgcattagcaaatttagcggcacacaggcttgaccgccgcctagcaggactcgctcatgccgttgacggctcttacaccagatatgctgatgacctgaccttcagtggcgatgcactcaggcgaggaacgctcgcattctttagctcggtgtgccggattgtggtcgaggagggctttgaagtccacgcgagaaagacgcggttccatcaccgcagccagcgtcagctagtgactggcgttgtcgtcaacgagcatccggccgcccggagatcagcctacgatagactcagagccatcctgtttaactgtgtgaggcacggtgcgcggagtcaggctgatagggacctggccgctttccgcgctcatctgagaggccgcatcgagtggtttgcccattcaccggctagggccgccaaacttcacgcgctgtttgaccggattgacttctctgagccagatgatgacccacccgccgatgggtga

SEQ ID NO: 12775 - RNA, 1002 nt, synthetic construct
  source 1..1002: mol_type = other RNA
gcactggccgatgtgttggcgcttgacgacgcggctcttcgtggactggcggacctcgaagggcacgaacgaaggaggaggcccaccgcacgccattatcactatgcctgtgcccgtaaggccgacggaggggaaagactgatcgaggctcccaaacctcgactgaaggctgcccagaggcgcgttctgagacggctcctggatcgagtcccccctcacgacgcagcacatggctttgtgcgccgccgaagtgcagtgactagcgccgagctgcatgctggacaagcgatggtgatcagggttgacctgagagactttttcgcctcgatcccagctagcagggtccacgctattttcggtgcactgggatacccggtcgctgtccgccgactactcacagggttgtgcacaaacgctacgcctttagccgtttggggtcccgcctccccctcactttctagtgtggcactccgcgaaagacggagacgcctggcacagtacgctggaccacacttgccagccggtgctcccacttctcctagcctcgcaaatctggcagccctcgggctggataggcggttagccgcactggccagatcaatggactgtagatatacgcggtacgcggacgatctcactataagcggaggtgatgcccttaggcgtggtgcccatgcttgcgtttccactatatgccggatcgccgtagaggagggcttcgtgattcacccacggaaaacccgtttgcagccgagaggcgtgcggcagaccgttacaggcttggtggtgaacgctagaccaaacgtgcctcgcgacacctacgatcggcttagggccacactgtttaattgcgtaaggttaggcccacgcacccagtctgatctacctctggctgagctcgaagcccaactaagaggccgggtagagtggtgtgccgtcaatcccgggagagcagccaagctgagggctctgttcgatgctattgattggtccgcggcctga

SEQ ID NO: 12776 - RNA, 1059 nt, synthetic construct
  source 1..1059: mol_type = other RNA
atgaccgagcccctcaggtttgaatccgaagtggagctggccagatggctggccctaactccagccgagctttggtggtttgccgacgtcgagggcatagggaggaccagagttaacggccctctggctcactatcgatacaggtttcatgcaaaacctgatggctccacgaggctcattgagattccaaagttgagattgaaactgatccagcgccgcatagctcgacgcctgctagctccgctccagctccacgactctgtccatggcttcgtgcggggccgtagtgcaatcactggagcccgagtgcacgttggacgcgcacttgtgctgagagtagacctgagagaattctttgcatccgtttccgccggtcaggtacgggctgtgctacggaggctcggacatgctgatgcagtcgcgagggccctgactgggctctgtacaaattgcaccccgagagcagcttggacaggcagcagtacccccgctaatgcagaggccgtccgtcagctgtggcataggcggcaacgctacgcatcaccacaccttccaacaggggcccctactagtcctgccctggcgaacttggtggcgggcacacttgacctcaggttagcagctttggctaggagcttcggggccgcgtacaccagatatgccgacgaccttactttctcgggcgatgctccctttagaagggatgcagaacggttcttcgaactggtttgtggggccgtcgccgagcacggatttgctgttcacggccggaagaccaggtttcagggggctgaaacgcgtcaacaggtgacaggagtggtggtgaacgtgcacacctcattggtacggcgggagctggagcggttagaggcgatcgttcataactgcgtgcgcttcggtcccgccggtcagaatcgcagcggacatcctgatttcagatctcatttagccggacgtatcgcccacgtggcctctgtccacggtcgacacggtgctcgcctgagagagcgcttcgctgcaattgactggagccccctggatgaacgatcagaagcctga

SEQ ID NO: 12777 - RNA, 1272 nt, synthetic construct
  source 1..1272: mol_type = other RNA
atgaccgatccgtttctgagggcccatgaagcagctgaggttgccgcagacttctcacgaacctacacatcatggacttggcccgaggtgttgaccgcccttcgagtactgctgcctgccgaagtgactgcagacgtcgcagatagaatcttcgagttgtcccctcatgagccccggcatccagccactgtggtgctggaggccctcgcaccatggacacacccagaaccccaacccagaaggccgctggtcctgcacgaacctgagagctccggcacagtgctagacgatctccctgacctgtacgatgtcgaacaggtggcccactggctggatttcacggtccctgagctggagtggtttgccgaccgagggcagtggctcaggactgctaggcccccactccgacattatcgtatatggcggagagataagcgggaaggcgtgcgcgttatcgaggctccaaaaccgcgtatgagagaaacccaacggcggttactccgccgcttggtggagagaatccctgctcactctgctgcacgcggatttgtacccgggtcgagtcctgccgctttcgcttggccacacacagacagacctgccgtggttagggtggacctgcggcactgttttgagagcattactgtacagcgtgtccgcgctgtcttccgcgatgctggctttcagccccatattgcccggctcttagcggagctttgcaccacggcaacgcctgtggatgaacttagagggctggatcacatgcacgcggcactacttcgggaacgacacctgccccagggtgctccaaccagtccacacctggctaaccttgtgatgagaagcctcgacaggcggctggacggatacgcgagacgcaacggcttaagatatacacgctatggtgacgacctagccatcagcggcgatgcaatagatgcagaccgggtcctgtggaccgttctgcgcattgtggatgcggagcgtttcactgtacaccccgacaaggtccgaatcatgcattcccatcagagacagaggctggccggactcgtggtgaatgataggccacaggtggctaggtctgagtatgacaatcttcgcgccctcttgcacaacgcccgtcgccatggcgcagcatctcaaaatcgggccgatcatcccgactttagagcccacgtttacgggttgattgcctgggtcggtgcgaccggagaagctaggaggcggaggttattggacctggccgccacagttgactgggaaacatga

SEQ ID NO: 12778 - RNA, 1272 nt, synthetic construct
  source 1..1272: mol_type = other RNA
atgactgagccatttctgcagcctcatgaggctgcagaagtcgccgcggccttctcgagaacatataccgcctggacttggcccgagatacttgccgctgtaacagccgtcttgcccgctgaggtcaccagcgaagtggcagctgggatcattgaactctctcctcacgaaccacgccaccccgcaacagtcatgatccaagcactcgccccatggacccaccctgcaccagttgctgctcagccggtggtggtgcacgaacctcggagtgctggcaccgtgtccgatgcccttccggacttatacgacgttgagcagttcgcccactggctggatttcactgtgccagaactggagtggtttgcggacagaggacaatggttgaggacggctcgtccccccttaaggcattatagaatttggcgccgagagaagcgggatggagtgagggttatcgaggctcccaagccaagaatgcgagaaacccaacggcggctattgcgccgactcattgagaggatacctgcacatcccgctgcacggggattcattcccggctccagcccagcagcctttgcttggcctcacaccgatagaccggtggtgcttagggtagatctgagacattgctttgagacaattaccgtgcccagagtgcgggccgttttcagacaggcgggttacccaccccacatcgccagactcctcgccgaactttgtaccactgccacgcccgtcgacgaactgcgtgggatcgaccacacccatgctgcgttactccgcgaacgacacttgcctcagggagccccaacgagccctcatctcgccaatctggtaatgcgtccgctggaccgaaggttggatggctacgcccgccggcatggactacgttacactaggtatggcgacgatctggccatatccggcgatgcaatgaacgctgacagagccctgtggacagtcctgcggatcgtggaggatgaaaggttcacagtgcatcctgagaaagtccggattatgcactctcaccagcgacagcacctggccgggttagttgttaatgataggcctcaggtcgcccggtctgactacgacaacctgcgcgcactgctccataacgcgaggcgccacggggctagttcacagaaccacgacgagcatccagactttagggcacatgtgtatggtctgatcgcgtgggtaggcgcaacaggtgagactcgcaggcgcagacttctgaatatggcccggactgtggattgggactcatga

SEQ ID NO: 12779 - RNA, 1272 nt, synthetic construct
  source 1..1272: mol_type = other RNA
atgacggaccccttccttacagccgcagatgcggctgagacagctgccgctttcgcacgaacatatgccgcctggacttggcccgaggtggtagctgctttacgggctgttattcccgcccactttgtcgacgacgtggctgagcgggtgtttgagttgtctccacatgaaccaagacacgcggccgaactgatgacagaagccttggccccatggacccaccctcctgaaccggttcgcgaaccactcatactcagagagcccatcagccctggcactgtcccggatgaacttcccgacttgtacgatatcacccagctcgctcactggctggatttcacagtgcccgaacttgagtggttcgcagaccggggaggttggctcaggactgcacacccccctttaagacactaccgcatatggcaaaggccgaaacgcgacggagtcagactattagaggccccaaagcctaggctgcgcgaaacccagaggcgtctcctgagacggctggtggagaagatccctgctcatcgcgccgctcgcggctttgtccctggaagttcagccgcagcctttgcctggcctcatacggacagacccgtggtcttgcgggtggatctacgacactgcttcgaatccattaccgataggcgcgtgagggcagtgtttcgcgatgcggggtacccaccacacatcgcgcgggttctggccgagctgtgtactaccaccacccccgtagatgagctgcgcgacatcgagacaggtcatgcggctctgctgagggagcggcacctacctcaaggggcacccactagtccacacctcgcgaatctggtcatgcgccctcttgacagacggctcgacggttatgcaaggcgtcacgggctgagatacacccgatatggggatgacctcgcactctcaggcgattctatggatgcagacagggctctgtggactgtgctgcgggttgccgaagccgaggactttacagcacatgacgataaagttagaattatgagacgacaccaacagcagaggctggccggcttggtggtaaacgaccgtccgcaggtggcccgtagcgattacgataaccttcgagctctgctgcataacgcacgacagcatggcgccagctcccagaatcacgatgatcatccagacttcagggcccatgtatatggccttattgcttgggtgggagccacgcgggatgagagaaggcggagattgctgaccatggctgacgcagtcgactgggacgcctga

SEQ ID NO: 12780 - RNA, 1269 nt, synthetic construct
  source 1..1269: mol_type = other RNA
atgaccccatcactgtcagcagatgaaatcgctgaggtggcggcagcattctcaaggacatacgcagcttggacctggcccgaagtgttagaagcagtacatgctgtcctgcctagcagtatcgctgacgacgtgtctgtgcgactctttgaattatctcctcaagagccccggcatcctgctgctgccctgacagacgctttgacaccctggacagcccctgcacccaccgttcgacctcagattagcttacaggaacctacatcgaccggtaccgttatcgacgggctacccgacctctatgatgtggaacagctcgcccactggctagacttcactgtaccggaactggagtggttcgccgaccgtggcggatggttgagacaagcccgaccgcccctgagacactacaggatctggcggcgggcaaaaagagagggagtccgcgtgatcgaagcccctaagccacgaatgcgagagacgcaaaggcgtctcctccgccgccttgtggagcagatcccagctcatcccgctgccaggggctttgtcagaggtagtagcgcggctgcttttgcctggccgcatactgacaggcccgtggtactgcgcgtggacttgcgacactgcttcgaatccatttccgtgcgcagagtgagaggggtgttccgggaggcggggtatccacagcacattgccagggtactggcagagctctgtactactgctaccccagtcgacgagcttcacgacatagaggccggacatgccgcgttgctacgtgagcgtcatctgccacaaggcgcccccaccagtccacacctggctaaccttgttatgaggagcctggatcggaggctgacgggatacgcgcagcacaacggcctgaggtatacgagatacggagatgaccttgccctttccggggacgaaatgaatgcggatcgggcactctggactaccttgcgcgtggtgagggccgaggggtttactgtccaccctggcaaggtccggatcatgcatcggcaccagcaacagcgccttgccggtctggtggttaacgataggcctcgggttgcacgggccgacgtcgataatctgcgggccctgctgcacaacgccattcattatggtgcctcttcccagaatgtcgatgatcatccagactttcgcgcacacgttcacggcctcatagcctggattggagcaacaggcgaggctagaagacgcagactgctcgagatggccgatcaggtggattgggatagatga

SEQ ID NO: 12781 - RNA, 1272 nt, synthetic construct
  source 1..1272: mol_type = other RNA
atgatcgaacccagcctgcctgcagttgaggtcagtgaagcggccgcggtgttctcccggatttataccgcctggacctggccagaagtactgcgcgccttagattcagtcctccctggggagatcgcacctgacgtggctcacaggctctttcgcctgactagggctgaacccaggcatccagcagccgctctggtggatgcactggctccttggactattccgcggcctgccgtcccacgacatatagaattacacgagcccacttctacgggttccgtgctcgacggactgcccgatctatacagtgtggaacagtgcgctcactggctcggcctgaccgttcctgaactggagtggtttgccgaccgggggaactggcttaggactgcaggccccccccttaggcattaccgcatctggcatcgaacaaaacgggacggggtgcgggtgatagaagcaccaaagcccagaatgagggagacacagagacgattactgcataggttagtcggtaaaattccagcccaccccgctgctcgcggctttgttccagggagcagtcctgctgcgttcgcgtggcctcacaccgacagatgtaccgtgttgcgtatcgatctgcggagatgcttcgagactatcactctcagacgagtaaggggggtctttgatagggcaggctatccaccacggatagcccgcctgttggccgagctgtgtactacgacaaccccggtcgacgtgctccatggagtgacaagcgctcacgccgccctgcttagggataggcaccttccccaaggagccccgacctcaccgcacttggctaacctggtattgagatctctcgaccgtagacttgacggctacgcccggcgaaatgacctgcgttatacccgctacggcgacgatcttgcactctctggcgacacattggacgtggaccggacactctggatggtggtgcgcgttgtgtctgcggagggattcgtcgttcacccagacaagctgcgaatcatgcacagacatcagaggcagagactggccggtctggtggtgaacgatcgcccccaagtcgcccgttccgattacgataccctgcgggcactcctgcataatgcaatccgcgagggagccgcctcccagaatagatcgggccaccgtgatttccgggcccacgtatatgggctaattgcctggattggagctacaagccctgctcgcagacagagactattggagatggctgccgcagttgattggcagtcatga

SEQ ID NO: 12782 - RNA, 1275 nt, synthetic construct
  source 1..1275: mol_type = other RNA
atggccgctcccgtgctgactgtagccgaagcagctgaggcggccgctgactttagccggggttatgggggatggacttggccagaggttctcagggctgcaggtgccgtgttgccagagggaatcgccgaggatgccgtggagcggcttttcgccgcaaacccgagggaaccaagacatcccgcccaagcttttaccgaagcgttgcagccctggactctgccaacacccgcaccacctagagtcatcgaactatccgatccagttcctgtgggaccgatgccctacggcctccctgacctgtacgacgtggagctgcttgctcagtggttcgggctgaccgtgggcgaattagagtggtttgcggacagaggccgttggttgcggaacgctcgaccaccactgaggcattacaggatctggagacggcacaagcgggatggagtccgagttattgaagcacccaaaccgtggatgagggagactcagcggcgtttactccgaagggtggtggagaggatgcctgcacatcctgctgccaggggattcgttgccggcagctctaccgctgccttcgcttggccgcacacggatcgcccaaccgtggtacgcgtagaccttcggcattgtttcgaatccatcacagtgggccgggtgcggagagtctttgcagatattggcggctatcgggcccccatagctagggtcctcgctgacctctgcaccacagcgacccctgtcgacgagctgaccggtgtcgaatatggtcacgccgccttgctacgcgacaggcacctacctcagggcgcacctacgagtcctcacctggccaacttagtgatgagatctctggaccgtcgactggccggatacgcaagaaggaacgggctcagatacacacgctatggcgacgatctggccgtttcgggggatgggatcgacgcagacagagtgctgtgggtcgtgatgagaatcgtggccgcggaaggattcgtggtccaccccgagaaggtgaggattatgcaccgccatcagcggcagcagttggctggtctggtcgtgaatgatcgcccccaagttgcccgagacgattatgacaatcttcgtgcactccttcataatgctattagagatggggcagcgacacaaaatcgcgatgggcacgacgattttcgcgcccacgtatacggcctcatagcttgggtaggagccacttcacccgccagacgccagcgactgctggagatggcccgtcaggttgattgggcacgctga

SEQ ID NO: 12783 - RNA, 1269 nt, synthetic construct
  source 1..1269: mol_type = other RNA
atgtctgagccctcattgccagctggagaagtggccgcagctgcagccgagtttagccggatattgacggcctggaccagaagcgagattgtgagagctgttatcgcggtgctcccatacgacgtggctgccgaagcgggaaaccggctctttgaacgcaccccccacgaacccagacatcctgccgcagcattcgttgccgcactccagccttggacgctaccgacacctgtgaccagaacatgggatctgacagagccagtcagagcagatgggttaccagctggcctgcccgatctgcacgacgtcgagcagttcgcctactggctggacttcaccgtgcctgagctggagtggtttgcagatagaggcgggtggctgagaactgctcggccaccattgcgccactaccgcatttggcggcgagccaagagagacggagtccgagtgatcgaggctcctaaacccaggatgagggagactcagcgtcggctgctcaggcgactggtggaaagaattcctgcacaccccgctgccagaggcttcgtacctggtgggtccactgccgcttttgcgtggccccatacagaccgcccaagtgttctccgagtggacctcaggcattgtttcgagacagtgaccacagcaagggttcggcgcgtctttgctgatgtgggatacccacccgcaattgcccggttgctggctgaaatctgcaccactgccacaccggtcgacgagctcactgacatcgaccacacccacgcttccctgctacgctatagacatcttcctcaaggcgccccaactagcccccacttggccaacctggtgatgcgcagtttggatcgtagacttgatggttacgcccgccataatggtcttaggtatacccgctatggagatgacctggctctgtccggcgacgatttcgacgcagacagggccctctgggtcgtgctgcaggtcgtaggggatgaaggctttttagtccaccccggcaaggttaggataatgcataggcatcagcagcaacgactggccggcctggttgtaaacgatcgaccgcaggtggccagggccgattacgacaacctgcgtgctcttctacacaatgcaatccgggacggggcgcaggcccaaaatcgtgatgcgcatcctgatttccgggcgcacgtgtatgggttaatcgcttggattggatctacgggtacccttcggcgcgacaggcttctcgaaatggccgcccgggtagactgggattcatga

SEQ ID NO: 12784 - RNA, 1290 nt, synthetic construct
  source 1..1290: mol_type = other RNA
atgctgctggaccattcaatgacagacgcgaccctggctttcgaccaggtgcgtgagctggccgccgaattcagccgtatttacacagggtggacctggccagaggtcctgagggcactcagggctgtgttggccagagatctggctgatgccgtggcccctcgcgtgtttgaattagcccctacggaacccaggcaccctgaggcagttcttgtggaggctctctctccatggactctgctcccacccgatccacagctggtgctgcgaccgcaagaaccacgatcttcagggaccgtacccgaaggcctccccgatctttatgacgttactcaattagcccattggctggattttactgtccccgagctggaatggtttgccgatcgcgggggatggctaaggacttcacgccctcccttgaggcactaccgcatttggagacgctccaaacgcgacggcttccgtgtgatcgaagctcctaagcctcgaatgagagagacacaacgcagattactgcgacggctggtggagcatgtacccgcacacccttgcgccaggggatttgtcgccggatccagcaccacggcgttcgcatggccacacagtgatcggccggtcgtactccgcgcggatcttaggcactgttttgaaacaataacaactaccagagtcagaagggtcttccacgacgttggctatcccgcccacatagcaagaattctagctgagctgtgcactaccgccacccctatcgacgagctcggtggcatcgatttggctcatcgagccctgttgcgggatagacacttgcctcagggtgccccgacaagcccacatctcgcaaatctggtgatgaggggactggacagacggcttgacggctatgcccgagcaaatggtttaagatacacgcgctacggagacgatctcgcactctccggagattcgatggacgccgaccggaccctttgggtggtcctgaagatcattgagactgagggtttcaccgctcatcccgataaagtacgggttatgtaccggcatcagcagcagcggctagcgggcttggttgttaacgatcggccccaagtgagccgggcaagttacgacaatcttagggcactcttgtataacgccgccgctcatggcgcccagagtcagaaccacgctgaccacccagactttcgtgcgcacgtgctggggcttatctcttgggtgggggctaccaacccaacaagaaggcagcggctgctgcagatggctgacgcagtggactgggattcctga

SEQ ID NO: 12785 - RNA, 1278 nt, synthetic construct
  source 1..1278: mol_type = other RNA
atgactaggccacaaccgcccttcactacggatcaggtgcgcgtgcttgccgcagcaatcgctgaccgcatcgtggattggacttggcctgcagtcgtgagagcagtgggcattgaacttccagccgagatctgcgtcgacgtggctcaggaagccttcgcactggcaccagacgagcctacacatactgccgaaatatttagactggctttagtgccctggacagttccggatcctcccgctacgagggtcgtcgagcttcctggcccaccacctgcaacagcactcgcgcatgatctgccgctgctgagcgacgttgaacagttcgctgtgtggttagacttcaccgtgccagagctcgaatggtttgccgacagaggaacctggctacgcaccgcgaacccaagactgcgccattacagggtctttcgtagggagaaacgatccggagtgcgcgtgattgaggctccaaagcccaggatgagagaaactcagcgcagactgcttcggagactcgttgttcgcatacccgcacatcccgctgcccgaggtttcgagcctggctcttctcccgccgctttcgcatggcctcatagtgacaggacgacagtcctcagggtcgatctgctgcactgttttgagtcgatcggcgtggggagagtacggcgcatattcgatgaggtgggctatcccccgcatatcgcccgtctgctcgctgaactgtgcaccacttcaacacccgctgatcagttgtccggcattgattacgcccacgccagtctgctcagacggcgacacttgcctcagggctcccctacatcaccccatctcgccaatctggccctagcccaggttgaccggcgaatcgcggggtatgccaatgcgaatgggctgcgttatacaaggtatggtgacgatcttgcggtgagcggggacgacttggacttgccaagggcgctatggaccgtaacccggatcgttgatgattgtggatttgccgtgaacaccaagaaaacccgtgtgatgcataggcaccagcaacagcgactcgccggattggtcgtgaacgataggcctcgggtaagccggcacgactacgacgccctcagagccttgttacacaacgccgccctgaccggagcacaggctcaaaaccaccacggtcacaatgattttcgcgcccacgtatacgggctgattgcttggattggagcaaccggtgaggtccggcgacaacggctgcttgacatggctgaccgggttgattggactgcttga

SEQ ID NO: 12786 - RNA, 1278 nt, synthetic construct
  source 1..1278: mol_type = other RNA
atgacacgaccggaaccaccatttaccgccgcacaggcacgggcaatttccgcagccatagcggatgccatggcggactggacatggccagaagccttaagagccgtgggagcgcaactacccgccgagatctctgccgacatagcccagtccgcttttgctatggctcccgcagaacccgctcataccgccgaagttttccgactcgcactgcttccctggaccgcagctgattcgccctccggtcgtatcgtggagctgaccggacctacgccagtcgctggtttgccacacgggctcccccctttagccgatgttagcgagttcgcatcttggctcgacttcacagtgccggagctggagtggttcgctgacaggggagggtggctacggacagctaatccacgtctacgccattatagggtcagtcgtcgcgagaagagaagcggcgttcgggtcatcgaagcccccaagcccagaatgagagagacacagcgtcgactcctgcaccgcttgattgccaggattcctgcccatagagcagcccggggcttcgaacctgggtcatcaccggctgcctttggctggccccacagtgatcgaccaactgtgctgagagtggacctgcagcattgctttgaaagcattggagcagggcgggttaggcgggtggtagaggacgtgggctaccctcctcacattgcaagactcatcgctgagctgtgcactaccagcactcctgccgatcagcttacgggcattgatcacgcccatgctagtttgctgaggaggcgccatcttccccaaggtgccccaacttctcctcacctggctaacttggcattggcccagctggaccggcgccttgaaggatatgcgaacgccaacggcctgagatacacacgatacggggacgatctggcgatctccggggatgagttcgatgcaggtcgcgcactctggactgtcctgcgcatcgtcgacgactgtggactccacttaaatgcggccaaaaccagagtaatgcatcggcaccaacagcaacgcctcgccgggcttgtggtaaacgacaggcctcaggtttcaaggcgggagtatgacgccgtgcgcgctcttctgcataatgccgccatcaccggcgctaacgctcagaatcggcacggccacaacgattttagggctcacgtgtacggcctgatcgcttggataggcgcgaccggagaagtgaggagacagagactgctggagatggcagatagggtcgactggaatcgatga

SEQ ID NO: 12787 - RNA, 1278 nt, synthetic construct
  source 1..1278: mol_type = other RNA
atgaccagacctgatccgggcttcactaccgaccaggtgaggactgtcgcagctgccctcgctgataggatcatcgattggacatggcccactgtcatgagggccgttgctgcggagcttcccgaggaaatatgtgtggacgtcgcacaagaggcattcgcagtggccccacatgagccaccccatttggccgaggtgtttcggttggctctgtcccgctggacactgccggaaccacctattcctcgcgctgtggagctccctggtcccactccagtaaccgacctcccgtatggcctgcctccactgcacgatgtggcccagttcgcggcctggttagacttcacccctgccgagcttgagtggtttgcagacagagggacttggctgcggactgctaacccccgtctccgacactatcgagttttccgtagagagaagcggcagggcgtgagagtgattgaagccccaaagcctcgcatgcgggaaacacagagacgactgctgcgccggctggtatcacggattccagcacacccagcggctaggggatttgaaccgggatcatctaccgcagcattcgcgtggcctcatagtgacagacctacagttctgcgattggacctggagcattgctttgaatccatcggggccggacgcgttcgcagaatctttgatgacgttggctaccccgctcatatagcaaggctgctggcagaactgtgcacaaccagcacacccgccgatcagcttggggggattgacctgacgcacgctgccctgttgagacgaaggcaccttccccaaggcgctcctacctctccccacctcgccaacttggctctagcgcgcttagaccgccggatcgacggttatgctagagccaaccggctgaattacacccggtacggagatgatctagcactctcgggtgacgacttcgatcacggccgtgccttatggatcgtgcgccggatcgtgtccgattgtggctttgtcgtgcaccccgataaagttcgtgtcatgcataggcaccagcaacagaggttggccgggctggtggtgaacgaccgtccacaggtcagtcgcgaggactatgacaaccttagggccctccttcacaatgccgcaaggagcggcgcccgatctcaaaatctccaggggcataataatttcagagatcatgtctacggcctcattgcctgggtaggagccacgggacacgaacggcggagaagactactggatatggctgacagggtggattggagcaggtga

SEQ ID NO: 12788 - RNA, 1329 nt, synthetic construct
  source 1..1329: mol_type = other RNA
atgactgaacctagtcgatcagccccccagccatttttatcagtcgccgatgccgcagtggtcggtgctctgttcgcacgccaccatactgcatggacgtggcctgaaacgctgcgggctgtagattccgccctgattgacgctctgcaggccggtgttaccgctctggccgatgtacccgatggtctggctcgcgccatctccttgagaattctggatggcggcccccttagagatcccgtagcggtgtttgtccacgccgctgcaagatggaccctccctgctgacgctgcgccaaggagcattgagacaccaggacccaccccatccgtgggactgccagatgagttgcctgaactgcacgacgtcgaacagttcgcccactggctcgacttcacagtgcctgagctggagtggttcgccgatagagagggtaggctccgtactgctcgcccgaccctcagacattatagggtgtggaggagggataagcggagcggggttcgagtgatcgaggcacccaaacccagaatgcgggagacacaaaggcggcttctgcgccggttagtggagcgaatacccgcacatcaggccgcccgaggtttcgagccgggttctagcaccgccgcttttgcttggccccacaccgaccgtcctacagtgctccgagtcgatcttagacactgtttcgaatccgtacctgcagcacgggtgcgcagggtctttgcagacgtggggtatccagcctcagtggctcggctccttgccgaactgtgcaccactactacgccgatagatgaactgacaggcatcgacagtgaacatgccatgctgttgcgcggtagacatctcccacagggggctcctacctcgcctcatctggcgaatcttgccatgcggtctttggacaggcggatcactggatttgccgagttaaacggcttgcgctacaccagatacggggatgacctagcaatctctggggacgagatggacgcagggagggctctatggacagtcgccaggattatcagagcggaaggctttactgtgcacccagaaaaggtccggataatgggacggcaccaacagcaacgtctcgccggcctagtggtgaatgacaggccccgcgttagtcgggtggactacgacaatctgcgtgcactcctgcataacgccatccgagatggagcgacagcccagaaccgtgagggccacccagagttcagaagccacgtttatggattgattgcctgggttggagctaccgatccggctaggcgccgcagacttctggcaatggccgctgacgttgactgggacgcgtga

SEQ ID NO: 12789 - RNA, 1272 nt, synthetic construct
  source 1..1272: mol_type = other RNA
atgacaacgcccgttctaacagctgatgaagtcaacgacgctgccgcctggttctcccggacctatacaggctggacctggcctgagctgctcagagccttagagagtgtgctccctgcggccattgctcgtgatgccctgccagccctgttgaccctgtcacccgctgagccgagacatcctgctgaaagcctcagaagagctttgaaaaaatggactcaaccccccgcacggcatccaactgtgcccatgcctgagccacctccacgtgacaccatcgccgacggactcccacagttgtactctgtccctgaggttgcccagtggctggatctcaccaccggggagctggaatggtttactgatcacggtgggtggctccgcactgcaccaacacggctgaggcactaccgcgtgtggacacgcgaaaagcgggatggcgtgagggtcattgaagccccgaagcctaggctgagggaggctcagcggcgactgcttaggctgcttgtaagtcggatccctgctcacccagctgctactggttttattccaggaagctctaccgccgactttgcacgaccccattctggcaaagctacggttttaagggccgatcttaggcactgcttcgagtcgatcactgcaccccggatagcagaggtgttccgcagagccggatacccgcctgagatcgctcgcctgcttgcggacctttcaacgaccgccacaccagcagaccaactggctggagtgcccgccgaacatgccacatacctgaggggacgtcatctaccccaaggggcccctacaagcccacatctcagtaacctagtgatgcgcagccttgatcgaagactgaacggctatgcacgggcaaacggtctggcgtatacccgttacggggatgacctggccttgtctggagacgccatggacgcagatagagccctgtgggtcgttctcaaggtgatagcttcagagggcttcactgtgcacgccggtaaggtaaggattatgagacaccaccagagacagaatttagcgggcttagtcgtgaatgacaggcccagggtgtcccggagcgattatgacaacttgcgcgcactgctgcacaatgcccaacgccacggggcctcctcccagaatcattccgggcacccggaatttcgagcgcatgtcctcggcctgatcgcatggatcggcgctaatgaccccgcacgacgcgagagactcttgcacatggcgaacgaagtagattggacccggtcatga

SEQ ID NO: 12790 - RNA, 1266 nt, synthetic construct
  source 1..1266: mol_type = other RNA
atgactacccccgtcctcactacagatgaggtcaacgatgctgccgcatggtttagcaggacttacaccggctggacctggccagagcttctcagggcactggagtccgttctgccagctgccatcgcccgggatgccttacccgcactgctcacactctcgcctgtggagccccgacatccagccgaagcactcaggcgcgccttgaagaagtggacccgacccccagccaaaccaacgattgtgcccccaagcgtcccccctccacacgatactatcgccgaagggctgcctgagctgtactcggtgtctgaggtagctcagtggctggacctgacaaccggcgaattggagtggtttgccgaccatggaggctggctgaggacagcgccaagtaggcttcggcactatagggtctggacccgcgaaaaaagggacggggtcagagtgatagaggcccctaaaccgcgcctttgtgaagcccagcgtagattgctgcgccttttggtaagccggattcctgcccatccggccgctacagggttcatccctggtagctctacagctgattttgcccagccccactccggcaaggcaaccgttttgagagtggatctacgccattgtttcgaatctataacggctcctagaatcgcagaagttttccgacgcgctggatacccgccggcaattgctagggtgctcgctgacttatgcactacggctactcccgcggatcagctagctggcgtgccagctgagcacgccacctacttgcgtgggcggcaccttcctcaaggtgctcccacttcaccccacttatccaatcttgtcatgcggtcactcgaccggcgtctggatggttatgcccgcgcgaataggctcgcctataccagatatggggacgatctggcactatccggaaacgcgatggacgcagatcgggcgctctgggttgtgctcaaggtgatcgccagtgaagggtttacagtgcatgcaggcaaggttagaattatgcgtcagcaccaacgccaaagcctggccggactggtcatcaacgaccgacctcgcgtgtcccggagtgactacgacaatctgagggccctgctgcacaaccggagcgtgagcaatcagatgagaagagaggtactgggatgggcatggctggtgtcaggcgaccgggcttccggttcactgatggtggcattctctgggagtagaggcggacgaggacgaagagtaaacaggtctggctgcttagcctga

SEQ ID NO: 12791 - RNA, 1269 nt, synthetic construct
  source 1..1269: mol_type = other RNA
atgacatcccccgtgctcactgtggaggaagtaggcgaggctgcggcacgcttttcacggacatatactggttggacctggccggaacttcggagagcccttgattctgtgctgccggaagcaataacaagagacgccttgccgattctgctcgcgtggtatccagacgagcctagacatcctgctgcagccctaaggcaggttctaaccgagtggactcgtcccgctggagcaccaaccaccgtaccactgcctgaacctccgccccgaacgacaattgtcgatggccttccccaattgtacagcgaggcagaggtggctcgttggctggggtttactgccggggaactggattggtttgccgatccaggaaattggctccggaccgctcccccaaggttaaggcactacagggtgtggacgcgcgaaaagagggacggagtgaggctgattgaagcccccaaacctcggttgcgggaggcacagcggagaatactgcgactgctcgtaagccgaatacccgcccacccagccgctactgggttcattcctggatcttccacatcagcttttgccagaccccattctggttctgcaacagtgttacgcgtcgacttgcgccattgtttcgaaagcatcaccacccctagaattgctgaggtgttccggagggctggctaccctagttcgatcgcccgactgttagcacacctctgcaccactgctaccccagccgaccagttagccgatgtgcctgcctcccacgcagcctatctcaggggccgtcatcttccacagggcgcacccaccagtcctcatctgagcaacctcgtcatgagatcattggatagacgtctgcaggggttcgccgacgctaatgaccttgcctacacccgctatggagatgatctggcgctctcaggcgatgctatggatgccgaccgggccctatgggtcgtactgagggtgatcgcctccgagggctttacagttcatgccggtaaggttagaatcatgcgacggcaccagcgccagaatctggctggcctggttgtcaacgaccgaccacgcgtgagtagggccgagtacgacacactgcgggcactgcttcacaacgctaggctgcacggggcgagcagccaaaaccactccggtcaccccgacttcagagcgcatgtcctcggactgatcgcctggatcggggcaactgatcccactcggagagagcgcttgacgaggatggctgaccgcgtggactgggcgatgtga

SEQ ID NO: 12792 - RNA, 1119 nt, synthetic construct
  source 1..1119: mol_type = other RNA
atgacctcccctgttctgacagtggaggaggtgggtgacgtggctgcctggtttagccgcacgtatactggatggacctggcccgaacttaggcgcgctctggattcggtgttacctgaggcgattgctcgggatgcactgcccacgctgctggcaggatttcccgatgaacctcggcatcctgcagccgccctgaggcaagaatggtttgccgaccccggcaattggctccggactgctacaccacgacttcgccattaccgggtctggaccagagagaaaagggacggggtgcgtgtcattgaggccccgaaaccacgcctaagggaagcgcagcggagactgttgcgtctgctagtttcaagaatcccagctcaccccgcagcagccggctttataccgggctcatcaacctccgccttcgctcagcctcactctggaagtgccaccgtactccgtgttgacttaaggcactgctttgaaagcatcactactccacgaatcgcggaggttttcagaagggccggttacccaccaacaatagctcgcctcctggctcatctctgcacaactgccacacctgccgatcaacttactggagtccccgccgcgcatgccgcatatttgaggggccgacaccttccacagggtgctcctacctctccccacctgagcaatctggtaatgagatgtctcgaccgccgtttgcagggcttcgctgtggcaaacggcttggcatacacaagatacggcgacgacattgctctcagcggcgatgcgatggatgccgatcgcaccctgtgggtggtactcaaggtgatcgcctccgaggggttcactgtccacgcagggaaggtgagaatcatgcgccggcaccaaagacagagtctggccgggcttgtggtcaacgacagaccgagggttagtcgggtggagtttgataacctgcgggccttgctgcacaacgccaggcagcatggagcttcttcccagaattattctgggcaccctgacttccgagctcatgtcttcgggttaattgcatggatcggagcaacggaccccacccgcagagaaaggctaacacggatggccgaccaggtggattggacccgatga

SEQ ID NO: 12793 - RNA, 1266 nt, synthetic construct
  source 1..1266: mol_type = other RNA
atgacagagcgcagacttaccgctgacgaagccggggatgctgccgcatggttctcccgtacgtacactggttggacctggcccgaattaaggagagcactcgactctgttctgccgagtgacattgcgcgagaggcactgcctgcactgttccagtggcatagggtcgaaccccgacacccagccgctgctttgaggagggtgcttgcccgctggactgtacctcctgccccacgaccactgtcagttgcggagcccgtcgatcccgggaccatcactgagggtttgcctgctctctacgcggttgccgacctagccaggtggctggatctgaccgttggagaactggagtggttcgcagaccatggcggctggttgagaacagctgcccccaggctcagacattaccgggtgtgggcgcgcgctaaaagggatggagtccgcgtgattgaagctcctaagcctcgcatgagggaggtccagcgtcagttgctgaggctgttagtgagccgtatccctgcacacccagcggctaccggatttctgcccgggtcctccacagttgacttcgcccgaccgcatgccgggaaggcaacagtgctccgggcggatctccggcattgctttgagagcatcaccgcccccagagtaaccgacgtgtttcgaagagagggctacccacccgcgatagctcggctgctagccgaggtttgtacaacggcaaccccggtggaccatctgacaggtgtgcccgcagaacatgcagcttatctccgcggacggcacttaccacagggagcaccaacttcaccccacctgtccaatctggtgatgcggagtttggatcggcggctgcacggttatgccgctgcaaacgggctcacttacactcggtatggcgatgaccttgctcttagcggagatagaatggacgctgggagagccctatgggtggtgctcaaggtcatcgcttctgaggggttcacggtgcacgcaggcaaagtaagagtgatgcgcgcccaccaacgtcagacattggccggcctggtcgtaaacgagcgaccacgagtctcgcgggccgaatatgatgcccttcgggccctcctgcacaatgccagaaggcgcggcgcttcaagccaaaaccacgccggccaccctgattttagggcccatgtgcttggacttattgcatgggtgggcgctagtgaccctgacaggagagagcgcttgctgagaaccgccgatgaagtcgactgggcctcttga

SEQ ID NO: 12794 - RNA, 1272 nt, synthetic construct
  source 1..1272: mol_type = other RNA
atgacagaacctcgacctcctgcccggttgtcacccgctgaggtaggcgacgcagcagcatggttttcccgcacttatactggctggacctggcctgaactgttgcgggcccttgatgcggtcttgcctggggacgttgctcgcgaggtacttcccagcctcctgatgctcccgagagagcctagacatccggcagccgcgctacgtcgagttcttcggccctggacagctcccgcaccgcaactagccacaatgcccgttcctgcccggcgtgatactgtggctgaggacttgccagcattatattctgtgagagaggtggctgactggctggatctcacggtcggggaacttgaatggtttgccgatcacggaggctggctgaggacagcaagccctagcctgagacattaccgcgtgtggacccgggaaaagagggatggggtgagggtaatcgaagctcccaagcctaggctgagggagatgcagcggaggattttacgtcaactggtcagtcatatcccagcacaccgcgccgcgaagggtttcgtaccctggtcctcaaccgccgactttgcttggccccacagtgctaaagccatagttctccgggccgacctcagacattgttttgagtccattacagcgcccaggatcgcagatgtgttcagacgcgctgggtacccaccaacggtcgctaggctgctcgccgatctctgcacaaccgcgtccccagcagacaagctgcgaggagtcccatctgaacatgccgcttacctgcgtggaagacacctaccccagggagcaccgacctctccacatcttagtaatctggttatgcggtctttagaccgcagactgtacggctacgctgctgccaacggactgacctatactcgctacggcgacgatctcgctctctcaggccacgagatgaatgctgaccgcgccctttgggttgtcctgaaagtgatagccagcgaagagttcactgtgcacgccggtaaagtgagagtgatgagggcccatcagagacagaccctggccggtttggtggtgaacgatcgacctagagtgaggcgggccgattatgacaacctgcgggcgctgttacacaatgccaggcggtccggtgcctcaagccagaaccacgccgagcacccagatttccgagcccacattctcggcctgatcgcatgggtgggggcatcggatccagtcagacgagagaggttgctgcgcatggccgacgaagtggactgggaggcttga

SEQ ID NO: 12795 - RNA, 1281 nt, synthetic construct
  source 1..1281: mol_type = other RNA
atgtcagagacacaccccccgacacagttgtccgctgctgaggcccatgacgctgctgcgtggtttagccgctcttataccggatggacttggccagagctgctgcgggctcttgaaagcgtgctgccccccgacattgctagggatgccctccctgggctgcttgccagtcacagaagagaaccacggcacccggccgaagctctgttgagggctttgcggccctggataatcagaacacctaaacctcccacaacggttacagacgttcctcctgccagagatacaattgcagagggactgcctactctctactccgtgcgagaggtcgccgaatggctggacttgactattggggagcttgactggtttgcggatcatggagggtggctcagaactgcagcaccaaggctccgccactatcgcgtttggacccgggaaaaacgggacggcgtgcgtgttatagaagccccgaagcctagactgagggaggcccaacgccaaatcctacggcagcttgtagcgcgaatcccggcacaccgggcagctacaggattcatccccggctctagcaccgcagattttgtgcgaccccacagtggcaagccaacagtccttcgcaccgacctgcgacacgcctttgagagcataaccgcctcccgtgtggctgacgtattcaggcgtgtgggttacccacccgccatctcaaggttgctcgctgacctttgcaccactgccacccccccagatcggctaagaggcgtgccatctgcccatgcagccagattaagagtcagacacttgcctcagggtgcacccacctccccacatctatcaaatctggttatgcgctctctcgatcgacggattcaggggtacgcccgcgcgaatgacttaacgtatacccggtatggcgacgatctggcgctctcgggggaagctatgaacgctgatcgtgcattatgggtggccctgaaagtgatcgcgtcagaaggcttcactgtgcatgcaggcaaggtgcgggtgatgaggaggcatcagcgccagaccctggcaggactggtcgtgaacgatcgaccacgtgtcagtagagccgattacgacaatctgcgcgctctgctgcacaatgcaaggcgccatggtgccgcctcccagaaccacacgaaccatcctgacttccgcgcccacgtactcggtctgattgcctggatcggagccagcgatgacgtcaggagggagagattactcaggatggctgacgaggtcgattggactcggtga

SEQ ID NO: 12796 - RNA, 1302 nt, synthetic construct
  source 1..1302: mol_type = other RNA
atgactgactccgatccagcccccaggctgtcattagctgaagcacacgaagctgctgcctggttcagcaggacctttaccggatggacgtggcctgagttgctccgggccttggaaagcgtgctcccagctgagattgcaagagaggtccttcctgcactcctgatgcgccacagggacgaaccaagacaccctgcgcaggcattgctgcgagtcttacggccctggattatcgccagtccacccgcccagctgtcagtgactgtgcctgacccacatgaccccacaactccgccggagcgggacacaatcactgaggggctgcctacactgtacaccgctggcgaggtttctgaatggctcgacctgacaatcggggagctggagtggtttgccgaccatggcaattggctgagaactgccgctcctcggttacggcattaccgggtgtggagtcgggagaagcgagatggagtgagggtcatagaagcccccaaaccccgccttcgtgaggtccagaggcgaatactgcgccagctggtgtctaaaattccagctcatcgagctgccacaggattcttgcccgggagttctaccgcggatttcgctcgtcctcacgctggccagcccacagtgcttcgcgcagatctgcggcattgcttcgaatccattaccgccccacgggtcagggatgtgtttagacacgccggttatccgccaccgatcgcgaggcttctggctgatctgtgtacaaccgccacccctgctgatcagctgagaggcatgcctgccgaacacgccgcccttcttaggggccgacaccttccacagggagcacctacttcgccccatctcagcaacctggttatgcgctccctcgatagacggttgcatggctttgccgcggccaatgatttacattataccagatatggtgacgacctggccctgtccggtcacgagatgaacgcagatagagcactatgggttgtactccgcgtcatcacggacgaggggtttacggtccacgcaggaaaggtgcgcatcatgcgtgagcaccaacggcaaaggttggcgggattggtggttaacgcgcgacccagagtatcaagggctgaatacgacaatctgcgcgctctgctccataatgccagacaccacggggccgctagccaaaaccatgccgggaatgaagacttccgcgcccacgtgctaggccgtattgcatgggtgggcgccggtgatgaggtaagaagggagcgcctcctcgcaatggcagcagaggttgactgggaaaactga

SEQ ID NO: 12797 - RNA, 1059 nt, synthetic construct
  source 1..1059: mol_type = other RNA
atgcggcggtggcaacaaccagagcatcggggacaccccattgaccttccgggaccagccccgatcgactctttaccctatgagctgccagtgctcaccggtgttgatgatgtagccgcctggctggctttaacccctgccgaagtcgattggtttgccgatcgcggctcatggttgacaactgcccgcccagccctgcgacattacagagtttctcacagggagaagcgcaccgggacccggatcattgaggctccaaagcctatgctgcgagaaacgcagcgcagaatcttgagacgcctcgtgcagagaattccagcccaccccgctgcgaggggattcgtacctggtggctccacagccgcattcgcctgggcacactcagatcgaccagtcgttctgcgcgccgaccttcggcactgctttgagagcatcaccgtgtcccgtgtgcgtcacgtgttcgcgcaggctggataccctgcaggcgttgcacgcgtgctggcagagctctgtactactacaactccacccgaccagctaatagatgtggaccctgcgcacgctgggctgttgaggaggagacacctgcctcagggagctcctacaagcccccacctcgctaaccttgctctactgcgcctcgatcagcgattagacggctatgcgaggagaaaccagctgagatacacgaggtatggtgacgatctagctgtctctggggatgccatggacgccgaccgtgctctttggaccctgctgcggattgtcgaggactgcgggttcgtggtgcaccccgagaaagtgagaatcatgcccgcacatcagagacagcgtctcgcaggcctggtggtaaatgatcggccgcaagtcagtcgggaagactacgataggttgagagccctgttgcataacgcagcacgccacggccctgaaagtcaaaatcattccgcacaccccgactttagggcccatgtctatgggctcatagcctgggtgggcgctactagcgaaacacggcgaaggaggctgcttgacatggccgatcatgttcattggtga

SEQ ID NO: 12798 - RNA, 1323 nt, synthetic construct
  source 1..1323: mol_type = other RNA
atgaccccgaacgaactgtccggggatgagcttcgcgcagtcgctacgcacgctgcagatgccattacagactggacatatcctaggattagaggggccgtgcatgcggctctagcagccactaccccacggaggtttgcccttccacatgtcgtcgccgatagagtagccacggatgccctggctctgtcaccagatcggcctgacaacgtggcggccttcatcggtgaggcgctgcaaccgtggagaagacctgatccaccaccccctccccccgataccagactcaggcttcaacccgcggaacctcagccccctaccggaatgcggcacggattaccccccatcgcggggtatgaggagctcgcattctggttgaatttgactgtgggcgaactggattggctggctgacaggggacgatggctggaacacgcacggtaccccctccagcattaccggattactcggcgggagaaacgaggcgggcacagaattattgaagccccaaaacccttgctccgcgaaacacagcgtcggctgcttcgccgagtggtggagcatattccggcacaccctgctgctagaggatttgtccgcggctccagcactgccgcctttgcttggcctcacgcagaccgtgcagctgtagtgcgagtcgatctacgacattgtttcgagagcatcggcatctcagccgtgcgcgcagttttcacaagtgccggctaccctccgcatatcgcacgcgtgctggccgacttatgcacaaccactacccctgctgaccagctacacggtatagactgggaacacagggatctcttgaggcgttctcacctgccccagggagctccaacctctccccacctggctaatcttgttctgaggcggctggacagaagaattgatggctacgccaagcggaatgacctccagtacacccgctatggggacgatatcgcagtcagcggtgactccatagatgcccacaagactctccgcgttgtactggcgatagttgaggattgcggcttcacggctcatccaggaaaggtgcgtatcatgtacgcccaccaacaacagcggctcgcagggttggtggtgaatgataggccacaggtgtcgagggctgactatgacgccctgagggccctcttacataacgcagttcaccacggccccgacagtcagaaccatcatggtcacccagactttcgagctcatgtccacggactgatctcttgggtgggcgccacaaaccctacaagaagaaggcgcctgttggaccttgccgcccagatcgactggaataccgagcagtga

SEQ ID NO: 12799 - RNA, 1293 nt, synthetic construct
  source 1..1293: mol_type = other RNA
atgtccgaccccttatttagccctgatgaggctgccgaaattgccgcacatgtggaggcccacttgactgcatggacttggcctgagatgcagcgagccctgatcgcagcagggctgagtccggagttcgccgacgttgtgggcctgagactgttcgacccctctgacgacgttgtcgcaggtgcatctgatattgaaagccgcatccttggggcgctgcgagacaggacagcacccttgccagagacggatgacaggtctgccccagctgtgtgggagctgaccgagccttccagcactgggagagttcgtgacgacctgcctgatatatacgacgtggagcagctggctcactggcttaacttcactgtcccagaactggaatggttcgctgaccggggcagatggttaaggaatgctcgagagcctctccggcattaccgggtgttcagggtcgaaaagcgtgatggctttcgcgtgattgaagcccccaagccccgcatgagagagactcaacgccgccttctccggaggctggtggaaaggatacccccacacccggcagcacggggatttgtacggggcagtagtaccgccgcttttgcatggccacacacagaccgcccggtcgtgctacgggttgacctaaggcactgcttcgagtcaatcgatgcccgaagagtaagacatgtgttttcagcggctggatgttccccagctatcgcccgcatcctgaccgaactttgcacaaccgcgaccccacccgatgctattcatggcctggaccctgtgcatgccgggctgctaagggaacgtcacctcccccagggtgcaccaacgagccctcacttggcgaatctcgttctgcgtggaatggatcgccggttggccggttttgcggcccacaatgatcttagatatacaagatatggcgacgacttagctctctcgggagatagaatggacgcagaccgggtcctctggaccgtactccgcgtcgtcgccgatgagggcttcacagtgcaccctgccaaaaccagaatcatgcacgcccaccagcaacagaggctggctgggctcgtggtaaacgatcggcctcaggtttccagagcggatcacgatgccctccgagctctgctgcataacgctatacggacaggcggtgccgcccagaaccatgacggacaccccgatttcagggctcatgtgtacgggaagattgcctggatcggagccacctcacccgctcgaagggacaaacttttggatatggcctctcatgtggattggtga

SEQ ID NO: 12800 - RNA, 1314 nt, synthetic construct
  source 1..1314: mol_type = other RNA
atgaccactgacagtacacatccgggagactcaaccgacagcgcccatccagacgacttaggcgggctgggtcctgagatccgcatacccgcacggtccctcgacctgctcatcaataggctcgaggtggatcctcggtggtccgttcatgctctgggagatatgcttgccgctacgacagctcctgcgaccgctactgcactgctgggcttgttgttggaaaagttcccagaacggcccgagcctgaagctgtacgacgagccctgtggtcaatggtaatagagaatagatcgcacgtcttcggcgagctgcctacgccagagatgacctttgccctgacaccattggccgatgccactgacgttgcccgatggctgggcttgacagtgggggagcttgaatggttcgcagaccggggactttggctccgcagtaagaaaaccgcactcgcccactatcggtacgtgacaatcccgaagagagatggggtgagagtgatagaggcgcctaaaccccatctgcgtgaaattcagaggaggatcctgcgcgagattcttgaccggattcccccccatagggcagcccaaggctttgtagccggacgttctaccgcctctttcgcctggccgcattcagatagaaatgtagtgctcagggtggatcttaggaattgttttcccactattacatccgcaagagtccgcgctgtctttgccgccgtgggctatcgacgaacatctcggctgctcagcgagatctgcactaccgctactccaccagatgtgcttcgcggcctagatttcgcacatgcttctttactgcgcgctagacaccttcctcaaggtgcccccactagccccgccttagccaacctagttatgcgcaccatggaccggaggatctggggttacgcacggcataacaacctccactattcccgatatggggatgacctagctatctccggcgacgttatggacgcaggacaggtcctgtggaccgttctgcggattatagctgatgaagggtttacggtccacccagacaaaaccaagattatgtacagccaccagcgccaacagctggcggggttagtggtcaatgaccgtccacgcgtgggcagagtcgactacgataatctgagggctctgttgcacaacgcgatcagaactggagcacacgcccagaacagggacgatcaccctagattcagggaacacgtgtacggtaagattgcctggatcgctgcgacaagtcccagcagaagaaacaccctgctcgccatggcagaaagggtggattgggatcgttga

SEQ ID NO: 12801 - RNA, 1278 nt, synthetic construct
  source 1..1278: mol_type = other RNA
atgaatgattcctattcacttggaggcttggggccgcgcatgagactgactgcagatagtgtcgaacatctgctcacgcgcctcgaggtagaccctaggtggactgtttccgccttggtggaaatgctcgttgccacggtcgagcagcccgtggtcaccgaactgctgggcatgctcctggacaggtttcccgagcggccaaccgatttgggcgacgtacgcactttcctagctcccctaataggtgagccaagaagcagggagttcgatgaccccgcggatccggtgatgcgtttcgatctgccccgccttcctgactactctgacgttgcaaggtggctcaacctgactgtcggggagctggaatggttcgcggacagagggcactggttaaggactaaggatggccctctgcagcactatcggtattggcaggtacccaaaagggacggggtgcgcatgattgaggcccctaagccacatctgagggaaatccagagacgggtgttgcgcacaatactggatcatattcctccacatagggcagcccagggctttgtcccaggaaccagcaccgcatcatttgcctggcctcacactgacagaccagtggtcgttcgtctcgaccttagggactgtttctcctcgattggtacagcacgggttaaggccatcttcgccgcagtgggatacgagcgaacagctcgggtgctcgccgaactctgcaccacaaccaccccgatcgcccatttacgggacattgaccatcgacaggccgctctgctgcgacagagacacctgccccaaggtgctcccaccagtccagcccttgccaatttggtgatgcgtgcaatggaccgaagaatctggggatacgctcagagaaaccggttacactattcccggtacggggatgatcttgctatttctggcgatcacatgaatcccgaggcagtgttatgggtggtgcttaggatcgtggcagatgaaggatttaccgtgcaccctgataagacaaaaacaatgcgagcccaccagagacagcaactagctgggctggtcgtaaatgaccagccacgggtcgccagaagggactacgataacctgcgcgctttgctgcataacgccatacgcacaggcgcgcaagctcagaaccgtagcgcccaccctaactttcgggctcacgttcatggcaaaatcgcttggatcggagcgagctctcctcgccggagaaatacgctcctggccctggcagagcaagtggactgggatcgatga

SEQ ID NO: 12802 - RNA, 1311 nt, synthetic construct
  source 1..1311: mol_type = other RNA
atgggtgacctattcggaggtcctcagggcgtttcccatccccgcagatacgattctgcccaagttcggttggcggtgcacgctatcgacaggttacgccgccctgtgacacctgacagatcagccgaggtatggaccagccgcgagattaatggagccctggttactgtgctcgacccagtagtggctgatgacgtcactcgactgttagtgacggcattcgctgcacccccccatcgcgatgacttggccgcttttctggccgcaatccccgcagacagaaccgtgcgagtggccgagcccgtagtttctcaccccgtgttcgccgtccggcctatcgacgatgtcaccgcactggcccactggctcgctatgtccgttactgaacttgattggtttgccgcccgtggcaggtggtcaagacgtgcaaaaccacagcttcggcattatagagtgcaacggctgcccaagagggatgggggcttcaggattattgaagccccgaaggagaggctggccacagctcagaggcgaatcctggacgagattctgagcgccgtgcctccacatccagcggcacatggatttgtgaggggccgcagtgtgcagagctacgcgagcacacacgctctgcatgataccgttgtgagagtagacttgcggagatgttttgaacacgtcacatacccgagagtccgggccgtgttcgctgcaatagggtacgcccccgcagtggcagcctaccttgctagtctgtgcaccacgacaattgcgattgatgatgaaaaactcgtcgatccaatacacgctgccttactgcgggagagacatttaccacagggcgcccctacctctccagctctgctcaacctcgtgctcaggcgcatcgactttcggatcgcaggctacgcggccaagcaccgtatcgcctatacaaggtatggagatgatctcgctttctctggggatgacctggacgccggaaaacttgtctggtttgttactagggtcgcggcagccgaaggctttgtcgtgcacccttccaaaacccgcatcatgcacgaccaccagagacagcaattgggggggcttgttgtgaaccgaggggtccgcagttccagagccgacttcgatgctctgaaggccttgctgcataacgcaataaggcacggtgctcagtcacagaatcgagacggtcacccggatttccgggctcatgtatatggcaggattggctgggtgtcgactggatcccctgcacggcgtaagcggctacgagacatggctgcgcgcgtggactgggagagctga

SEQ ID NO: 12803 - RNA, 1308 nt, synthetic construct
  source 1..1308: mol_type = other RNA
atgagcgacgatcggacatctccgggcataggggcacggaggagattcgacagtgtgcaagtcgatcggatcgtgatcgctatcgatgagttacttcgatccgtggaggctccccgagtggctgacgtgtggacctctcgtgagattgacggagctcttgtggacgtgctggatcccgtagatgctgatgacctgactcgtgccctactggccgccttccctgcacctcctcgatctggaccagtggctgctttcgtggcggatctgccagcagcccctcgagtcgtcgtgccagagctgagagtctcagctcccgtcttcgaggtgcgccaggttgaggacatcgccgcccttgccggctggctaaatatgagcctggaagaactggaatggttcaccgccagcggtcgacggagtcggagactgaagccagccctgcgccattatagggtgtctcgcattccgaagagggacggtgggtacaggataatcgaagcacctaaagagaggctggctacagctcagaggaagattttagaccagattctgactggattgccaccccatcccgcagcccatgggtttgtgagggggcgtagcatcacatcattcgctgctaagcatgcactccacgacaccgttgtgcgcgttgacttgcgcagatgctttgaacatgttacgtacccccgcgtccgtgcagtgtttgctgccattggatacgcaccagccgtagccgcatatctgggctccctttgtacgacaaccattgccgtggatgatgaagccttggttgacccgcatcatgcagccctactcagggaacgccacctcccccaaggcagtcccacttccccagccttgctcaacctcgttttaagacggctggattttcgggtagccgggtacgccgataaacaccacatcacttataccagatacggcgacgatctggcgttttccggcgatcagatcgagattggtagattgctttggtttgtcgagcgggtggcagctgcagagggcttcgtcgtacacaggaggaagacccggatcatgcacgaccaccagagacagcaactcgccggcctggtcgtaaatcggggagtcagggctggtcgcgcggagtttgacgctctcaaagccctcctgcataacgcgatacgagatggagcgcacagccagaaccgggaacgtcaccctgacttcagggcccacgtttatgggagaatagactggctgtcgacaggctcacctcagagacgcgagagacttcgcactatggccgcacaggtggcgtgggatagatga

SEQ ID NO: 12804 - RNA, 2592 nt, synthetic construct
  source 1..2592: mol_type = other RNA
atggaacagtggatcacgacttccgaagctgccgccagactaggcgtgaaacggggcaccttgtactcctacgtatctcgaggggtgctcacttcaaggcgcatgcccgggcagaacgaatccttgtttgaccgaacacagatagattcactggccgctgccaagcacgacggaagacgttcgggggataggctgcttcggttccgggctgtggctagcggagtgtccgcaattagggacgaccggttgtacctccgcggtagggacatcgaggagctgtgcgccgatatggatttcgccgatgtcgcccagctggttctcgacagcagtgaggcgaggcctgtccccgacgttgacacgaccgtggttcacggcgtgtccatcgagaggcggatcccccttacagtcgcactagtggcagccgctgaccctctcagggccgatcttagcgacgtgggcgccagagtcctgggtctactcccacatctggcagcggccgtgcctgaaattgattttgcccatagatgggtggatctgctagccaccgttctgatcgataacggcctcgctgcgtctaccactgcagcacgcgtagccgcttctgcaagggcgggaatcttcgacgcactactggccggttacgccgcacttgctggtcccctccatggaggagctcctgcgacagcacgcgcccttctggatgctgttgtagggggtgctgctgttgaccgtgccctggcagatgcagtggtgggaggcctcgtgcccggatttggccacgtgatatattcagggcccgaccctagggctcagattgttcttgatagagtgcgcgcggagcgtccaaggagttcagccttagccgcggcagaagcagtcgaacagcgggtcggcagaccaatgaatatcgacttcgccggcgccgtcgtcactcacgaattagggctgccggctaggtctggggaagtactttttgtgggcagccgacgggcttttagagagcctccgccagctgcttcgtctctctgtggaggaggagtacgcagagggccggcagctctcgctcgtcaaagcgacggcctgtcttgtagcgctgctgccgtgaggacactgtcgtctcgcagatcacctcggaccaccacccgccatctgatcgggggagcttccggagcgttcaccgttggccccagaagtcgcgctcaggctgcccattctgtttgttgggtgagagcggacgacgataagagcggtcggactgtcttacccgccgcggagagggaggatgtcatcgaaccagggatgagatccccattccgcttcgaccaacaccgagtgcaccgagcagtcggcgctgtagtcgggttgttgggggcagcagccggtgatgatgccggtgatgatgccggctcacttcgcacagcccccgaattggacggcgccttagttgcagtcatcgaccccgtcgatgccgacgaccttgcacaggccctgattcgagaattcgcctcccccccgagttccgagagactgacggcctttatagcggccattcccgcagccccgcgagtaagatggcctgagccaaggactagtgcccctagattcgacgtcaggcaagtggctgacgtcgaggccttagcccactggctcaatctggatttgggtgagctggaatggttcgcggcacgcggacgttggtctagacgcacagccgagccactcaggcactatagagtgaaacggattgttaagagggacggcggatttcggatcattgaggctccaaaagagaggctggctactgtgcaacggaaagtgctagatgaaattctggtacatgttcccccacacccttccgctcatggctttatgcgaggacgtagcgtggaatctttcggctcacggcatgcacttcacgacgtagtcgtgcgagttgacctgagaagatgtttcgagcacgtgacataccctcgagtcaaggccgtattcagtgcaatcgggtatgcaccagctgtcgccagctatctggcctgcctgtgcaccacgtccagagctattgaagaccggcaccgcgtggactttgaccacgccgtgctcttgcgcgagcgtcatctgccacagggagcacccacatccccagcattgctgaacttggtcctgagaaggctcgattacagagtggctggctatgccgcgaggcatggcgtgacctacacccgttatggggatgatctggcgtttagcggagacgatgtggacgtgggggggctcttatggttcatagagcgggtggtgaaggccgagggctttgctgtccatcgggacaaagttcgcgtgatgcgagatcaccaacggcagcagctgggcggtcttgtggtgaatcgcgggcctaggagctgccgcagtgactacgatgcactgaaggccctgctgcacaatgccatccgggacggcgcagagagtcagaaccgcgatgataggcctgattttcggtcatacgtttatgggcggattggatgggtgagcactggtagcgccagacgaggcgagaagctccggacaatggccgctcaggtggactggcacaggtga

SEQ ID NO: 12805 - RNA, 1299 nt, synthetic construct
  source 1..1299: mol_type = other RNA
atgggggcagggttgagcagaccacgccgctttactgcaagggagactgccatgatggcaggcgctgtggcacagcgccttatgcgcgttagaggttccgacttgggcccagagtggactcggcctgaattaacagacctgctgatgcgggtggtgagtcccgcagacgcggaagaagtggctcgcgctatcctggaggccttccctgcacctccagccgatcccagagaggcgatcagagagctgatcgatgccatgtgcgacggaccattccgattcgtggctgatcccgatgtgtcgacccccgtgttcgatgtcaagcggattgctgacgtagaagccctggccgcctggcaaaacatgtccctccccgaactagactggttcgctgccaggggaagaagaagcaaacggctgcccgaaagactccgacattatcgggtctggcggataccaaaagcacacgggggcttcaggattattgaggcgccgaaagagaggcttgccacagcccagaggcgcattctggacgatgtcttagctgctgttcccccccatccagctgcccacggatttgttaggggtcgatctgcagtcagctttgccggcccgcattccctccacgacaccgtagtgcgtatcgatctgaagcattgtttcgagcacgcaaactacagacgcgtcaaggccgtgtttactgctatcggctatacccctggcgtgtgtgaatacctggccgcgctttgcaccacaacgtgcgctatagatgacgcagcccagctcgatcctttccacgctgcactcctgcgagaacggcacctcccacaaggagccccaacgtcacctgccttgctaaacctgattttgagacgcatggacatcaggatagccggctttgccgagaaaaatcgactcacatatactcggtatggagacgaccttgctttatctggtgatgacatcgaccctaaactggtcacctgggtggtcagtagcattgtgcacgatgagggcttcagggttcatcccgataagcttagggtcatgggtgatcaccaacggcagcagctggccgggttggttgtaaatgctgggcctagagcacggaggaccgactttgacgccctgaaggccctgctgcataatgctgtgcgagatggcggggagtctcagaaccgtgagggaaggggggactttcggggatacgtttacggtcgtatcgggtgggtgtcaacaggctcaccgacccgtagacgcaagctaatggcgctcgcagcgcaggtagattggtccgtgtga

SEQ ID NO: 12806 - RNA, 1302 nt, synthetic construct
  source 1..1302: mol_type = other RNA
atgacaggacagggcctcgagcccccacaaaggtttaccggacatgacgccaacgccatggggtttgcggtcagcagaaggatgatgaggctgaggcctgctgaacgcgcggatgcctggacatggctaaccctgcaggagatgttcgcagacacagtgtggcctgacgatgccgatgagatcgctcaggctgtattggccgtgtatcccgaaccgcctagccggattcaggaagcgctgactgccgtgattgtcgccatgcccggaaggagagagccctttgcagccgacccaggcagtagttctcccgtcttcgatgtgcggcagatcgcagacgtggaagaactcgcagcctggcagaatttatcaatgcccgagctagactggttcgccgccagaggcagaggatcacggagagcccctacaaggcttcggcactatcgcgtgtggcagataccgaagagacacggggggctgagaataattgaggcccctaaggagcgtcttgcgacgattcagcggcggatcctggatgatgtgctcgcccatgtgcccccacatcctgctgcccatggctttgttcgcggccggtccgtcacttctttcgccggtcctcacgctctgcatgacgtcgtgctgcgtattgacctgaggcactgctttgaacacgtaacctatccacgcgttaaagctgttttcaccgctatcggctatcagccgggtgtcgcggcctaccttaccgctctatgtactactacgattgctgtggatgaccagagattgaccgattccctccacgccgcattgttacgagaacgacacctgccacaaggcgcacctacttcaccagcattgcttaacttagtgctcaggcgaacagacatccgaattgcaggtttcgctgcagctaataggctgacgtacacacgctacggggatgatctcgcactttcgggagatgacgtagacgtgggacgtgtcctctgggccgttagctccatcatacgcgacgaaggctttaccgtacacccagacaaagtgcgggtgatgggggagcatcagcgacaacagctgaccggtctggtggttaatgccggcccccgtgcagcaagagcggattacgatgccctgaaagccttgctgcacaacgctatcagggacgggggccaatctcaaaaccgcgctgggcgggatgacttccgggcttacgtttacggaaggatcggttgggtgtccacagggagccaggcacgcagaagaaagctgactgagatggctgcccgagtcgactgggagcgctga

SEQ ID NO: 12807 - RNA, 1302 nt, synthetic construct
  source 1..1302: mol_type = other RNA
atggtcgggaagcaaaccgcagcccaacccgaccggtttagtcgcaacgatatccacaggatgagtgcggtcataagaaggttgctgggacctcctctcgatgatggctacgctgaacgggtttggactcgcagagagctgaacggcgccctggtcactgctgttgaccctgttgacgcggaagaggtggccagggagctgctgatgcgatacccaacaccaccaccgttgcccggcattgccgatgccgttcggagagtggtcgccgtcttgactgctcctgtgatccgcgaaccagtgggccccccaagattcggactccctgaaataggtgatgtcggcgcccttgcctcctggctgaatgtctcggttgacgagctcgactggttcgccgatcatgggctgtggcttcagagggctactccgaggttgagacattatcgcgtaacacgaattccaaagcgtcactctggatttcgcgtgattgaggcccccaaggagagacttgcaacattacagcgcaggattctggacgctatcctcgctgacgtgcctgcccatccagcagcccatgggtttgtgcgcggacgttccccgtactcattcgccgctccccacagcttgcacgacaccgtcattcgggtggacttaaaacactgcttcgagcacatcaccgcggctcaagtgcgggctgtgtttacggctgttggctacagatctgcaacagcacggtgcctggcagagatatgtaccacagcaacagcgttcgatgatctgcccggtgacgaccctttccacgctggattgctcaggggccgacacgtccctcaaggagcacccacctcacccgccctggtgaatctcgcccttcgtaggctcgactttcggatcgcgggctatgctgcaaagaatggactggcctacaccagatatggtgatgacctcgcgctatccggggatgagatgaatgtggggcagctgctgtgggtagtgcggaacgtcatcgtagacgaagggttcactctgcatccagagaaagtgagagtaatgggagatcaccagcggcaacagctggccggcttagtggtgaatgtgggtccccgaagcaggaggagcgatttcgatgaactaaaagccctgctacataacgctacctgtacgggtgcccgggcacaaaacagaggcgctcatgccgattttcgagcccacgtgtatggccgcatcggttgggttgcaaccgggtctgcagcacgtcgacgcaagcttctcgcccttgctgccgaagtagactgggacgggtga

SEQ ID NO: 12808 - RNA, 1272 nt, synthetic construct
  source 1..1272: mol_type = other RNA
atgacggcaggcctccggagcgaacagaggtttagtgccgacagagccgcatcgttggctaactggatcctggaagatagggacttgctgtgggatagctgggctgtgtctgccagactatcttggcagctgcctcctgagattgcggacgaggtggccgatgccattctagtggcgctgccagaacaacccagcgcaccggaagtgctcgccgaattcctggcagccattccgtctgagcctgtgattatcatccccagtgagcctaacccacctgtggttgccgccgggttgcctgtgatcactgacgtaggcgagcttgccgcgtccctaaatctggacattggcgaactggaatggtttgctgaccgcggcacctggttacgtacagctagagtccccttgaggcattacaggataactcggataccaaaacgcgatggagtacggatcattgaggctccaaagccgcggctggccgagatccagagaaaaatcctgaggaggatccttgaccatagagatccccaccccgctgcttgtggtttcagaagggggaaatccgtggcacacttcgcatggccccacactgaccgacctgtcgttcttagactcgatctgcgacactgctttacaaccatcggtaccgctcgcgtaaggcgggtcttcgccgattgcggctactccccagccgtctcacgcgtactcgccgaactcagcacaaccacgacctcatccgacgccttgggagatttagacccatggctggccgcaatgctgagagcccgtcacttgccccagggagcacccacaagtccagcacttgctaatctggtgatgattcgcctggaccgtaggctggcaggatacgcccgaaggcacgctctccgctatactcggtatggtgatgatttagcgttctccggcgatgccatggatgccgatcgggtcctttgggctgttctgcgcatagtggcagcagagcggtttgtggtgcatcctgacaagactagaataatgggtcggcaccagcgccaacaactggctgggctcgtggtcaatgaccatccccaggttcctcgagcggagttcgacgccctcaaggctctgctgcacaacgccatcaccaccggggcttctacacagaatcatgcaggccatccagactttagagcacacatctatgggcgtattgcttgggttggagcgacaaacgcttcacgacgcgagcggctccttgccttagccgatcaggtcgactggagcgcgtga

SEQ ID NO: 12809 - RNA, 1254 nt, synthetic construct
  source 1..1254: mol_type = other RNA
atgcgccggtaccccagatccaccgctgaaatgctcgccgccattgtcgacgccgctgatcccgaatggacacgcgagggcctagccgacgccttatcagcacacaggcgggggctggatgatgcccaagccgatgcagtcgcgggccatctcctcgttgccttccctcgacaacccccagacagaagggacgccatcgccggacgtatagtggagctggccatgccacctatgcgggagcgacctgcgttgcgcgagttgtgggatggattaccccgctatacagactactatgcgctggccgccgcgtacgatatgactgtaccagagctggactggctcgcagaccgcggtacatggctgaggtctaggacgggtccgcttcagcactaccgggtgactccaatccctaaaaggagaggggcccgtgttctggagatccccaagccccggctgagagagacacagagacgaattttgagaagggttctggaccggcttccccctcacccagctgctcaaggcttcgtggctggaacaagcccagccacctttagctcaccacacgcaggccgtcccgtagtgatacgcatcgatttgaggagatgcttcgagactattactgttgctagagttcgtgcggtgtttgccgcagtcggttatccaccggctgtagcacgggccctagctgacctctgcactactaccacccctgcagagagacttgtcggcgtggaccctgtgcacgccgcaatccttcggtccagacatttaccccagggcgccccgacatctcctgcactagctaaccttgtcatgcggaccctcgataggcgtattaccgggtacgctcaccgacacggcctggtctacacgaggtatggggacgatatggcactgtccggaaccattgatgatccttctgcagtggtgtgggtggtgaggcagatcgtggccgacgaagggtttacggtgcatggtgataagactagaatcatgtatgcgcatcagcagcagcggctcaccggcttggtgataaacgacaggccccgcgtctgtcggagcgaatacgacgatctgcgcgccctgctgcacaatgctatcagaacaggagctcgagctcagaatcgcgacgatgtaggagacttcgaagctcatgtgcgggggcgcattgcatgggttggcgctaccagtccagccaggaggcagaaactgctggaaatggcaagtcgagtcgactggagctcggattga

SEQ ID NO: 12810 - RNA, 1284 nt, synthetic construct
  source 1..1284: mol_type = other RNA
atgacaggcgattacctttacagtcccgattgggcgagactgcttgcagacctggtggtggctgctcgggcacgatggaggaggagtgaccttgctgctgccatggcagaagtgttggacgacgcagaagcagatgggaccgcgcacaggatcctgcaggccttcccaagagagcccgtggacgttcgggccacattagctggctacctggtggagctgcgcagtgtgtcagaaccgctcagcgagccccaaaccggcgcattgctggctgctagtgcgcgtaccccagtgctgtgggcaggtctacccgtgctgaacactcctgccgagctggccagcttcctggacctcactattggggaactagactggtttgcagatcatgggaactggttgcgttcacatcgcggtccgctgcagcactatcgtcaacgacgaatcgccaaaaggtctgggctccgactcctggaaattcccaagcctcggttaagggaaatccagcggaaacttctgcgaacgctcgtttcggtcattgaaccacatcctgccgcgcatggatttcgccctggacgcgatgcaagatcattcgccgctccacacgcaggtgggcctatagtgttgagagttgatttgcgggatttctttgcctctgttcccggagctaggatccgggcggtgtttgtcgcagtgggatacccacccccaatcgccgccttactggctgatctgtgcaccacagctactcccatagccgccctgtgtgggctggatcccgccattgccggccttctacggggaaggcacctaccacaaggagcctcaacttccccagcgctcagcaacctcgtcctccgcaatacggatagaagaattgccggctatgtagcaagacacggcttgcgttatacaaggtatgccgacgacctcgctgtgagcggctctggatttgatcctgccgccgtaagatgggtcatcgagaagattgtcactgacgagggattccgcttgcatccggacaagacctctgtcatgcgcagccaccagagacagcggctggcttccctggtaatcaacacccggcctcaggtaaatcggagcgagtacgacgcccttcgggcccttctgcacaacgctgcttccacaggtgcagcggctcagaatagggggggccatgagcacttcagggagcacgtttttggcagaatagggtgggccggtgcctccaatcctgacaggcgcagagtcctgttaggcctcgcagagcgagtggattggtcccgctga

SEQ ID NO: 12811 - RNA, 1266 nt, synthetic construct
  source 1..1266: mol_type = other RNA
atggcggattgggcctttgactccggaacagccgccagacttgcgcgcgttgtagtggagtcgcgaacttcttggcgcgctgctgatgtggctgaagccctcactcagctgctgcccccagaacaggccgaagagctggcagcgcgcatgttggcagccatgcctagtccgccagtcgatgtcggtcccgccgttactggctacttggccggacttcgtcggcaagatgcccctgccaccattgcctttgaggtccggaccgctgagctttgggcagggcttactcccctggctgatcccgctgctctcgctcgtttgttggacataacagtcggtgagttggagtttttcgcagaccggcgaggctggctgcggacaaaaccgaccgcactgcagcattacaggtatcgaaccctgcccaagcagtctggactgagagtgctcgaaatcccgaagcctaggctacgggagctccaacggcgggtactgcgtcattgcgtagcccctattccaccacacccagcggctcacggtttcgttcctgggcgcagcgtgcataccttcgccgaaccccatacagggagccgcgttgtgatcagggtggatctgcgggacttttttttaactgtggctcgcccacagatcgaggccaccttccataccgtaggctatccccctgcagtgggtgaagtcctggctgccttatgcacaaccgcgacggctcccgctgcgtttgcaggaattgatagtgctaccgccgctcgactgaggaggcctcacctacctcaaggggcccctacaagtcccgccctcagcaatctggcaatgtttgaagtggataggcgccttgccgccttcgcaggaagacacgggctgtcctacacgagatatgccgacgacctggccttctccacagggttaggcgagccggcaatcgcagtgagcgctgtcctggctgtgactagaaaggtggttgcggctgccggccacagactacacccaaggaaagtgcttgtgagacgagcccagcagcgacagcagttgactggcctggtcgtgaaccggacgccacaacctcccagggccgagtttgataccctccgggcaatcctgtacaactgtgcccgtttcggcccagagtcacagaatagagacgacttagctgacttcaggggccacctcctcggcagaatgcagtgggttgcatcaggatctgcaacaaggcgccgcgccctcgcagaactgttcgacagaatagcatggtga

SEQ ID NO: 12812 - RNA, 1278 nt, synthetic construct
  source 1..1278: mol_type = other RNA
atgactgtggtggaggtggctcggcgagttccgagaagctggcgccatgcagtggccgacagggttgtgctcctcacagaggagatgtggacggccgaaaccattgcgtcactggtgagaggcaccgttcccgatgaactcgtcggtcctgtcgtggaagcattgctgtctggccacccacaacctccagtccaggtcgtggatggacacgttcgtcggccaaggaccgcaccccttgtagcagcccttgacgccgtaaggatcgtggagactctagactctggaggccccgtagacgttcctgggttggctctgcctgacgtggcatccatagctagaatgctcgatctgactgttccggaactggagtggtttgctgaccatggcaggtggttgcgacatgcacgcccccctctacgccattatagggttgccaggatggtgaagccagccggcggctttcgggtgattgaggcacctaagcctagactggctgaggctcagagacggatcctccttcgggttctggatcctgccggtgctcatcctgctgctagagggttccgaccagggggatcggtgttggcctatgcctccccacacgtgggctccctttctgtcgtccgcctggacctaagggattgtttcagtaccgtggctgtcccacgtgtgcggagcgtgttccggagacttggatacccagcccccgtagccacagtgttggccgatctctgcactgtagccacacccgctgacgagttgcgcggattagatccctggcgggccgctacgttacgttccaggcacttaccgcagggagccccctcatcacccgccttagtgaatctggccctccaccgcctggatgcgagactgacaggccttgcgcacgcacagggggctaggtataccagatacggtgacgaccttgcctttagcggcgcacgagatcctgcactgatcgcgggcgtagcgccgaaaatagtcgctgccgaaggactgagcgtgaacccccggaaaacacgcattatgcgtgctggtgcacgacaggaactggccggtgtggtcgtcaatgcacgggctcaagtcccacgggcagaatacgacgatctcagagccctgctgcacaatgcggcaaggagtgggggggagagtcagaaccgagatgggcaccccgactttagggccttcgtttacgggaggatcgcctgggtggcccagggaaacgagcaaagaagactccgattgctggcgatggccgctcgtgtccgttggtga

SEQ ID NO: 12813 - RNA, 1278 nt, synthetic construct
  source 1..1278: mol_type = other RNA
atgactgccgttgagatcgtgaggggcctgccaagagcacagcgctatgccgtggctggtcgcgtggtgtccctaacagaagatctgtgggccgccgatgtgattgcccccctgattagaggcgccgtgccagatgagttggttgatgccgctgtgcaggccctgttagctggccatcccgagcctccggtgcgttttgtggacggcgatgtcctgcagtcaggacctggaccactggttgcggccctcgacggtgttagaatagtagttgccttagagcccgctggtcctggcgacgtaccaggactcgccctgcctgatgtggctgcggtgacgagacttctggacctcaccgtgcctgagctcgaatggttcgcagatcacggaatgtggcttcggcatgcccgaccccccttaaggcactatcgggtgtctcgaatggacaaaccggccggaggcattcgtatgatcgaggctccaaagcccaggttggccgaagcacagcgacggatcttgcggcgcgtcttagaccccgctggagctcatcctgctgctagggggttcagaccggggggatcggtacttgcctacgctgccccccacgtcggagctagaagtgtcgtcaggctggacctgcgcgattgcttctccaccgtgacagtcccacgggtacgcaatgtgttcagacgacttgggtattccgcacctgtggcaggcgtcctagcagacctgtgtactgtgtctacaccagccgatgaactgcacgggctagacccatggcaagccgcgacaatgaggagccggcatctgccccaaggagcacctacctctcccgccctggtaaaccttgctctccaccggcttgatgcccgtctcaccggcttggcacgcgcacaaggggctagatacactcggtacggggatgacctggccttttcaggcgccctggaccctgctctcattgcagccgtggtgccgaaaatcgttgcagctgagggcctcagtgttaaccctagaaagacccgaatcatgcgagctggtgccaggcaggaattggcgggtttggttgtcaacgcccgggcccagatcccaaggagcgagtacgacgcgctgagggcactgctccataatgcagcgcgcagcgggggggaaattcagaatcgcgacgggcacgacgactttcgcgcacacgtctatggcagaatagcatgggtggcccagggcaacgatgctagacgtgagcggctgctcgctatggcggcaagggtcaggtggtga

SEQ ID NO: 12814 - RNA, 1278 nt, synthetic construct
  source 1..1278: mol_type = other RNA
atgtcggccgtcgagattagccgcaggttaccccgggcatggcgctatgcaatcgccgaccgtgtagaaatgttcactgaggagatgtggaccgcagatagagtggctgtagcaattagaggcatcgttcctggcgaactggtgcccacagtggcgagagaactattggctgcccatcccgcaccccctcttgctattatagatggaacacctgttgcgccagacagggacgcaattgtagtggccctcgatacagtgagaaccgtcgagcgcttgggggctagagcacctctcgaagtacccggagtcgctctcccggatgttgccgctgtcgcaaggatgctggacgtcaccgcgcctgagttggagtggttcgtggatcacgggcagtggctgaggcacgctactggaccactaaggcattatcgggtgcgacggatggctaagccatctgggggcgtccgtgtgatcgaggccccaaaaccaagacttgccgaagcccagcggcggatccttcaccgagtgcttgatcctgccggagcccatccagccgcatgtggatttagacccggtggttccgtccttgcctatgccgccccacatgttggggccagatccgttgtgcggctggacctgcgcgattgcttctcaacggtgaccgtggatcgcgtgcggggagcttttcgtcgtctcggttaccccgtcccagtcgctgggctcttagccgacttgtgcaccacctctactgcggtagacgaactgcgcggcttggacccttggcaggctgcagtcctgcggtcaaggcatttaccgcagggcgcccccacgtctcctgctttagtgaacctggtgctgaggggactagacgctcggctgactggcctcgctagagctcaaggcgcgaggtactcccgatacggcgatgacctggcctttagtaatgcccgcgatgcagccctcatcgcgggtgttgtgccgaagatcgttgccgccgagaagctgagtgtaaacccccgcaaaacacgaattatgcgaagcggtgatcggcaggaactcgcaggggtggtggtcaatgctcgtgcgcaggttcctcgagcagagtacgacgcactgagggccctgctgcacaatgctgcacggtttggacccgagagccagaacagagacggccacgaagatttcagggcccacgtgtatggcaggatagcctgggtggcccaagggaacgacgcaagacgggagcgcctgagagctatggccgagagggtgcgctggtga

SEQ ID NO: 12815 - RNA, 1278 nt, synthetic construct
  source 1..1278: mol_type = other RNA
atgactggcgtcgaattgagccgtagactgcctagggcctggcgatacgccatcgcggatagagtggagttcttcaccgctgcccagtggactgaggaatttgtcgctgcggctgtggccgacctagtgccagtggaccacgccgttcctgttgcgcgcacgttattggccgaacatcccgccccccccctctctattgtcgacgacctgcctgtcgctgctgaccgcaatgccttattgtctgcattggaggctcaccggactgtgcagctgctggaatccaaggggtccggcacacctcctggcatagccctaccggatgtgggatcgatcgctcgcatgctcgatctgaccatcccagagctggaatggttcgccgatcacggacagtggctcaggcatgctgggaggcccttgaggcattaccgggtccggaggattgcaaaaccagccggcggagttcgggtcatcgaggctccaaagcccagacttgccgaagcacagaggcgtatcctgaggagagtgcttgacgatgccggtgcacaccctgctgctaggggctttcggccaggaggcagtgtcctcgcctatgcggcccctcatgtgggtacgcgttccgttgtgagacttgatctgcgcgattgttttcccaccgtcacagctccgagagtacgcgccgcctttcggaggctagggcatcctgcaccagtggccgctgtgctggcagacctgtgcaccgtagctacacccggtgacgagcttagagggctggatccctggcaggctgcagccttacgcggtcgacatcttccacagggagctcccactagccctgcactggtgaacctggtactgcggcgccttgacgcccgattaaccggactcgcgcggtcacaaggcgccagatacacacggtacggcgatgacctggcctttagtggagccctggactccagtctcattgcgggggtggttccaaagatcgtggctagcgaggggttgtctgttaaccccaggaaaacccggataatgcgtgcaggcgctcgacaagagctggcaggcgtcgtggtgaatgcaagagcacagacaccgaggggggagtatgacgatctcagagccctgctccacaacgcagcccgattcggagccgcaagccaaaaccgcgacggccacccagatttccgggctcacgtatatggtagaattgcatgggttgcccaggggaatgagcaccgcagggaacgcctcctgtcaatggcggcacgagtgcactggtga

SEQ ID NO: 12816 - RNA, 1281 nt, synthetic construct
  source 1..1281: mol_type = other RNA
atgacaagcgtggaggtcactcggagactccagagagcccaacgctacacaatcgccgcacgggtggaatggtttactcctactcagtggaccgtggatcgagtcgcaggggccatctcaggagtagtccccgcagatgaagccagtgcggttgcagctgccctcatcgccgcacatccaagagccccactggacccacaggatgacggaccaccagtcctagccaaccccgctgccctggttgcagcattggacgggtataggacggtggagctgctcgaacctgacggccctctcgacgtaccagggcttgccctacccgatctgagcgctgtggcacgcatgctagatctgaccgctcccgagttggagtggtgcgctgacccaggcggatggctgagacactcatcgaaacccttgcgccactatcgcgtgaggcgtattcctaaacctgcgggcggcgtgagggttattgaggcaccaaagccccggttagcagaggcccagcaccgtgtgctgagaagggttctggacccagccggtgctcatcctgctgccagaggattcagacccggcgggagcgtgctggcatatgctagcccccatgtgggggccagtagcgtcgtgaggctggatctgcgcgactgcttttccaccgttaccgtctcccgggtacgggacgtgttccggaggatgggttaccctgcccctgtcgcaagagtgctcgctgatctttgtacagtcgccacgcctggtgacgaactgagggggcttgatccgtggcaagcggcggtgttacgatctaggcatcttcctcagggagcccccagctccccagcacttgttaacctggtcctgcggaggcttgattccaggctcactggcctggctcaatctcagggtgcccggtacacacgatacggcgacgacttagccttctctaaaccgagagatccctccctcattgccggagtggtgccgaagatcgtggctgccgagggtttcagtgtgaactctacaaagaccagagtaatgcgcgccggaagtcggcaagaattggcgggcgtcgttgtaaacgctcgcgcacaggtgccccgtgccgaatatgatgctctccgagcgctgctccacaatgccgctcgatttggagctgagtcacagaatcgggacggccactctgattttagggctcacgtgtacgggcgtatagcttgggtcgggcagggcaatgaatcacggagagagcgcttgctgaccatggccgctcgcgttcgatggtga

SEQ ID NO: 12817 - RNA, 1278 nt, synthetic construct
  source 1..1278: mol_type = other RNA
atgaccgcggtggaagtaagccgcagattaccccgcggtacgctgtatgcgatcgccgctcggctcgagtggttcaccgctagccagtggactggagagtttgtcgctgccgctatcggcgatctggtatccactgatctggcgggacctgtcgctcgcttcctcatcgccgcacatcccgacgcaccgttacggattgtggacgaccgccctgtacgggcagatttgggcgctctgagagccgctctggatggcttccgcactgttgacctgctggacgcacccggcgtgttagatgtcccaggcagggcacttcccgatagtgccgcggttgcccgtatgcttgacctgacagcgccggagttggagtggtttgccgaccatggccagtggctgcggcattctgcagctccactgaggcactacagggtgaggcgaatggataaaccagccgggggcgtccgagttatagaagcccccaaaccacgtcttgccgaggcccaacggaggatcctgcgtcacgtgctcgaccctgctggtgctcaccctgctgccagagggttcagaccaggagggtctgtactagcttatgcaacccctcatgttggggcccgctcagtcgtccggttggatctcagggattgtttttccaccgtgacagcccctagagtgcgggcagttttcagaaggctagggtacccagcaccggtcgccagagtgcttgccgacgtgtgcacaacggccacaccaggtgacgaactccgggatctcgatccttggcaggcagcagtgctgcgcgctaggcacttgcctcaaggagcccccacctcacccgcactcatgaacctggtgctgcatcgcctagacgcccggttgacaggactggctagggcgcacggtgccatgtacactcggtatggcgacgatttggcctttagcggggctcctgaccccatgctcattgcaggcatagtgcccaagatcgtggtggctgaggggttttccgtgaacccagcaaagaccagagtgatgcgcgccggcactcgtcaagaacttgccggcgttgtggtgaataccagggcccaggtcagtagggacgagtatgatgacctccgagctcttctgcacaatgcggcgcgattcggtgccgagtcgcagaaccgggaaggaagagcagactttagagcatacgtatacgggagaattgcttgggtcggacagggatctgagcgacgcagagaaaggctgctggccatggccgccgctgttcgatggtga

SEQ ID NO: 12818 - RNA, 1248 nt, synthetic construct
  source 1..1248: mol_type = other RNA
atgcctgcggtggaaattgcgcgcgcattggccagagcccaactgaggcaggcaatccgcatagctgtgcagttgcatcccgaagagtggaatcgggtcgagctagctgctgacctgggcgctgtgttacccgccgagctagccgaagaggttgctcgcttcgtcatagcgtcggcacctaccaaacctcgaggtgccatcctggccaatctgctgcaagacttcagggtcgaaagtttgctggagccggaaccagcacgggagacacctgaccggccacttgtcgatctcgccgctgtcgcagcaatgctcgacgtaactgtcccagagctggagtggttcgctgacacaggctcttggctgaggcactctagtcgtccactcagacactatcgggtgcgaagaatgtctaagcctgctgggggcgtaagggtaatcgaggcaccaaaaccgcgactgtgcgaggcccagcgcagaattttgagacacgtactggacgctgcagctcctcatccagccgctaggggctttctccccggtggtagcgttctgcggtatgccgaaccccatgttggagcggggagcgtgattcggctggacctcaaagactgttttaccaccgttggcgcatcacgggtcagggcagtgttccacagattagggtatcccaacgctgtggcgcgagtcctcgcagcactctgcaccactgaaacgcccgccgatgaacttcacggcctggatgcctggcaggccgctacactcaggtttcgccacctgcctcagggagctcctacgtccccgacattgatgaacctctcactgaggcagctggattcccggcttaccggacttgcccgcgctcaaggagcaaggtacactcggtacggggacgatctggcatttagcggcgccccagatgcttcccttattgccggcgtggttcccaagatcgtggcggcagaaggcttcgccgtgaacccacgcaagactcggatcatgcgtcgcgggtcccgacaagagttagctggattagtggtgaacgacagagcccaggtgcctcggcacgagtacgatgccctaagggcgctgctgcataacgccgccagatttgggcccgccagccagaatcgtgatggacatgacgatttcagagggcacgtgtacggcaggatcgcctgggtgggacagggtaatagagaacgtagagagcgccttctcgccttggccgaacgagttccctgggagtga

SEQ ID NO: 12819 - RNA, 1245 nt, synthetic construct
  source 1..1245: mol_type = other RNA
atgccttcggtggacctgtcccgcccactgacaagggcgcagcaagctcagtctgccctgctggtaggacggattgacccggccgagtggaatcgcattgagctggccgctgaccttggcgctgcactacctgctgagttggcggaggaggtggccctatttgttacggaagccgcacctaccaaacctcacccggctgtcatcaggcgattactgcagacttatcgggtcgattcagcccttgaacctgaagcagggggcgctgtgcccggaagagtactggctgatctcgatgggctcgcagcaatgctcgacctcacagttccggagctcgattggtttgccgacacgggccgctggcttagacattctgccgccccactgaggcactaccgcgtcagaagaatgcctaagaccgctggcggggtgagagttatcgaagccccaaaaccaagattgagggaggctcagcgccggatactgcgacatgtgctggaccccgcagcaccacatcctgcagctcgaggtttcgtgcggggagggagcgtgctacactacgccgaagcccatgtcggcagtgcggctgttgtacgtctggatctgaaggattgcttcacaaccgtgggagagaatagggttagggccgtcttccgccaactgggataccccgcgccagtagcccggattttggcagccctctgtactaccgctactgccggtgacgagttgaggggattgggggcctggcaagctgccacactgagagcccgtcacctgcctcaaggtgcacccaccagcccagcgctgatgaacttagcgttgcgacgtcttgattccagggttgccgggttagctcgggcacagggtgctcactatacccgctacggcgacgacctcgcactgtctggagccagggacccctccgtcatagcagccgtggtccccaaaatcgtgagaagcgaggggttttcagtgaaccctaggaagactcgtatcatgcggagcggcacaagacaggaactcgctggggtcgtggtgaacgccagagctcagccacccagacgcgcatatgatgatctccgcgcgcttcttcacaatgcagcacgatttggccccgatagtcagaaccatgatggccacgacgacttccgggcccacgtgtatggtcggattgcctgggtggctcagggcaatcccactaggcgggaacggttactggccatggccgctcgagtgccctggtga

SEQ ID NO: 12820 - RNA, 1245 nt, synthetic construct
  source 1..1245: mol_type = other RNA
atgaccgaacgcccagcgcttccccccgagtttgctcgaagactggccgcagctgccattgacggcacttggacacgggccggcctagtgcttcgctttgaggagtcaggggttccagacgctgctaggatcgccgcgcgtctgcatgatctgatgcccacacctcctatcgatggcatcgattctgtcttccgtctcctctcggacttaccactgatagagcgcgccgaacccatagtggacgaggtttctggaaacgattggcgcttcgacgtgccacagtggtctagaacagcagcagtggccgaagccgtagggctgaccagcgctgaactagactggttcgcagacccgggtggttggctgagaacaaaggcgcctccactccagcactatcgctacagaattaggcccgataatcgcctgttggaggcccccaaagagcgtctcagggaggtgcagcggaggatcctgaggactgtgctggatagggtccctccacacgctgcagcgcacggattcgtgcggggaagaagcgtgcacaccttcgctggtccccatgccggccatgaagttgtcctccgaattgacttgagagcgttctttcctagtgtgtctaggacgagagtccgggcagtttttgacgcgcttggctatcctacccgagtgagtcgggtgctggccggtttgtgtaccacttccacacccccgggagtcctggcagagcttccttttgatgcagcctcccggctgagaggggctcatcttccgcaaggagccccaactagccctgccttagccaatctcgtggcacacagactcgatcgccgactagccggactggctagagctcaccgggtagcttatacaaggtacgctgacgacctggctttctcaggctcagatctggccgtggataggttaattcatgcagtcggcaggatcgtgactgacgaagggttcgccgtccatcccgggaagaccagagtgatgcgagcacatcgctgccagcacttggccggcctggtagtgaatacgcgcccacaggcttcccgggctgagtatgacgatgtcaaggccttgctctttaactgcgtacggcacgggcccgacagtcaaaaccgggatgggcgacctcactttagggaatacgtctacggccgcatcgcctgggttggagaaagcaacgagtccaggaaacggagcctgcacgcccttgccgcacgtgttgactggaccggctga

SEQ ID NO: 12821 - RNA, 1218 nt, synthetic construct
  source 1..1218: mol_type = other RNA
atggcaagcacgaacgctacacaagcccgagattccggtgagactcctgccagggccgggttaattttaagatttgaagagactggtgcgcccgatgctggaaggttggccactcggctgtatgatttgatgcctacccccccaatcgacggcgtggactctgtgtaccggttgctgagcgagctgccacaaatcgagcagcccgaacctgtagtcgaagtgtccggcaatggttggaagtttgatgtgccccggtggagtcgcacatcatctgttgcggaagctgtgggcctcactcctgccgagctggactggtttgcagatcccggaggatggctgaggatgaaagcgccacccctccagcactaccgctatagaatacgatcagacaatcgcctgctcgaggccccaaaggagaggctcagggaagtgcagcggaggattctcagatccgtcctggatggagtacctccgcatgcggccgcacatggattcgttcgcggacgcagcgtccatacattcgccgcgcctcatgcagggcacgactgtgtgctgcggatcgacctgcgggcattcttcccgtctatttcccagacccgtgtgcgtgcaatcttcgatgcccttggctaccctgcccccgttgctcgagttttggccgggctttgcaccacctccacaccacccggtgtactggctcagataccttttgacgcagccagtagacttcgaggtgcccatctaccccagggggctccaacctcacctgctctggctaatctagttgcccaccgccttgataggcggctgacaggccttgcaagggctcaccactctgggtatacgcgttacgctgacgacctggcattcagcggcagcgatctggctgtggaccgtctcattcaagccgtcggaaggatcgtggcagacgaggggttcagcgtgcacccaggaaagaccagagtcatgcgcgagcatagaagacagcacctggccggcctagtcgtgaacactagaccacagaccgcccgggccgattttgatgacttgaaagctctcctgtttaactgcgtcagatatgggccggagtcacagaaccgcgatggccgaccccacttccgggaatacgtgtacggcagaatcgcctgggtagccgaaagtaacgaaagtcgcaaacggtcgttacacgcactcgcagacagggtgaattgggctggctga

SEQ ID NO: 12822 - RNA, 1251 nt, synthetic construct
  source 1..1251: mol_type = other RNA
atgaccgccggaagagcactgcagcctgagattgcacgcaggctggctgttgaagccactgtcggcgcatggactcgtgccggtctgatcctcagattcgaagaagccggcgagcctgatgccggaaggatagccacccggttgtatgatctcatgccaacaccccctattgatggcgtagatggtgtgtatcggctgctttctgagttaccccagatagagcagccagagacggtggtggaaagcagtgggtcagactggaagtttgacgtcccccggtggagtcatactgccgctgtcgcggaagcagtgggtctgacacctgccgagttggactggttcgccgatccgggaggctggcttcgcaccaaagccactcccctccagcactacaggtacaggatcagaagcgataatcggctgttggaagcccctaaggagcggctccgcgaggtacaacgccgcatcctgcgctctgtgcttgatagggtaccccctcatgctgccgctcatggtttcgtgagaggtcgtagcgtgcatacctttgcggctccccataccgggcacgatgtcgttctccgaattgatctgagagccttctttccatcagtgagccagacccgcgtgagggccgtttttgacgccctggggtacccaacaagagtgtcccgagtactggccggcctttgtaccacatccagcccatccggcgtgttggcacaactgcccttcgacgctgcctcccgactaaggggcgcacacttaccacaaggggctcccacatctccggcccttgcgaatctggttgcgtatcgactcgacagaaggctaactggactggcccggacccacagagctggctacacacggtatgcagacgacctggctttcagtggaacggaacttgctgtggatcggctcattcacgctgtgggcagaatcgtcgcacatgagggcttttcagttcacacagggaaaactcgtatcatgagggcacacagacgacagcatttagcagggctggtcgtgaacacgaggccacaagcggcccgtaccgaatacgatgacctgagggctttgctctttaactgcgcacgctacggacctgactctcagaatcgggacgggcggccgcacttcagagagtatgtctacggacgcatcgcttgggtgggagagtgcaacgcctcccggaagcaatcgctgcacgccctagcggcaagggttgactgggctgaccagcgacgctga

SEQ ID NO: 12823 - RNA, 1242 nt, synthetic construct
  source 1..1242: mol_type = other RNA
atgactggcagaagagccctgtcctcggctgtagctcgccgtttagccgccgtggccacttctgggagttggacgagggcggccattgcacagaggtttgaggagattggcaccccagacgccgatcgaatcgctacaaggctgtttgatctgctacccacccccccagtcgaaggtgtggatagtgtgtaccgcttgctgtccgagctccctcacattgatgaaccggcccccgtggttgagcaaccagaccacgagtggagattcgacgttcctaagtggacgcataccgtcgctgtcgcacaagcggtggggctcacacctgccgagcttgactggttcgccgacccaggcgagtggctacggaataaggccccgaccctgcagcactaccgttataggatccgaagcgatcaccgcctcttggaggctcccaaggagcgtctgcgcgaagttcagcgcagaatcctccggggattgttagatcgggtgccacctcacgctgctgcccatggattcgtgcgcggacggagcgtccacactttcgcagcccctcatgctggtagggacgtggtcgtcaggattgacctgcgggccttctttcccagtatatcccaggccagagtaagagcggtgtttgactcactggggtaccctccacgggttagcagggtgatgacgggactgtgcacaacttccactccccctgacgtactggcaaggcttcccttcgacaccgcatcacggcttagaggcagccatctgcctcaaggcgccccaacctctccagccctggctaatttggttgcataccgattagaccggagactgacaggattggctaggagctctcgggctgaatacacacgctatgcagatgatctggcattctctggcgtggatcttgctgcagaccgcctcataagtgctgtggggcgcatcgccgcagacgaaggattttcagtacacccccgtaaaaccaggataatgagagcccataggcgtcagcatctggcggggcttgtgatcaactcccacgcgcaggctgcccgaaccgaatatgaccagctccgagcactcctatttaatagcctccgcactggcccggatctgcagaacagggatggtagaccctacttccgagaacacgtctatggtagaatcgcctggattggggagtcaaaccctaaccggaaaagagcactgcttgccctcgcggatcggatcgaatggacaggctga

SEQ ID NO: 12824 - RNA, 1230 nt, synthetic construct
  source 1..1230: mol_type = other RNA
atgacagaccaacgagcactcccgcccgttatggcccgtcacttagctgaggttgcagacgccgggccctggactaaatacgccctgacgcagcgattcgaggaagctggggccagggatgctgtgtccattgcccatagattgttcgacctcatgccgtctccgcccatagagggggcggaatcagtctatcggctcctggtagagctccctcgtatagaccgccccgcaccaattgcccctagggtgctgtggaagttcggcgtgcctcaatggagtcagaccgctgctgtagccgaagcagtgggactgacacccacggagctggactggttcgccgaccgtggaggctggctacgcactaaggccccaccactccagcactatcggtatagaacccggggggatcgactgctggaagcaccaaaggagcggttaagagaagtgcagcggaagatcctgagagccgtcctggattccgtgcccactcatccagctgcgcacggattcgtggtgggtagaagcgtgcacacttttgctgccccacacgcgggacgagaagctgtggtgaggattgatctgcgcgcttttttttcaaccatcacacaggctcgcgttcgcgccgtttttggcgctttgggttatcctgaccatgtcgctcgcgtcttggcaggcctgtgtacaacagctacccctgccaaagtgctggcgcctcttcccttcgaatctgccacacgattacgtaccccacacttgccccagggtgcacccactagccctgcattggccaacctcgtttgccataggctggatagaaggcttaccggattggccaggagtcatagagccgcctacagcagatacgcagatgaccttgctttcagtggctctgagctggccgtagaccggcttgtccacgctgttggcctgatcgtcgcagacgagggcttcactgtgcatcctcggaaaaccagaattatgagggcccaccggcagcaacaccttgcaggactcgtagtcaatgaccggcctcaggccgcacggtccgattacgatgatctacgagccctgctatttaactgcgtgagatacggtagccattcgcagaatcgcgacgatcttccacattttagggaacacgtctacggcaggatcgggtggatcggggagtccaacgagacgaggaagcgcaccctcctctcactggcggatcgcgtggactgggcgtga

SEQ ID NO: 12825 - RNA, 1239 nt, synthetic construct
  source 1..1239: mol_type = other RNA
atgccgtctagaccccccagggcctttacccgattggaggccgatttattagccgccgcagctgttgctggaccgtggacaaggagcggactcgaagagaggctcggtgaagctggtgctgccgaccctgtgctgctagccaggcgagtcttggaccttatgcccggggagcctatcgaaggcgagtcaactgtgcggaacgtgctcgctgagctccctgagctgccagcaagacccgtcgaggtgacagtcgaaagctctctgtggaagtttgatgtaccacggtggcagacaccccacgcactttgccaggcgtttgacctgaccatgcctgagctggaatggtttgccgatgttcagggcagactgagaggtaagccggggcggctccaccactataggtaccacaacggggctcgcttgattgaggcacctaaggtgcgccttagagaggtgcagcgcaggatccttaggaaagttctggatcggctgcctgtacacgcagccgctcatggattccgacgcggtcgtagcgtacatactttcggctcaggccacgccggcgcagatttagtggtccggattgatctgcgctggtttttctctaccattacagcagccagggtaagagccgtgttcctcgctgtcggctatcctccatccgtggccagcttgctggctggactgtgcaccactgcaacccccgtccccatcctacgcggtatgccattcgagcaggccactctgttgcggaccagacatcttccccaaggggctcctacgtctccagccctcgccaatatggtggcgcggaatcttgacagacgactcgctgggctggcgcagagtcaaggcctctattatacacggtacgcggacgacttggcattctccggagatgtggtgaatgtggaacagctactgtggactgtcggagccatagtcagagatgagggctttttcgtgcatccatccaaaaccaaggttatgagagcccatcatcgccagcggctggctggactggttgtgaacgcccacccacaggcatcccgtgacgactacgaagctctgaaagcgctgctgtacaattgtgtcaggtacgggcccgcatcacaaaaccgggacgggaggacgcacttccgagaacatgtgtcgggccacatcgcctgggtgggcgaaagtaacagccgccgacgtgaaaagttacgtaggctcgagcaacgcatagtttggagttga

SEQ ID NO: 12826 - RNA, 954 nt, synthetic construct
  source 1..954: mol_type = other RNA
atgagcagagcactggacgcaggctgggctgctcgtcttgcagctgctgccatgtccgggccatggacaaagaatgccctggcccagcgttttagcgagattggctttgaccgggccgaggaaatcgccaggcggctacacgatttagcgcccactccgccggtagacggggttgatgccgtggatcgcttattggcggagctgcctcgcctagagggccctataccagtgcgcgcgcaacgacctcaatggcttttcggagtgccccggtggaacacgttacctgccttggcctcaagtctgaatctgacaccaggtgaactcgattggttcgccgacccacgcggatggcttcggacaaagcctgacaggctccagcactatcgggtcaaaaccctccccagcgggagggtcgttgagatccctaaggaacggctgagggaagtgcagagaaaagttagggtgagcgtgctggatgccgttcctccccatcctgctgcccacggatttagagccggacgtggcgtcgtcggatttgccgcagcacattctaattcggaggtggtgattcgcgtggacctgcgcgccttcttcactacaattaccgccaccagggtgagagccgttttcgcagctcttgggtacccaccctgggtcgcgggtagattggcaggcctgtgcactaccagtaccccaccagcagctctggctggtgtaccctttgaaatcgccagtctgatgagagctccccacttgccgcagggtgcaccaacatctcctgctctctccaacctcgttgccggcaacctcgatcgaaggctatccggcgtggctcggcgacatgctctgacttataccagatacgcagacgatctcgcgttctctgggtcagacgtagacgtgtcaagactgctggccatggtgcccccctgtgtccgaacgagggcatcctga

SEQ ID NO: 12827 - RNA, 1308 nt, synthetic construct
  source 1..1308: mol_type = other RNA
atgcagcggtctaccgtggacgagggcttttggagcctgcatcataggagaatttttatgagccggatgatctccgtggaattggcagcagaacttgcaagagcgttcgagttactggatgatgagtgggcccaagctcgcctagctgaggcgttcggcgcagtcatcgaacccggattagcggaggagatagcccgtcgggtcgtggacctgatgccagtagtgccagtggaccccgtggccaccttatgccgactgctggccgagctgccaaaacttccaacaattgtggttcccttggacccaccagaggttcggatgagatttggggcggtcgagattcctgacctggcaacgctcgcaatgctacttaatgttactccttctgaattggagtggttcgcggaccggggaggatggctaaggcgatcaacacagcccctctctcactaccgatataggcgcctccctaaggcgaacgggactagattggtcgaggcccccaaggtccgattgagagaaatccagagacgcatcctgcacaaggtccttacagggatccctgctgacccggcttgccatggctttgaaaagggaagatccgccgccacatttggcgcaccgcatgctggcgcacctgtggttgttaggatggatctcagggacttcttccctactatcggtctggcacgggtgcgcaccgtattcaccgcctgcggttacagtccagctgtcgcccgagtgctggctgaactctgtaccaccgccagtcctgtcgccgaactgagagggcttgatcacgcccagaggactctgctcgctgtaccccatcttcctcaaggtgcccccacctcacccagacttgctaatttggtggccagggggctggatcgtaggctgactggttacgcaaaccggcatggcctcacctatacacgctacgccgacgatctcgctctctcgggaaacgccaatacagctcacctggtgtggacagtgacgcgaatagccgaagatgagggctttactgtgcacccggccaaaacacgcatccggagggctcatcagagacagattttagccggactggtagtgaatgctcatcccactgctccaagggatcggtatgatgccgttcgggccctgctgcacaactgtctccgcactggagctaccgcccagaacctgcacggccacaatgacttccgtgcacacgtctatgggttgattagctggataggcgagacgtcccctcaccgtcgcgacaaactgctgaccatggcagatcgcgtggactggaccaggtga

SEQ ID NO: 12828 - RNA, 1257 nt, synthetic construct
  source 1..1257: mol_type = other RNA
atgtcccgggccattggcctggagttggcggtgagactcgctcggtcattcgaacttctcgacgacgactggggcctgtcaccactggctgaagccttcgcggaggtaatagaaccgggaagcgctcaggagatagcaggtcgggtcatcgatttgattcccatcgagcccgtggatccggtgaacacactgaggagggtgctggttgacctccccaagctgcccacaactgtggttgcgctcgatcctgtggtcgtaccaatgcggttcggtgctgtggagatacctgacctcgccgctctcgcgttgctgctcaatgtcactcccgctgaactggactggttcgccgatagaggagggtggctacggagagcctctcagcccctctcccattatagataccgaaggctgccaaaggcgaccggagtgcgtctggttgaagcaccaaaagtccggctacgtgagattcagaggagaatcctccaccgtgtgctggcaggaattccagccgaccccgcttgccatggctttgagaaagggtgcaacgctgctacattcgcaacccctcacgcaggagctgcagtcgtgatccggcaggatctgagggacttttttccaacagtcgcagttgcccgagtacgagccgtgtttgccgcatgtggctacagcactgtagtcgccagagtattggcagagttgtgcaccaccacgagccccgtcgcggaattacggggactggactactctcagcgcacattactcggtgcaagacatcttccgcagggcgccccaacttcgcctagactagccaatctggtggctcgcggcttggatagacgactgaccggatatgccaatcgacacgggcttacttatactcgctatgccgacgatctggccctgagtggggacgcagatcttgacaccgcccgcctgatttggaccgtgaccaggatcgctagggatgaaggcttcaccgtgcatactgggaaaacactgatccgccgcgcccaccaaaggcaggttcttgctgggttagtggttaacgatcgccctgccgcccctagggacaggtacgatgcagtgcgtgctctgcttcataactgtcttagaacaggcgttagtgcccaaaatcgcgacgagcacaacgattttcgggcccacgtgtacggcttaatctcctggattggggagacgtctcctcaccgccgagacaagttgctggccatggctgaacgggtcgattggacgggttga

SEQ ID NO: 12829 - RNA, 1293 nt, synthetic construct
  source 1..1293: mol_type = other RNA
atgtcaggggcagtgcctcccgatctagccagggaactggcttactcctttgagttcttgggtgcggaatggtcccgaagcaatttagccgaggcatttgctgaaatagtagaacctggcagagcggaagagttagctcgtcgggtgaccgatttgatgccctcggagccactggacccagtgggaaccctccagcggttgctcgccgaacttcctaagcttgctactattgttgtgagccttccaccagccgccgacgaactggctgacgagttacctcgcactcaacctgcgcggacaagattcggagctgtcgacatcccggatttggccgccctttgtgcgctgctgaacgttacaccggcagagctggagtggttcgctgaccacggaaactggctacgccgagccgcacagcctctctctcactatcgatacaggcagctgcccaagacatctggggtacgcctcgtggaggcaccaaaagtccgcctgcgtgagattcagcggagaatcctgcatcgtgttctgagcgagatcccagcccatccagcctgccacgggttcgagaaaggccgctctgcaacgacctttgctgccccccatgccggtgctgaagtggtggtcagagtggacctgagggattttttcacgagcatcggtgtggcccgggtaagagccgtcttcgccgcttgcggatacagtcccacggtggcacaagtcctggcagatctgtgcaccactgccaccccggtcgcagaactacgcacccttgattttaatcagagaaatctcctcagggcgagacacctgccccaaggagctccaacatcccctaggttagccaatctgatcgctcatgggcttgaccgacgactggccggatacgccacccagcacggtttggtgtacaccaggtatgcagacgacctcgcaatttccggcaagtcagacctggatcccggccgcacaatttggctcgcaactaaaattgcgaaatcagaggggttcagcatcagacctggcaagactcgtatcaggcgcccccatcagaggcaaatactggcaggcctggtgattaatacacacccagccgtgccccgggacagatatgacgccctgagagctctcctgcataactgtctccggacaggccctgctacccagaaccgggatggccacaacgattttcgcgcccacgtctatggcttgatatcttgggttggggagactagtcccgctaggcgggataggcttttggccatggctgatcaggttgactggagtaagtga

SEQ ID NO: 12830 - RNA, 1257 nt, synthetic construct
  source 1..1257: mol_type = other RNA
atgaccggagcagtgccagctgagcttgctcgcgagttggcatacgcttttgagttcctcgacgcagagtggacacggtccaacctggccgaagcctttgcagaaatcgtggaaccggagagggccgaggatcttgccagacgagtgactgatctgatgcccagtgagccccttgacccagtcgggacattgtgcaggctgctggcggagcttcctaagatggccaccgtcgtagtccccctggaacctttatctgcccctgttctgttcggcgcagctgagctccctgatagagcaggactttgcgccctcctgaatgtgactccagatgaactggattggtttgccgaccatggcggttggttaaggcgcgcaagcaagcccctcacccactaccgctacaggcggctgagaaaaagcgacggcgtccgactggttgaagcccccaaggtaagattacgcgaaatacagcgacggatcctgagacacgttttgtccggcatcccggctcaccctgcttgccatggcttcgagaaagggcggtcggcctctacatttgcggagccacacgcgggtgccgaagttgtggtgcatctcgacctgcgcgactttttcaccagcatcacagtggcccgtgtacgcgcaattttcgccgcgtgtgggtatgccccagctatcgcccagattcttgccgatctgtgtaccaccgcaactcccgtggctgaattgcggggcctggactatgatcaacggaacttgctgagagctaggcacctgccccagggtgctccaacatccccacggctggctaacttaatagctcatggcttggacagaagactcactgggtacgcgatccggaggggcctggagtatacccgttacgcggatgatctagccatatcagggaaatctgatctcgacgcagccgagattctgtggctggtgacgaagattgcaaagtcagagggatttgccattcatccgggtaaaacgcgcattcgcaggccccatcagcggcaaatcctcgctggcctcgttgtgaactcccaccccgcagtccctagagacaggtacgatgccctgcgtgccctattgcacaattgtcttaggacaggacctaccgcccagaatcgtgatgggcaccatgacttcagagctcacgtgtatggactcattgcatggatcggagaaactagccctagtcgacgggaccgcctaagggccatggctgaccgagtcgactggagtaagtga

SEQ ID NO: 12831 - RNA, 1251 nt, synthetic construct
  source 1..1251: mol_type = other RNA
atgtcccacgccgtctcgggtggattagccgcagaattggccgcccactacgccgacgccgaaataggctgggagagggccgcgttggcagaagtcttcgcagaagtgattgagcccggcagagccgaggagttagcgggaagggtggtaggcctgatgcccagcgagccactagatggcgccgcaacattacgccggttgctggccgaactgcccgtgcttaccgtttctaccgttgccctggagcctgctcggcgacgaatgcgatttggagccacacctattgatgacctcgccgccctcgccgccctacttaatctgacacagcccgagcttgaatggtttgccgatagagggggctggttgagacgctctgccagacccctgacccactatcggtatcgccgccttccaaagagcaccggcgtgagactggtcgaggcaccaaaagtccgtctccgcgagattcagaggaggatcctgaggcatgctctggcgggtgtgcctgcgcatcctgcttgccatggattcgagaaaggccgaaacactgctacctttggagctcctcacgctggggcggcagtggtagtgcgtatcgacctcagggatttcttctccagtattgaagccgcacgggttagggccgtttttgccgcctgcggttacgctccagcagtggctcgcgtgttgggcgaactgtgtaccacagcagcgcccgttgctgaactgagaggtctggatcacacgcagcggactctgcttggagctcgacaccttccacaaggggcccctacttcaccccggctagccaatctcgtcgcaagagctctggacaggaggcttgatgggtacgcgcgcgctcatggactggcatacactcgctatgccgacgaccttgctttcagtgggccagctgacgcggatgctctcgcttgggccgtgacagcgatcgcacgagacgaggggttcgcagtgcatcccgggaagatcagggtacggagagcccaccagcggcaagtgctggcaggtctggtggtcaacgctggccctgctgtaccgcgggatcggtacgatgccgttcgggcactgctccataactgtctgagaaacggagctgctgcccagaatcgtgacgggaggccggactttcgcgctcacgtctatggcttgatcgcatggataggcgagacgaatccacacagaagagcaaagctcctcgcaatggccgcccgtgtggattgggacgcctga

SEQ ID NO: 12832 - RNA, 1323 nt, synthetic construct
  source 1..1323: mol_type = other RNA
atgaacaggcccgcgttgccggcactagttgctgccaggctggctgacgagttcggaagatgcgggggccgctggcatagagacgatctggctgaagcctttgccgctgttcttgacagggaaagggctgaagtattcgccgtgagagtaataggcctgatgcccacagagccaatcgactccgtggtcaccttacgggctctgctcaccgaactgcccgcacttccaattgtgatcgcccagctcgaacccgttccggacgagctgcggtttggagcccctgaactccctgacacttctgccgtggcacggatgctgaacttaacgcccgatgagctagattggtttgccgaccacggaggatggttgcggcgtacacgcgagccccttgctcactaccggtatcgccggatccccaaaaaagacggagtcagactggtcgaggctccaaagcctcgactgcgcgagatgcagcgcaccatcgctcgtcgcatactcgctggtattccagcccatcctgcgtgtcacggcttcgaaaagggggcgagtgccgcaacttttgctgcaccgcatgccagagctgccgtggtggtaagactggacctgcggcacttcttccctagcattggtgtggccagagtgcgtggcgtctttagagcctgcgggtacagggagaatgtcgcaaccgtgctggccgacctgtgcactaccgcaaccgcaattagggctttgactggtttagaccacgagcaagctagtctactgcgcacgcctcatttggcccaaggggcaccaacatcacccaggcttgcgaatctgattgccaggaatctcgatcgacgcgtttccggatatgcccggagacacgggcttacctacactagatacgccgatgacctggcactcagcgatcctgccgacaccgatgttgacgctatgatctgggcgctgacacggatcatcgaggatgaggggtttgaagtgcatcgggataagacatcggttcgacgtccccaccagcgccaagtattggccggccttgtggtgaacgatcgacctgcggtcgctagggcccagtatgatgccgtgagggcactcctccacaactgtttacggacgggcgcagccgcccagaatcacaacgctcatccaaatttccgagcccacgtgtatggctccatagcatggattggcgcaacatcaccaacaaggagacagaaattgctcgacatggccaagcgagtggattggactcagagcgacgctgcaggctctggactggcagctgatgcggtcgaggatttccatgaaggtgggggctga

SEQ ID NO: 12833 - RNA, 1260 nt, synthetic construct
  source 1..1260: mol_type = other RNA
atgactagacgggcagtgcctccccaacttgccgacttgcttgctgacgagttcgacgccgcagatagaacttggcagcgctccgatctggcagaagtttttgggagctttgtaaacgctgtacgggccgaagaactggcccagcgagtcatcgcgctcgtcccaacagagcccgttgaccgccggaattcactgaggtctatcctagctgagctgccggttttgcaacgcgttgtcaatttagtggaacctgcccaacatgaattgcgtttcggtgtgcccgaactcaccgacctccgttctgtagccagcatgctgaacgtgacgcctgcagagttggactggttcgcggatagaggcggctggctccggaactccactgaaccactgacccattacaggtaccttcgccgccccaaagcgagcggagtcaggttaattgaggcccccaagccacggctcagggagatgcagcgaaccatagctagaaaagtgctggccagcgttccagctcaccctgcttgtcacggcttcgagaaagagtgctctgccgcctcatttgctgacccgcacaccggatccgatgtggtggtgcgcgtggatctgaggaattttttcagttctatcggggtcggcagagtgcgcgctgtgtatagagctattggttacgattacgcaatagctaatgtgttagcgcatatctgtactacagcaacagccgtttccgccctgcgcggaattgacaaccagcacgctagcctcctgcgaatgcctcatttggcacagggcgcccctacttccccaagactggcaaatctgattgcccggaatctggaccgtagggtggctggatacgccacaaagcacgacctgacgtatactcggtacgcagatgaccttgccttctcagggcccgctaccaccgatgttgacgcgttgctatgggccgtcagtcacatggtggatgacgaggggtttaccgtcaatcggcggaagacgagtgtgagacggcgacaccagcgacaactcctagccggcctcgtcgtgaactcgcagccacgtgcacccagagaggcctatgatgcacttcgcgctctgctgcataactgcgcgagaacaggggcccatgaacagaacacagacggccacaccgattttagagctcacatctatggtaggattgcatggatcggagagacagatccgcgacggaggcagaggctcctggatatggccgccagggtagactggaacaggtga

SEQ ID NO: 12834 - RNA, 1356 nt, synthetic construct
  source 1..1356: mol_type = other RNA
atgcgacggatctcatggcagcaacgccctaagcctcttgggacactgcgcgtgcgaccaggagataaggacaagtcacggtctagtgcaactgtggcacggcccctgatgcaggggagattttctctgcctcatgctcaggccattgctcgcgcttttggacggagggagcttagttggaggagagaaaatttggccgaggtattcgctggattcgtggaggccggactggccgaaagccttgctagccaggttattgataatgtgcccctcgaacccattgagccgtatcccacgctggtagcacagcttcggagcctgcgttgggagattgaccttaaccctccactcgcgaaacctctgagatttggcgtgcctgagctcccagatgtgagcgcccttgcccagtttctaaatctcacaccctcggagctggactggttcgctgattgcggaggctggttgcgtacagccagcggacccctgtcccactataggtatcggcagctccccaggaggtccggtagacgtttggtggaggcgccaaaacctcgattacgagaaatccaacgcaccattaacagacgtatcctggcttgtctccccgtccacagcgcttgccacggcttcgagtctggccgcaatccggcgactttttcagcgccacattcttctgccgggttgcttatcaggatggacttgaaaaactacttctccagtatcggggagccaagagtacgggcaattttcgaggccatgggttacagcgaggtcgtgagtaggtccctcgctggcctgtcgacaaacgcgtccagtatcgccgccctccgagggttggaccacgaacagagaaccttcctgagagttccccatctgcctcaaggcgctcccacctcacctaagctgggaaacttagcagcccgcggcctagatcgcagactctctgggtttgctctgcgcgtcggcatgacctacaccaggtacgcagacgacctcgcattttccggggctgacgggataaatgccggctccatcgtgtccgccgttgaacggatcatcgccgctgaaggcctattcgtgaacaggcagaaaacgttaataaggcgcagccatcagcgacaaatcctggccggattagtcgtcaacgatcacccgcaggtgccacgggactcttatgacaaggtcagagccatactgcacaacgcagcacgcaccggtgcagcagcccagaataggggtggtcacgccgacttcagagcccatgttctgggactgatatcatggattggcgaaacaaatccagatagacgggaacggctgctggatttggcagctgaggtggattggactacttga

SEQ ID NO: 12835 - RNA, 1251 nt, synthetic construct
  source 1..1251: mol_type = other RNA
atgacaccaagagcggtatctccagcagtggcccatgcactcgctgacgaatttgcgaggggcgggttccgctggaggcatagtgagctcgcagaggcctttgccgcaatcatcgacccggttgaggcagagtccctggcgttacgtgtggtaggcttgatccccagggagcctatagatccacaaaccacccttcaggcagttcttgcagacctacccgaactgcccgagacagtggtggcacccgaaggtgaacccggtgggttgcggttcggagttcctgaaatattggattgcggcgcactggccactatgttaaatctgaccacagccgagctggagtggtttgccgatcacgggggatggctccgtactgcaagggaacccttgagtcactatcgttaccgaagactgcctaaatcaaccggcgttcgcctggtggaagccccaaaacctcggctccgggagatccagaggacaattaaccgccgcattctctcaggcataccggcccatccgagctgtcacggatttgagaagggccggagcgccgaaactttcgcaatgccccacgcccaagccgacgtagtggttcgggtggacctgagagacttcttttcatctatcaccgtggctcgcgtccgggcggtgtttagagcctgcggttatccagactccgtcgccactgcgctagcagacctgtgcactcacgcctcggctattgcccccctgcgaggacttgatcacagacaacggacactgctgcgcgtcccacatttgccacagggggcacctactagccccaggctcgctaatctcgtcgccaggaatctggacagacgcattagcggctacgcccgacggtctggactggcttatacccggtacgccgacgatttggctctttccggaaccatggatgctgatagtgctgtgtgggcagtgacgagaattgccgaagccgagggcttcctcgtgaaccctgctaagacctccgtcagacgacagcaccagaggcagatcctagctgggctcgtcgtgaataaccgccctgccgctccaagatacgcttatgatcaggtccgagccctgcttcataattgtcagaggacgggcgctgccgctcagaacagacaagggcacaacgatttccggagccatgtgtacgggctgattgcgtggatcggtgagacatctcctgcccgccgtcagaggcttttagctatggctgagctggtagattgggactga

SEQ ID NO: 12836 - RNA, 1263 nt, synthetic construct
  source 1..1263: mol_type = other RNA
atgtccgagacattctggcaccaccatactgcacgcatggtcgctgcccggcttgtggacatcgagtggaattcaactgaacttggggaggtcttagccagatttgaacacgtggccgacgtggaaacactcatcaccagactgctggagcgacggattcatgccccagactctacggaggttgcagccgaattgctcgaggtgattgggtacccaggagatcccttcgtactgcccgctccaccggttaggcccacacctacggtgaggttcggggtgccagcctttgcaaccactgctgagctggccgcctcgctcgatgttacagtaagcgaactggactggtttgccgacgtgggaggttggctgcgacgtgcagctcctcctcttcgccactacagggccagggaggtcgctaaatccaggggcggcacccgcatccttgaaataccaaagccgagactcagagagatgcagagacgcgttcttcaccgggtgctggaccatgtcgtgcctcatcctgccgcccatggttttcgcgcgggcagaagtgccgtaaccttcgcccgcccccatgaaggtcgggatgtcgtggtgcgagtggacttagcagacttcttcccgacggtaacaagaccacgagctcgcgcagtgttcgaggcttgtggctatccctacagggttgcctccgtgttagcgggcatttgcactaccgccatgccagtggacgaagtcgccggtttgccaaggagccaggctgccctgctaggagtccctcacctgcctcaaggcgctcctacctctcccgcgttggcgaacctagtcgcacgcggactcgataggcgtgttgcgggcctagcaagggctagggggctggtatatactcggtacgccgacgatttggccctgtctggcccctcagataccgacgtgtctaccctgttgtgggcactcgataggatcgtccgggacgaggggtttgtcgtgaatggagataagacacacgtcgccagagcacaccggcgtcagacactggcagggctggtggttaacgaaagcgcagccgctcccagagatcgctatgatgcgctgcgggctctgctgcacaattccgtgagaactggggccgctgcacaaaaccgagcaggagtgcccgactttcgagcttccgtttatggacagatagcctggatcggcgagagtagcccttcacggagaagccggctcctcgctatggctgatcgtgtggattgggagagttga

SEQ ID NO: 12837 - RNA, 1227 nt, synthetic construct
  source 1..1227: mol_type = other RNA
atgccatggactggagctgaactgggggaggttctcgggcccttcgatcggtggttcgatgtcgaaaccttgatcacccggctcagcgacgcagtcagggatgctccggactcggttgaggctgccgtggagctcctggagggagttgggtacccgggccttccatttatccccacccccccccctcggattagaccatatcggttcggggtgccagagatcagcacaccagcggacttggcaacctccctcggggtcaccgttcccgaattagattggttcgccgatctgggtggctggttaagaagggcagcgcctccacttcgacactaccgcgcagtggaggtgcctaagaaagccggaggcaaagctggcggacgctcagacctaggtaacatacggatcctggaagtccccaagccacgaatgcgagaaatgcagaggagagtgcttcataggattgtcgatcacgtagacccccaccctgccgctcacggttttcgtacaggccgaagtgccgtaactttcgccagacctcatgagcagcaagatgtcgtggtgcgcgtcgacttggctgacttttttgcaacagtaacagcacccagggtccgggccgtgtttgaggcatgcgggtacccgtcaaaggtggcagcactactggcaggaatatgtactacggccatgcccgtagatgaggccagccgtctgacaactagaagggccgcggttatgagaacccctcacttgcctcagggcgcccctacatctcctgctctggccaacctcgtggctcggaggctggacagacgtgtagcgggtttagccagagccaggggactgacctatacacgttacgctgacgatctggccttgagtggtccatcctccacggatgtcgggaccttgctgtgggccctggaacatattgcacttgacgagggctttgaagtgaacgctgctaaaacccacgtgcgcagaagccacacgcgccagactcttgcaggcctcgtggtgaatcgctctgccgctgtgccaagggaccgatatgatgatctgagggctctcctgcataatgctgcccggactggagccgccgctcaaaatcgcgatgagcttcccgacttccgcgcacatgtgtatggcctgatcgcgtgggtgggcgaatcttcccctattcgccgggttagactgctcgacatggccgcgtcagttgactgggacgcctga

SEQ ID NO: 12838 - RNA, 1353 nt, synthetic construct
  source 1..1353: mol_type = other RNA
atgcatgctccacgggctgccctgaggcgaagacgtgagtctatggtggctccagtcccccttccactagccaccgtgaccccacctcccgagaaccctcattgggcccggcatcacgttccagcaatcgccccgctgcttgtggataccgcctggaccagggccgccctagacgaaatgctcgtcccctttggtggcttcctggatgtcgacacattgaggagaagactgatggacgctattacaggtgctccctatactgtggacatcgcggtgcgggtcctgctggaagctggctttcctggcccaccgccaaggataagtattccccgcgctccactcgttgttcgcccttggcgattcgacgtaccccgatacgcatcagccgctgagctggctgcatctctcgacgtgactctcgatgagttggactggttcgccgacttgcaggggagactgtgcagagctccaaccccgctgaggcactaccgtgcactgaccatccctaagagcgccggcgcacacagactgcttgagatccccaaacctaggctgagagagatgcagcgtcgcgtgctacggcgcatagtggaacggattgaacctcacgatgcggcccatggattcaggcggggaagaggggtccataccttcgcggccccccacagacaacaggacgtcgtgattcggatggacgtgcggaatttctttcccacgatcacatttgccaggatccggggggtgtttgcggcctgtggctatcccgatgcagtggcagcagtgcttgccgggatttgtacaaccagcctgcctgtagacgaagcaagaccgctcccatggcgcgaagccactgatttaaggggccgccacttaccccaaggtgctcctacatctcccgcactcgctaacctcgtagcgcgcggagtggatcgcagactcgctggtttggcccgggccagaggacttgcatatactaggtatgctgatgacctggctttgagtgggcctagcagcactgatgtgcggacggtgatagggacagtcgatcggatcttaaggcaggagggctttacacccaatgaggcaaagactcgcgtcaggcgatcccaccgcagacagtccatgactggcctggtagttaacgtctcgccacaggttcctcgtgaagagtacgacgccttgcgcgctctgctgcacaattgccgcaggacgggagcagccgcacagaatcatgacggggttcctgatttccgagcctacgtactgggcagggtggcctgggtgggagaatcaaacgatacccgacgtcggcgattactcgcccttgccgatgaggttgactgggcgtcctga

SEQ ID NO: 12839 - RNA, 1200 nt, synthetic construct
  source 1..1200: mol_type = other RNA
atgcttgtggacgcgagatggacccgctcgggactggaggaagctcttgagagtttttcccatcggcacgacgtcgacgccctagttaccagattactggacctcatgccgtctgcaccattagatgttgaatctgggctgtccctgcttaggggcatgcctgtcctccctatgtacttgcctcctcgtcctaaaccacccagttggcatttcgacgtaccccgatatagcagcaacatcgacctggcgcgctccttagatgtgactccatgggaacttgagtggttcgcagatctcggcggctggttgcgcacaaagccctacccattgcagcactataggactcgaacaattgacaagcgcgatggtcacaggctgctcgaggtgcccaagcccaggttgcgggagatgcagcggaggctcttgacccgaatactggacagaatccccccccatgatgcggctcacggcttcgtcaggggacgctctgccgtgaccttcgcacgtccgcacgagtacgctgatgtcgtgatccggatggatctggcggattttttcacctctatcagaagaccacgggtggccgcaatttttgctagcgccggatacccaagaactgtagcccggactctggctggtatttgcaccacggagacacccgctgaacggttatccggcctgccacacgatagagccgttgccttgcgagcaccgcatctacctcaaggtgctcccacaagccctgccctggcaaatctggtcgcccgtcgactggacaggagacttgccggctttgcccgcaaaaatgggctcacttacactcgctatgccgatgacctcgcgttctcaggaagtgctgatgtgcgcgttgacaaactcataacagtggtgacaacgatcgtgcgtgccgagggctttagcgttaatgttcgcaagacccggattagaagggcccatcggaggcaggtcctagctggactggtggtgaacgaaagtgcagccgtgccacgagctcggtatgacgccctgagggcactcctgcataactgttcaatcaccggggcttcagagcagaaccgggacggtctgcctgactttaggtcacacgtatacggggtaatcgcatggattggggaatccaatgaagtgagaagagcagtccttcacgacctggccgctcgcgtggattgggatagctga

SEQ ID NO: 12840 - RNA, 1248 nt, synthetic construct
  source 1..1248: mol_type = other RNA
atgtctcgccagtttagtccacagatggccgcttggctagcctccctggctgctgaagctccctggactaggggcggcctggaggaagctttcatgcctcttctgggtgacaaggccgcgcggctcgcttatcgtctaattgatttactgccttccgcgccctacgacactgagtcactcagagggctgataactggactccccctactgccggagccccgatcagttgaaccgtcccgtcgcagagatggggtaaagccctggctcttcgaagtcccaagatacgtcaccacgggcgacttagccgagagtctgaatctgaccattccagagatcgaatggtttgccgacgcccacagtagactgaccgtggctcctgagccacttaggcactacagagttacccccatcccaaaacgagtgggcgcgaggttactggaaatacctaagccaaggttgagggaaatccagcgcaaaatccttcggaggatcctcgataacgtaccagcacatgcagccgcacacggattcgtcaaggggcggtcgcctcgaacattcggcattcctcacgcaggccgagaagtagttatgagcgtggacttgaaggacttttttcccacagtcggcattaatagagtcgttgctgtcttcgacgcactcgggtatccccgtaacgtcgcctggaatctggcctacctctgcacaacctccacacccgccggtcagctgggtggaatgccttatgctaccgcctcacttctcagaagccgccatcttccgcaaggagcgcctacaagccccgccttggcaaatttggtggcaaggcggttagatatccgcttgacgggactcgcccggtctatggggttgcggtatacaagatacgcagacgatctggcgttctctgggtctgccgatgtagacgcagttctgtgggtggctagacaggtgatcgtggatgaaggttttgtggtgaacccagtgaaaactcgggtgagaagggcccacaagcgccagatactgaccggcctggtggtcaatgactggcctgccgtgccacgtaaagagtacgacgagcttcgggcaattctccacaactgtgccgtgaccggacctgagccgcaaaaccggcatggggttcccgatttcagggcccatctgtttggacgaattgcacgcatcggcgagactaacagcgctcgccgaagaaggctgctggagatggccgagcaggtggattgggcttga

SEQ ID NO: 12841 - RNA, 1224 nt, synthetic construct
  source 1..1224: mol_type = other RNA
atggccgcttggcttgcctctcttgccgccgatgcactatggacaagatcggggctcgaagaggcctttctccccatcctgggcgagaaagcacccagactcgccgatcgccttatagacttgtcaccggtagccccatacgatcccgagtccttgaggggcttgattactggtctacctctactccctgaaccggccacagttgagccttcacgccgcacagatggattcaagccctggctgttcgaagtgccccggtacgcatcaaccggtgacctggccgaatccctggatctcacaatcagcgagatagaatggttcattgacgctcagtccaggctgagaactgctgccactccattacgacactatagagtcacgcctgtcccaaaaagggtggggttccgcatcttagagatacccaagcctagactgcgtgagattcagcggaagatcctccgacgaattcttcataatgttcccgcgcatagtgcagcgcacggattcgtcacgggccggtcacctagaacttttggtatcccccatgctgggcacactgtggtggtgtctgtcgatctgaaggattactttccttccatcggaatcgaacgagtggttgccgtatttgatgccttgggctacccaaaaagcgtggcttggtctttagcatatctgtgcaccacagccacccctgctgaacaactgggaggattcccctacgcaacagccagtctgctgcgcactaggcatctcccacagggggctccaaccagcccagctttggccaatctcgtaagcagacgcctggacatcaggttaacggctctggcgaagagtcttggggcaagatataccagatacgctgacgaccttgcatttagcggcgatatcgatgctgacaaaattatttggagcgcctccaagattatcgcggacgagggatttgcagttcacccttacaagacacgcgtccggagggcacacaaacgacagcagctcaccgggctggtggtgaacgattggccgagtgtcccccggaaagagtatgacgccttgcgtgccatcctgcataactgtgccgtgaccggcccggacccacaaaacctctctgcaattccagacttccgtgcgcacctgtatggccggatcgctaggattggcgctacctctgcagtgaggaggcggaagctgctggagctggccgaacggatagactgggagtga

SEQ ID NO: 12842 - RNA, 1419 nt, synthetic construct
  source 1..1419: mol_type = other RNA
atggcccatggacgggtgtctgtccgggctacagaccttaggggaaacccgtgggttgggaaaaagaactgggcccttcgtcccacccccgtacgtactctcagggtgcatgatggggcagaacacgaacgtttccggagccctgtagccgcagctccgtggatagcgatgacagaacggcagtttaacgctcagttagccgcctacttggcccagctcgctgctgacgctcaatggacgagagaacgactggaggaagccttcatgccaattttgggcgaaagggcacccagactggctgaccgactgatcgacctgtatccatcacagccgtttgaccaagcctccgtccataggctgatcgcagagcttccaagaatccctgaggctatctcccacgagcctgtgcggcgatctaatagccctaagccatggcggttcgacgtgccccgctacttcaccacaggcgacctcgccgagtcattaaatctaaccatccctgagatcgagtggtttgccgatgcccactccagactgactaccgcatcacctccactccgccactatcgcacaactgcaattccaaagcgcgtaggcgcacgactgctagagatacccaagccacgcctcagagagattcagaggaagattctgcggcgcatactggatcatgtccccgcccatggtgctgcacacgggtttgttaagggtcgtagccccagaacttttggcattccccatgccggcaaagaggtcgttatatccgtggatctgaaaaacttcttccccagtatcggtataagcagggtcattgctatcttcgatgcactcgggtattctaggagcgtggcttggaatctggcatacctgtgtaccaccagcactcccgctggccagctgaacggactgccttatgccacagccagtttattgcggacacgccaccttcctcaaggcgcacctacgagtccagctctcgccaatctggcggcccgcatgttggacatccggttgaccggatttgcaaggtcaatggggctgcgctactccaggtatgccgacgaccttgctctgagtggcgacgcggatgtcgataaagtgctgtgggttgccaggaggatcatcactgacgagggatttattctgaatccgctaaaaacccgcgtgcggcgagctcacgaaagacagcagctgactggtttagtggtgaatgattggcccgcggttcaaagacgagaatacgatgagttgagagccattctccacaactgcactcgcaccgggccaacgtcgcagaacagatctgatatggaggatttccgtgcgcacctctacggcagaatcgcgagaattggagaaacctctcctacacgacggcggaccctccttgagatggccgaaagggtggactggacatga

SEQ ID NO: 12843 - RNA, 1251 nt, synthetic construct
  source 1..1251: mol_type = other RNA
atgtccgagagacagtacatccctccaatggccgctgctttggctcggcttgcggctgacgcaccttggacaagggagcggttggaagaggcctttatgcccctcctgggagcccgagctagtaggctggccgatcgcttggtcgagctccaccctgcacctcccttcgacgaagcctccgtacaccggctgatagccgatctgcccctgttacctgagacggcttcgataactccagagaggcggacctcaagcttcgctgagtggcgtttcgaggtccccagatatgtcactaccggggatctggcagagagtctcaatcttaccattcccgagattgaatggtttgctgacgcccagtctcggcttcgaacagcccctgaacccctgcgccattaccgtacaacgccgattcccaaacgggttggcgccaggctgctggaaatcccgaagccaaggctaagggaaatacagcggaagattctcagaagaatactggaccgcgttccaccacactctgccgcccatggctttgtgaaagggcgctcacctagaacttttgggatcccgcatgccggccacgaggttctcgtgtctgtggatttgaaagatttctttccaagcatcggtattgaccgtattgtggcaatcttcggagctctcggctacccccgcacagtagcttggaacttagcctacctatgtactacctctacgcccgctgagcagctaagcggcttcgcctatccatccgcgagcctccttcgaaccaggcaccttccacagggtgccccaacaagtcctgcgctggccaacctggccgcaagaaagctggacatccgactgaccggactggcgggctcaatgggcttgcgctatacccgctacgcagacgacttagcattctccggcagttgcgatgccgacgtgctcctctggactatcaggcagattgtgcgagatgaaggattcggactgaaccccggcaagaccagagtacgcagggcccacaagaggcagcaattagctggtctggtggtcaatgaatggccggcagtgcccaggcgagaatacgatgggttgcgtgcaatccttcataattgcatcctcacaggacctgcggcacaaaaccgggcaggggtccctgactttcgggctcatctgtatgggcgcatcgcccacattggtgagactagcgccgcaagaagacggagactgctggaaatggctgagcaagtggattggtcctga

SEQ ID NO: 12844 - RNA, 1224 nt, synthetic construct
  source 1..1224: mol_type = other RNA
atggccgctttcctcgccgaactggcatccgatgtcccgtggactagggacagattggaggaagctttcatgcctgtgctgggagtgaaggcactgcgcctggccgataggctcatcgacctctatccctcccctccgttcgatgaggaatcactgtaccgcctgatcgcggatctgccccgactacccgacaagaaaagtgaggagcccgagagacggacaagcgggcctaaaccctggagattcgatgtgccaagatactttagtactggagatctcgctgagagcctcaacttgacaatcgacgaaattgagtggtttgcggatgcccaacagagattgaagacggcctcgtcaaccctcaggcactaccgggcgaccagcatcagcaaaagaagtggcgccagagtgttggagatcccgaaacctaggcttagggagattcagcgcaaggttctgcgccgtatactggaccaggttcccgcccatggtgcagctcatggattcgtgaccggtcggtccccacgtaccttcggcataccccacgcaggccgagacgtagtcttggcagccgacctaaaggatttttttcccagcattggaatcgggcgcgtagtggccattttcgatgctctgggttatccacggacagtcgcttggaatctggcatatttatgtaccacctccgctcctgctggagagttagctggcgtcccctatgagacagcgtccttgctgcgaacgaggcaccttccacagggagcccctacttctccagcccttgcgaaccttgccgcacgaatgctggacattcgtctgactggcctggcacggtcaatgggcttaaggtacacacggtacgctgacgacctggccttctcagggacctgcgacgttgatcgggtgctgtgggtagtgcgccatattgtcagggacgaaggctttatgctgcacccaaataagacaagagtgcgcagatctcataagaggcagcagcttactgggctggtggttaatgaatggcctgccgtgcctcggtctgaatatgacgaattaagggcaatcctacacaactgcgctcgtaccggcccagaggcccaaaacagaagtgggcatggcgattttcgagcccacctctacggtcgcatagctcggatcggggagactagcgccacgaggcgacggaaactccttgaactcgcagaacgcgtcaattggtcttga

SEQ ID NO: 12845 - RNA, 1257 nt, synthetic construct
  source 1..1257: mol_type = other RNA
atgaccgagcgtgagctaactccccaggctgcagctacattggctagactggccgccgatgcagagtggaccagatccggcctcgcggaagcttttgagccgttagtgcccgcaaaagctacttggctggcggaccgcgtgattaacctgtatcctagccccccctttgacgaggcatctatcttcgtcctgctcagagatctaccattcatcccggaaccttccgtgagctcacagcgaccgacgcggaacagtgataaaccatggaggttcgaggtgcctcggtacgagacaactgggcagttggcccgtagcctggatctaacaatctccgaaattgaatggttcgcagacctgcagggccggctcagaactgccccattcccccttcaacactatcggagcgctcgactggacaagcggcaaggcattcgtctgttagaagtgcctaagccgaggctgagggaaatacaacgcaagatcttgcgccgcattctggacagaataccctcccatccagccgctcacgggtttgcgaaagccaggtcaccccgcacattcgcgatgcctcattcagagcgagacgtggttatatctgtggaccttaggagattttttcctagcatcggcttcgatagggtagtagccatcttcgaagctgtcgggtaccctaggacagttgcaaaaaccctggcagctctgtgtactactgtgaccccagccagtgagttgacaggaatggatcgacctaccgctgcccgtcttagggctacccatttaccacagggagccccaactagccctgcccttgccaatttggcagcccggcagctggacattcgcgctaccggattggcacgaagtggtggcgctcgctacagtcggtacgccgacgacctcgcattttctgggggaccagacctggatgttgatcgcctgctctggcttatcacgcaaatcgcacacgatgaaggcttcacaattcatcccgataagacgcgagtcagaagagcccatcagagacagcagcttaccggactcgtcgtcaactcatggcccgccgttccaagggaggagtatgataccctccgcgcgctcctgcacaactgcatagcatcgggtcccgctgagcagaatcggcaccaccacaatgactttagggcccacgtgtatgggcggatcgccagaattggtgagacaaacgaaaccagaagggccaagctcctgtctatggcctcccgggtgaattgggactga

SEQ ID NO: 12846 - RNA, 1326 nt, synthetic construct
  source 1..1326: mol_type = other RNA
atgaccgaaagggagctgactccaagagctgccgccatcctcgctaggttggccgttgacgcggactggaccagatccggcctggatgaggcatttgcccggctgatcccagcaaaggccaccaggctggcagatagggtgatgaatctctatccaagcccgcccttcgatgaagcaagcatctttgtactgctgcgggatctgccattcctcgccgagccatccattagcagcgagatccctactcattttggaggaaaaccttggcgcttcgaagtgcctaggtacgagacaacaggcgacctggcccggtcattagatctcacgataagcgagatcgagtggttcgcggacctgcatggccgactgcgatcagccccttaccctctccaacactaccgctccgcccgccttgataagcgacagggcatacggctactggaagtccccaagccgcggttgagggagattcagagaaagattctgagaaggattctggatcgtatcccccctcatcccgctgcccatggattccgtaaggcccggagtccacgcacctttgcgcttcctcactcggggagagcagtggtggtgtctatggacctacgccggttctttccctctatcggcttcgatagggtcgttgcgatctttgaagccgtgggttatcccgggacagtcgcagcacacctggctgctttgtgcaccacagtgacacccgcagttgagctcattgggatggatcgccccacagcttcaagattacgcgccacccacttaccgcagggtgctcctactagtcctgccctggcaaacctcgttgctaggcagctcgacattcgtgcttctgggcttgcacggtccgtcggagcacactacactaggtatgcagacgacctagccttctctgccgctgccgacctcgatgtggaccgacttttgtgggtcatgagccagatcgcgtacgatgagggcttcgccgtccacccaggaaaaacgcgggtgggccgagctcaccaaagacagcagctgaccgggttggtggttaacagttccccggccgcccctagagaggaatatgacaacctgcgagctctgcttaataactgtatcagagcgggggtgtcaggtcaaaatcggcgcggcgccgatgactttagagctcacgtatacggacgcatagctagaattggcgagacaaatgaagcccgccggactaaacttttgaacatggctgctagagtggactggccaacgccagtatttgaaccccgtaattctggtagtaggaccgcccatacccccgcaactgaggaagacaggtga

SEQ ID NO: 12847 - RNA, 1269 nt, synthetic construct
  source 1..1269: mol_type = other RNA
atgaacgatagggagttatccccacgagccgccgctactctggctagattggccgccgatgccgaatggacccagtctgggcttgaggaggcctttagccggtttatgcccgccaaagcatcacggcttgcggaccgaatcattgatctgtacccctctccccctttcgacgaggcctcaatcttcgtcctgctgagagatctcccgctcatagcacagagttccaagtccagccagaggtcccccatacgtggccgagtcgttccatggaggttcgaagttccccgctacgaaactacaggccagctagcgcaaagccttgatctgacgatttctgaaatcgagtggtttgcagatctgcaggggaggttgcgcaccgccccttttcctctccagcactatcggtcagcacggctggacaaacggcacggggtgaggctgctggaggtaccaaagcctaggctaagggagattcagcgaaagatcttgcataggattctggacaggattcccccccatcctgccgctcacggattcagaaaaggtcggagcccgaggacgtttgcaaccccacatgctgagagagaggtggtggtgagcgtggacttgcggcggttcttcccttccattggcttcgatagggtggtggctatctttgaggccgtcggatatcgccgcagagtggctgctaacctggccgcattatgtacaacagtgaccccagcgggagaactgactggaatggacagagccacagccgcccgcttgagaaccactcacctgccccaaggagctccgaccagtccagctcttgcaaatctggctgctcggcagcttgacatacgcgccgcaggtcttgcacggaccatgggtgctcgatatacacgatacgcagacgacctggcattctctgggcctgccgatctggatgtcgataagctgctctgggtgctcagtcaaatcgtccgtgacgagggctttacaatccatccagacaagactagggtgagacgcgctcatcagcgtcaacagctgacggggctagtagttaatgcgtggcctgcggtacccagagaggaatatgataacctccgtgctctcttacacaactgcctcggctcggtcgccgcacagcagaatagaaatggcttaactgacttctgcgcccacgtttacggaagaattgcccgcatcggcgaaacatcagaaacccggcgccgcaaattgctcgagatggccgcgagagtggactgggaagggagtggctga

SEQ ID NO: 12848 - RNA, 1251 nt, synthetic construct
  source 1..1251: mol_type = other RNA
atggccgatagggaactcacaccaagatctgcagcggtcttggctgcactagccgcggatgttcagtggacacggtccggcctccaggaagcattcgcagctctggtgcccgcaagagcctcttggctcgccgatagggtgatcaacctctttcccatgccacccttcgatgaaagcagcatcttcaggcttctccgtgacctccctttcataccagagcccctggtcagtagccatactccgcctcctggaggcaacgttaagccctggcgatttgaggtgcctagacatgaaacaacggggcagctcgctcagtctctggatcttactattgacgagatggactggtttgcagacctgcaaggcagactaacacgtgccccattccccatgcagcattaccggtccgctcgcatcgacaaacgggtagggagccgcttacttgaggtcccgaagcctcgcctgagagaaatccagcggaaagtgttgaggcgcattttggaccgtgtgccagcccacccagctagtcatggtttccgaaggggcagaagtgcgagaacattcgctattcctcatgcaggtcgggaggtggtcgtgtccgttgatctaaaaaatttctttcccagcatcggctttgatcgggtggtagccatttttgaggctgtggggtatccgcccaccgttgccagcaatctggccggagtgtgcaccaccgttactcctgccgccgagttggttgggatcgatcgcccgacagcttctagactcaggtcgactcacctgccccaaggtgctcctacctcaccagcattggccaacttagccgcccgccaggtcgacatacggttaaccgggctggcccgatcaatgggtctgcgctacacccgatatgccgatgacctggcgttctccggctcaccagaggtggacacactgctttgggtcgtggggcaggtggcccaagacgaaggatttgcacttcaccccgataagactagggtcagaagggctcaccagcgacaacagctgacgggcctggtagtcaacgactggccagcagtacctcgggccgagtatgatgccctgcgggctctgctgcacaattgtatgacgactggcgctgacgtgcagaacctcaatggatcagcggactttagggcccacgtgtacggacgtatcgcacggattggagaaaccagttccacccgcagggagcgccttctggctatggctgcaagagtggattggtga

SEQ ID NO: 12849 - RNA, 1251 nt, synthetic construct
  source 1..1251: mol_type = other RNA
atgcgcgactttgagctggatcctgaattggcaagaagattggcagtagccgctgccgatgccccatggactctctctggccttgaagaagcattcggcacagtgtttggagtgagtcctacgctgttagctgttcgcgtacttgatctgatgccagcccctcccttcgagccccagacactttatcggctgcttcgagagttacctcgtctacggccggtgccgctgtcactggataccaatgaaagctccgtttggagatttgacgtcccccgctacaacacatccgtcgatctggcccgtgccctggacctcacaattagcgagttggaatggtttgctgatcgtggggaatggctgcggaccaaacctctgccgctcagacactaccgacctatgcagatctcaaagaaaaccggtgcaagattgcttgaggtgcccaagcccagactgcgggagatacaacgaaagatcctcagaaggattctggatttggtgccacctcatgatgcagcccatggctttgtgagaggacggtcgcccctaacattcgcggcaccacacgctcagtccgagattgtgatcggggtcgatctggcccagttcttcccctccatcagcgggtctagggtccatgctgtcttcaccgccctaggctatccgccagcagttgcaggcgtgcttaccggactctgcacagtggctactcctgctgacactctcaggggcctaccctacgctcaagccagccaactgcggaccgcacatttgccacagggagctcctacatccccagccttggcgaacctcgttgctcgcaagctcgacataaggctgtcaggtttagcccaagccaactggctgacttacacgcgctacgccgacgatctcgcgttcagtgggatcgaggtggctgacgtgggaaccctgctgtggagtgtggaacagattgccagggatgaaggctttgcgatccacccacggaagaccaaagtaatgcgaccacaccggcgccagcacttaaccgggctggtcatcaatgaccagcccagctatcccagggatgactatgacaggctgcgagcgctcctctacaatgccgcatcaacctctgcacaggagcagaacagagacgggattgagaatttccgtgcccacgtctatggaaggattgctcacataggcgagacttctacgactcggcgccatactctgcttcgcctggccgagagggttgactgggacggttga

SEQ ID NO: 12850 - RNA, 1335 nt, synthetic construct
  source 1..1335: mol_type = other RNA
atgagcctggatagggtgccacttgtgcagcaactggtgaggagagcccttgacggacggtgggaaagccacgccatcctggcacgatggcatacgctcggcgctaggccatgtatcactcttcgcgctctcgcccacttagccgttcattgcgccgggaggggtatccggccgacagaaaagcgcctgattaggactctgctaagttccccactcttatcccgctggctgagacagcagcacagaacgctgctgccactacctccccctgccccaaagttcgagcccgtcgagaaattggcacacctcgccctccctccactcaccaccgagacagatttggcccagttctttcatatggaactcgccgagctgtcttggcatgctgaccctcagcttcgcctgcggcatcagcccgatggaaggctccaacactatacctaccgctggttacctaggcgcaatgggtcaccgccccctagactcctggagattcccaaaccctggaccagacaattgcagcggcggatctgggatcagttgctgaggccagtcccagtccatgcagcctgtcatgggttcgtgccggggcgatcacggttgactgctgcagcacctcactgcggtaaagaagccctactccgaatagacttgaaggacttctttgtgagcataccccgatggcaggttcgggccctgtggatgacactgggatatcccgaagctgtggcccgactgctggctggtctatgcaccacagtaacccctgctgccgtactggacgcatgtcccgcgcctccacaggatccctctcaacgctggtggtggaggaagcgagcgagcactccacacctgccacaaggctcgccttgctctccggcacttgcaaacctgtgcgcttggagactggacacaagactgacagcatacgcgaccgctgcaggcctggactacactcgctatgcggatgacctgttgttttctggctcagctcggactcttcggcgtcctcaaagacggcacgcactgatggagatcattagatccgaggggttttgtgtccatcccgacaaggtgcggctcatgacccagagtcagtcccagcaggccctgggattggttttaaaccagcgcttaaatcttcccagggcttccttcgaccagttgaaagccgagctccaccacgccctccaccatcagggccttcctagtgaggcttcagcccgcagccagaagctggcccaactccgtggcaggattcaggaaatgatcgatattcacccccgtagaggacaaaaactgctggcgctttggcagagactacttcgtgattga

SEQ ID NO: 12851 - RNA, 1005 nt, synthetic construct
  source 1..1005: mol_type = other RNA
atgcctccaacaaggagtgctcgggcaccagctctcgatagcttagatcagctgagacgctggctgagactatcaaccggggagttgctgtggttttgtgatgtctacggaaacggacggcgagcctgcgcaactgcccttaggcactatcgacacagatggatcgctaaacgctcaggtggtctgcgacttcttgagatccccaaggcacgcctcaaaaggatgcagcggcgcatactggacgagctcctgtctcacgccgcaatccatcctgcagccactggcttcgtgcgcggacgtagctgccttgaccacgctaggacccatgttggtgcgcggtgggtggtgacgagtgacctgagggactggttcgggagtattcccagagcccgcatcgcggcccagttcagacgtagcggcgctagcaaacatgtggctgacgcgttggctcggttgtgcaccgcctgtaccccctctgctatagtggacctggccgcggtgcccgatagagctcacttgcgagttcctcatcttcctcaaggggctcccacgtcccctgccttagcaaatctggtcgcatcaaggctggaccgccgcctagcaggatacgccaggcatgccggcctcaactactcgaggtatgcggatgacattgccctgtccccacagccaggcgtagaaacccctccacaaagagccctggaagcactgcagagaattgcccgttcagagggatttagagtgaatccccggaagatccggatcaagcggcacggctcccgtatgacagtctgtgggattgttattaacgagcggctgaacttggctagggatgcctatgaccggctgagagccgcagtacaccgactcgcatctagcactgatgtggatccgctcgaaatcgcccgggtccgagggagattatcttggctagagtccctcaatccgaggcgcgctgccaagttacgcaggctgctcgaaagcaggggcacaccatccacatga

SEQ ID NO: 12852 - RNA, 1377 nt, synthetic construct
  source 1..1377: mol_type = other RNA
atgactgacgccgcaacccctgcttctcgcgtgttggctaggactcctcatcctctgccacgtgatgttgcagctgcgctgggcgacgcctttttggccgctgaggcctgggaaagggctgctctgattgatgctggtgccgacgttcttggtgccagacggcgctggttaggcccgctagtgagagacgtgttaacggaactggccaggccaccaagcgatgcccccagactccttgtatccgtcatcgtacggagcagtgccttcttggaggcggtgcggaaggccgaagagagaggttcccccctccgcatacggcaccgtgtaatcgctccctccgtctcacgcgaacctaccggtgccttgcccgctattggagatgtcaccgacctggcagcactgctggagatcgatctcggccggcttcagtggctggcagacgtcaagcactggaataggcgggccagatcgccagccctgcagcattacaggtatgaatggaggagacgcccagggcgagttcctaggctgttagagatacccgagcaacggctcagacgtgcacagagacgcctgctacacgccgtgctcgccctgatccctgttaacgatgcagcgcacggctttctccccggacgttctgccgctacaggtgctgccagacacattggagcggagacagtgatctctttggacctgactacctttttcgcccgggtcaccgcaccccgcatttatggagtcctgcgacagagcggcttctcagaacccgtggctcacaccatgactgggctgtgcacaactgcggtgccacccgctgttcttgccgcaatgccgcccggaggatctccagatgagagatttgcactccggcgagcgttagcgagcacccatctccctcaaggcgcccctagcagcccgatgctggctaacctggcaatcaggcgactagacagtcggctcacgggctgggctgacgcattggatgccacttatacacgctacgcagacgacctggccttttcagggggaccagcacttgcacggagggctgatgccttcattcggggggcaaggaggattattgctgatgaaggccatgaggctaacgcccggaaaacaagagtgcgagggagaggcgtgaggcagtccgttaccgggatcgtggtcaacgagcgactcaacgtgtcccgcgatgactacgatcgactgaaagctatcgtacacaattgtgtggtgcacgggcctgccacacagaatcgaggtggggtggccgacttccgtgcgcatctgcttggaagaataagttgggtcgagtcacttaatgctaggcgcggtgaacgcttgagggccgagttcgccagaatccgctggtga

SEQ ID NO: 12853 - RNA, 1371 nt, synthetic construct
  source 1..1371: mol_type = other RNA
atggccgccaccacagcttcccgagtgctagcaaggacgcctcgcccactgccctcttcagtcgcagcgtcgctcgccgatgcctttctggccagcgaagtgtgggcgcccaaggagttgattcgcactggagcattcgtgatgggtgctagacggaggtggctgacaccccttgtcggcgatgtgatgtctgctttcgtgcgagcaccagttgatgccccacggctgctcacttcagtgatcctccgggctcccgacttcattgaggccgtccgaaaggccgatgagagacggtcgccgcttaggatccatcaccatgtagtgggccctagtacatcccagccccccagtggcccgttacctcgaattgactccatacccgacttggctgtgttgctggatctggacgtgggccgcttgcaatggcttgccgacacaaaacagtggaaccgcagagcccggcctggtcctttgcatcactatcaatatgaatggagagcacgcccaggtaggattcctcggctgctcgaaatccccgagcaaaggatgcggcgggtacagcgaacactgctagaacgggttctcgggttaatccccgtcaacggagccgcccacgggtttgtgcctggaagatcagctgtgactggcgcagcacaccacacaggaagcgacatcgtgatcagcctggacctgacgacattttttgctagggtgaccgcaggcagaatattcggaaccctcagacagagtgggctctctgagcccgtttctcatgtcataaccggcctttgcaccaatgcagtccccccgagagtacttgcagccatgccaccagggggatccccagaggagcgctttgctctcagacaggcgctcgccactagccatttacctcagggcgctccgtcttccccaatgttggccaatcttgctatcagaaggctagatagccgtctgactgggtgggcagacgctgtggacgccacctacactaggtacgccgatgacctggccttcagcggcggaagtaccctggccaaaagacctgatgcattcatcaggggtgtccagagaatcatagaggatgaggggcacctggctaatccaaggaaaactcgcgtccgtaggcagggtgttcggcagaccgttaccgggattgtggtgaaccaacgcgctaatgtcagccgtgccgacttcgaccgcctgaaggcgacgattcacaattgtgtactgcacggccctcatacccagaaccataggtccctggatgatttccgggctcacctgctggggcgtatttcatgggttgaatctctcaaccccccacgtggagcgcgattacgccaggaatttctgcggatccgctggtga

SEQ ID NO: 12854 - RNA, 1380 nt, synthetic construct
  source 1..1380: mol_type = other RNA
atgactgaagcgctcacaccggccaccagagtgctggcacgaactccaagagccggtgcatcagcaatcgccacagcccttgccgatgccttccttgcagcagacgcatggactgcaccccacctggtggatgctggctctttcgtgctgggagctcgcagacgctggcttcctcgcgtggtggacgacgttatggtggactttgtgcgagcccctgtggatagcccccggctactcatagccgtaatcagggatagtccagcgttccgggcggctattgagaaagctgacgcggcccggacccccattaggatccaccaccacgtggtcgccaccaccaggtctagagaacccgccgccgggttacccagaatcgacgatatcgctgctctggctgtgctactggagctgaccgatgggcagctggcgtggtttgccgacaccaaaaggtggaacagaagggctcggcccgggcctttgcatcattacagatatgaatggcgcagcaggccaggaagggtacccagattgctggaagtcccagaggagaggctccgacgggtccaaaggcgtctgctcgagcgggtacttgggctaatcccagccaatgacgcagcccatggttttatgccaggtagaagtgccgttacgggagccgcaagacacgttggcgctggaatagtcgtgtctgtggatctgacaacgtttttcgctcgcgtgtcagccgggagagtctatggaactctgcggcagtctggctactccgaaagcgtggcccatacaattgcaggggtatgtaccagtgctgtccccccccgtgtcttagctgcaatgccgcctgggggcactccggaagaaagattcgcactccgccgggcccttgccgcaaatcacttgcctcaaggtgctccaagctcacctatgattgctaacctcgcagtccgacgtctggattccaggctgactgggtgggctgcggctgttgatgccgcgtacacacgatatgctgacgacctgacattttccggcggaccaagtttagccgctcggcctgatgcgtttatccgcggcgttaggaggattgtggaggatgagggccattcgctgaacgagcgcaagacgagaatacgtaggcaggccacacggcaggctgtaaccggcattatcgttaacgagcggctcaacttggtgcggggcgactacgaccgtttgaaggccatcatccacaattgcattctccacggtcctagctcccagaatcgcgccggagttgccgacttccgagcacatctgagaggccggattagctgggtggagtccctgaatgcccagaggggagcacgccttcgcgctgaattcgcccgaatagtctgggcatga

SEQ ID NO: 12855 - RNA, 1398 nt, synthetic construct
  source 1..1398: mol_type = other RNA
atgaccagtactgccgccgcgagggctttaggtcactctccccaacctgctgcctccgccattgcaagagcactcgcagacgccttcctcgaaactccgtcttggacgaggcccgaattgatggccgcaggagctcgtgtcctaggcgcaagaagacgctggttgggccccgtcgtcgatgagatccttggagacttggttcgtgcccctcacgattccccacggctgcttgccacgctgatagaagattcgccagctttcagagagggcgtgtccaaagctgcagcccggagagcccctcagcagatccactacagacccctggccccacaacaccctccagctctgagccatcccctcgaccccgaaccgccacttcctaggctgcgtacgctgcccgagcttgctgccttgctcgatctgagcctcggccacctggagtggttagccgataccaaaaactggaacaggcgggcccgaccggggagtttacaccattaccggtacgaatggagaactcggccaggacgcgttcctcgcctgttggaggtgccagaggacaggatgagaaggacacagcgggctctgcttgatcagctgctgtctaggatccccgcgaatgacgcggcccacggatttctacccggaaggtctgccgtcacaggcgctgcaagacacgtagcctctgacatagttatttctctggatctgaccaccttttttgcacgcgtgacagctaccagaatctatggcactctgaggcaggcgggttacgacgagcagattgctcacgcaatcaccggactgtgtacaaacgctgtgcctcctcgggtgttagccgcaatgcctcccggcggaagcccagaagagcgattcgcccttaggcgcgccctagcagcctcacatctgccacagggcgctccgagtagtccaatgctggcaaatctggctgtgcggcgcctggactcaaggctcactgggtgggctgagaaggccgaggcttcctatactcggtatgccgacgatcttacctttagcgggtcaggagtgatcgcccgacgacctgatgcatttgtcagaggcgtacggcgaatcattgcggacgagggtcatattgctaatcccgctaaaacacgcgtgcggaggcaaggtacccgacaagccgtgacagggattgtcgtgaatcagcatccaaacttgagcagagttgaattcgataggctcaaggcgatactccataattgcgcagtacacgggcccgctgcgcaaaaccgctcagatgccagcgacttccgtgcccatctcctcgggcgcatttcctgggtggaaagcctgaaccctggtcgcggggcaaagttgcgtcgggagttctcccgcatcgactggggctcgccttga

SEQ ID NO: 12856 - RNA, 1410 nt, synthetic construct
  source 1..1410: mol_type = other RNA
atgagcgggtcgtttggaaagcgggcagtcccgaacactgccgtggttatcatggcagcgcataggagctatcgggctccccacccttctccatccgctatctcccacgccctggcttacgcctttttagctagcgacgtttgggaaacaaaacagctggtggatgccgggtggagcgttcttggtgctcatcgccgttggttacgcgccgtagtagcagatgtcgtcgcggcttatcaccggccaccaactgactcaagccgggagctagccgcatttattcgcaacagccctgcattcgtagacgcgatcgcaaaggcacgtcaacagagaaggcccatccggatacaccacctggtggtggctccctcccaagccagggatgttggcggcctcgtgcctcgaattaacaccgtggccgagcttgccgagctattgggccttaccataggccagctggactggtacgcagacaccaaaaattggaatcgcagagcacccgtgggacctctgcaacactaccgctatgagtggaggactaggcctggccgcactccacggttgctcgaagtgcccgaggaacggatcagaagggttcagcgcttgcttttagatgccgtcattgcgcttattccagtcaatgacgccgcccatggtttcattgctaaccgcagtgccgtgaccggtgctgcgttgcataccggccgggagatagtcgtctcactggatctgacaacgttcttcaccagagtcaccgcttcaagaatctacggggtgttccggcagtccggctttcccgaaaccgtggcacatatcctgactggcctctgcacgaattccgtgccccctcgagttattgcagccatgcctcctggcggggatgctgatgaaagattcgctctccgtcatgcgctcgctgccaaccacctgccacagggagcaccatcaagtcccatgctggccaatctggctattcgaaggctggattctaggctaacaggatgggcccacagtgtgggggccatctacacacgttatgccgacgaccttgcctttagtggggaccgagatttggcacgacggccggatgctttcataagaggagtccaaggtgtggtgcgggaggagggccagacaattaaccccaggaagacgcgcgtacgaaggtctggagtgaggcagaccgttactggaatcgtggtaaacgatcatacaaacatctctagacacgactacgacctgctgaaggccactctccataattgtgccaccctcggtgtggagcgtcagaatagaggggggcacaatgacttcagagctcacctcctgggaagaattgcctgggtcgaaacactgaacccgttgcgcggcgaagccctcagacagaaatttgcactgatcaggtggtga

SEQ ID NO: 12857 - RNA, 1398 nt, synthetic construct
  source 1..1398: mol_type = other RNA
atgactgatgccccaccgcagacaaccgggtcacccatcagtggggtgccaagggtgagaagagtgccccaccctacaccagccgccattgcaggcgctctgagctatgcgttcctagctgctgaccaatgggccaccaattccttgattgatgctggcgctcgcgttttaggcgcccgtcgtcgttggctacgcacagtcgtcgcagatgtggtggccgtgtatcatagaccccctgcagacagtagccgggagcttgcctcctttgtcgtgcagctgcccgcctttgtggaagccatcgcaaaggccaaacaacagcgccgtccaataggactccaccactttccagctgctccctctcaggccagggataggggggatccagtaccagtagtggacaccgtcggtgaactggccacactgctcggagtgaccgttggccacctggagtggtgcgccgacaccaaaaattggaatagacgagctcctgccggcagactacagcactatcgatacgaatggcgacagaggccaggaagaacgcccaggcttctggaggtgcccgaggagaggattcgcagggtccagcggactctgctcgataccgttatcggactcatacccactaatgtggccgcccatggctttgtagcgtcacgatctgcagcaaccggcgcggcattgcacacagcgcgagagatcgtcgtgactctggatctgactaccttcttcactcgggtgacggcagctcggatctacggggtttttagacagagcggcttcccggaatccgtcgctcatattctgacgggtctgtgcaccaactctgtgccgcctcgggttatagctgccatgcctcctggagggagtgcggacgaaagattcgccttgagacaggcgctggcaggaaaccatttaccccagggtgctcctagcagccccatgctcgccaatctggctatccgccgattggatagtcgccttacagggtgggccaacgcgattggcgccacatacacacgctatgccgatgaccttgctttctctggcgacagggacctggcaagacggccagacgcatttatccggggagtccaccgcatcgtcctcgacgagggccataacgttaaccctaggaagactcgggtaaggcggtccggtaccaagcaaactgtaacgggaattgtcgttaacgaaaggaccaatatatcccgccacgactacgacgcactcaaggctctccttcataactgtgctcaacacggtccggattcacagaacctgtcgcatcatgtggatctgcgggcacacttgatggggagaattgcctgggtgaccgcactgaatcctcacaaaggggaggtgttacacacaaagttcgcccttatccgttggtga

SEQ ID NO: 12858 - RNA, 1413 nt, synthetic construct
  source 1..1413: mol_type = other RNA
atgagcctgcgtttttggagtatgaccatggacgcagcctcttctacacgcgctaaggccggccttagagggatccgcagaccacacccagccccctctgctgtgtcacaggcattggcatatgccttcctggcaagcgaggtatgggcggccaaagaactcgttgatgctggcagtctggttcttggtgcgagacgtcgctggcttcggccggtagttgccgacgtgatggcggcttaccatcgcgcccctacagggtccactcgggagttggccgccttcatcgctaccgtccctgcttttgtggatgcagtggcggctgccgcacaacaacgaaggcccattaggatccatcgcgtggtggcaacagccagtcaagctcgacccgccggtggaccattacccgcaatagacacggttgccgatttggcagtgctactggggctgtctctcggcgaattagagtggtttgccgataccaagaattggaatcgaagggcgcctgcaggggctctgcatcactatcggtatgagtggagagccagacctggtcggaccccaagactcattgaggtgcctgaacagagactgcgcagggctcagagggctctgctggaatgcgtgataggcatgattcccctgaacgacgcggctcacggctttgtccctggcaggagcgccgtaactggcgctaccctgcacaccggacgggaaatcgtcgtctcgctggatctcacaacttttttcgcaagggtgcgggcctcacgagtgtacggagtgcttagacaggccgggttcgctgaatccgtcgctcatgtgattgccggcctgtgcacaaactccgtaccaccaagggttatcgctgcgatgcccgacgggggatctgctgaggagcggttcgcactgcgtcatgccctcgctgacagacatctgccccaaggcgcgccgtcttcacctactcttgccaatctcgccatcaggaggctggattcccgtttgtccggctgggccacgagtgtcggagctacctacacccggtacgccgacgatctcgcattcagcggtgatcgcgagttagcccgcagaccggacgcctttatccgcggtgtcgagcgaattgtgcacgaggaggggcacagcgtgaacccacagaaaactagggtccgccgttccggggttcggcaaagcatcacaggaatagtcgttaacgaacacacgaacatcagccgacgggagtatgatcagcttaaggcaattctccacaattgtgcagcccacggccccgaatcccagaatcgggaccaccataatgacttcggagcacatctgttgggtagaatagcctgggtgtcaactgtgaaccctctaaagggaagatcactaaggcagaaattcgccctcattgactggtga

SEQ ID NO: 12859 - RNA, 1017 nt, synthetic construct
  source 1..1017: mol_type = other RNA
atgccggtcccccggcttgatacactggccgatctcagtgctttgctcgggctcgacatcggcgagcttgaatggttcgccgatgcccggggatggaatcgtagggccccagaaagactgcagcactatcgccatgagtggcgaacacgacctggcagaactccccggctgctagaggtgccagagcagagaatgagacgcgctcagcgcacactgctggacaccgtgattggcgtgctgcctgctcacgacgctgcgcatggctttatgccaggacgtggcgtgatctctggggctgaggctcacctaggttccgcagtagttatctccctggacctcgtctcattcttcagccgagtgagcgcccgacagatctatgcagtactgcggagggctgggttacctgaggtggttgcacaccgggtgaccgccctgtgtacccatgctgtgcctccggctgtcctcgcaggtatgcctccaggggggagtcctgaggagaggtttgccctgcggcaagcgctagcacgaccccatttgccacagggcgcccctagctctcccatgttagccaacctggctgtgagaaggctggatgcacggctttctggatggtcagacgccgctggcgcacggtacacgagatacgccgacgacttgtcgttcagcgggggagccgaactcagtagacgctctgacgcattcgtccgtggcgttgccaggattgtggccgccgaaggtcacgagctgaatgaaaggaagacccgcgtgaggagagccggagaacgccagtccgtaactggcgttgttgtcaacgataggttgaaccttgcaaggcgggacgtcgatcagctgaaagccatacttcacaattgcgcggtgcacggtccagaatcccaaaaccgcgccggacatcccgattttcgcgcacacctggagggacgtttaaactgggtcgagtcattgaatcccgcacgcgctgcgagactcagacgggattttgaaaggattgcgtggtga

SEQ ID NO: 12860 - RNA, 1392 nt, synthetic construct
  source 1..1392: mol_type = other RNA
atgagcgacagtccaggagctactggtgcaggacgagcggccctcgtgttaggcagagaaccccatccctcttctgcgggggtggccacagccttggcatttgcattcctagctgccgatgtatggagtccatccggtctgtccaccgcagggactgccgttttaggtgtgaggcgaaggtggctgggacccctgatcagggacgtcctggaggcgtaccgacagccacctcacgacgcctccttggaattgtcgagagtgatcggggccacagaatcttttagggctgcggtccgacttgctgattccagaggagcccctctgcgcgtccttcaccacaaggttgctgagagccgggcaagagaaatgcccggcctggtgcctcacatcgatacaccggcagacctcgccaggctcctggaactctcagtaggcgaccttgactggttcgccgacgccaagcagtggaatagacggagcgctgtggcagctctgcaccattatcggtacgagtggcgtttgcgcccggggagaactccacggttgctggaaatccccgagactcgcgtgcgggcagctcagaagcgtttactcgtagaggtcctcggcctgatccccacacacgatgcggcccatgggtttgtcccgggaagaagcgccgtgactggcgctagtcggcataccggctcggatgtggtcgtgtccctagatctcacaacgttttttgcacgggtgaccggcgcagccgtttacggaaccctgagaagggcaggattgccagaggccgtagcctacgctattactggcctctgtacaaccgctgcccctcccagagttctaagcgccatgcctcccggaggggatcctgatgagcgcttcgctctgaggaaagcactggcctccactcaccttccacaaggcgccccttcttcaccaatgcttgccaacctggccatccgacgcctggacgcaaggcttcaaggctgggcggcagctgctggtgggacatatactaggtatgctgacgacctggctttctcaggcgggggacagttagcacggaggccagacgccttcgtgaggggtgtgcagcacattgtgatagctgaaggccacaccgccaatcctcgcaaaacacgcgtccggcgtgccagcgtgaaacagaccgtgacgggggttgtggtcaacgcgcgaaccaatatgtcacgtcgcgacgttgatcgcctgaaggcaattattcataactgcgtcctgcatggtcccgagagtcagaatacggctgcccatgccgattttagagcccacctcctcggcagacttagctggctggaatctttgaaccctgagcgcgctcggaccctgagaaccgagttccggaggatagagtggtga

SEQ ID NO: 12861 - RNA, 1299 nt, synthetic construct
  source 1..1299: mol_type = other RNA
atggctcttgccttcctggccgctgacgattggtcggccactcgactctctgccgccggatcactagttctcggggctaggcgcaggtggcttggaccactcgtacgggatgtgctggcggcttaccgcgaacctccacatgatgcctcccgcgaattaaccaccgttatcagcggttccgatgcattccgtgccgccgtggatagagcagacgccagaggcgctcctctgcaggtgacccatcacctcgtggcccagagccgaggaagagaggcacctgctcctgcaccactgctggatacagtcagcgggctggcgcggctgcttgatctgtctgtgggcgacttggactggtttgcagacacaaagcattggaacaggcgtgccccggctggtgctttgcaacattaccgatatgaatggcgtctgcggccagggagaactcctagactcctcgagatcccaggttccaggttgcgggcaacgcagcgcaagctactggtgggcgtgctcgggtttattccaacacacgacgctgctcacggattcgtgcccggcagatccgccgttactggagctagcaggcacacagggaaaaatgtggtcatctcagccgatctgactagtttctttgcacgcgtatctggcgcccgcgtttatggcaccttgcggagggcagggatccccgaaactgtcgcttacactattaccggactgtgtactacagccgcgccaccccgcgtaatagcagccatgccgcccggaggaaacctggacgagcgcttcgcgttacgaaaggcgcttgctgccacgcacttaccccagggtgccccttctagccctatgctggcaaacctcgccattcgtaggctggatgccagactcgagggatggagttcagcggctggggccgtgtataccaggtacgccgacgacctggcattttctggtggaggtgcattggcacggcgggctgacgcatttgtgagaggcgtggatcggattgtgacctccgagggccatacacttaattcacacaaaacccgcgttcggggcgcctctctcaaacagacagtcacgggcgtagtcgtcaacaagcataccaatatgagtaggagagatatcgacgagctgaaagccatattacataattgcgtggtcaacggccccgacagtcagaatcaaggcgcccaccccgacttcaggagccacctactggggcggctgtcctggttggaagcggttaaccccgctagggggcagaagcttagagtggagtttggccgaatccactggtga

SEQ ID NO: 12862 - RNA, 1386 nt, synthetic construct
  source 1..1386: mol_type = other RNA
atgacgtccaaactgaggggtgccacacccgcagctctggtactggccagacgtccgcacccatcctctagcgaggtggcctccacactggctctggctttcctcagtagcaaattctggcacgccacagcgcttagtgaggctggctcggcggtattgggtgcgcgtagacgatggttgggcccactggtgcgggagacacttactgtttatcgcgaagctccccatgatgcccccagggctctgaccgcattcatcgccgctgctgatgtgttccgcgctgccgtcgctcacgctgatgcttctggcgtccctatcgggcttgcccaccatcggattcctttgacccgagccagacctgtgccaggagttgtgcctcccctgggcaccctcgctgaacttgccgactttctggagctccccattggcgacttggactggtttgccgacactaggcagtggaacaggcatgcccctagcggcgcacttcagcactaccgctatgaatggagagcacgtgcagggcggactcctcgtctgctggaaataccaggcgcgcgcttacggtcagctcagaggaccctgctcaccggggtaatcggcctcgtgcccacacacgatgcagcccacggttttgtgcccggcaggtctgcagtgaccggagcaagcagacacaccggcacggatgtggtcatcagtctggacctgactaccttttttgcacgcgtgacaggggcgcgaatatacggtacgctgcgcagagcaggattgcccgaagccgtcgcctatactatcaccgggctatgtacaactgcggctcctccacgcgttattgcagctatgccggcaggtggacggccagaggaaaggttcgccctgcggcaagccttagctgccacccatcttccacagggagccccttcatcacctatgctagccaatctggccttgaggcgcctggattccagactcgccggatgggctgctgccgcttctagcgtctacacccggtacgccgacgacttggcgttctccggagacttaactctcgcgagaagggcagatgccttcgcccgaggggtggagagaatcgtcgcagcagagggacaccttgttaatccgcataagacacgggtacgccgcgccagtgtgaaacagactgttacagggattgtggtcaacacgcagaccaacatgtcccggcaggagagcgacagactcaaggctataatccataattgcgcacggcatggccccgaaagccaaaacaggggggcacacccagaatttcgagcccacctgctgggccgactatcatggctcgagacactcaatcccgcccgggggaggaagttaagagccgagttctctaggattcattggtga

SEQ ID NO: 12863 - RNA, 1404 nt, synthetic construct
  source 1..1404: mol_type = other RNA
atgtctgccggtgctgccgtgcctaggccaactccagccgcactcgtgttggctcgccgaccacatccctctaccgatgccctggctgctactctggccgctgcactcctcggcgcaaagacctggagcaagactgagatgatcgatgctggggcacacgttctcggagccagaaggcggtggttgggacctctggccacagagatcctgagctcctacccccgcgcaccaacggacagtccgagagagcttgcggcacatattattgactgtgccgctttctccaacgccatcgaagccgccacctcaaggggggttcccaacattatcgcgcattaccccctaactccccctctgaccccacctcaagccagagccgttacatccgcgttaccgcggcttgacacacttggcgacctcgccgcctttttaaccctgacccccggcgagctggattggtttgccgatacgggccagtggaatcggaccgcacgacctggggcgttacatcactatagacacgaatggagggtgcgcccaggtagaacacctcgtctgctggaagtccctgggaccaggttgcgcgcactccagagaaccttactgcatgacctccttgggctgattccaactcatggggcagcccacgggtttgttccaggacgttctgctgtgacaggcgccgctcgccatacaggaactgctgcggtgatatcactcgacctgactacattctttgctagcgtgacaggaagtgcaatctacggcactctacgccgagccgggtacccagaatcagtggctcactcaatcacaggcttgtgcacgcatgctgtgcccccccgtgtaatagccgctatgcctccaggaggtgatcccgccgaacgagccgctctgagaagagccctggctgcaccccatctacctcagggggctcccagctctcctgtcttgggcaacctggcattgcggcggctggatgccaggcttgcaggttgggcagacgccgcagctgctacctataccagatatgccgacgatctggcgttcagtggcggtacagacctgagacggagggccgacgcttttgttaggggcgtcacccgcattgcactcgctgagggccacactgtcaaccctcacaaaaccagggtccgaccggcatcggtacgccaaagcgtgacgggaatcgtggtgaatgagcaccccaatattagccgcgtagatgccgaccggctgaaagctatcctgcacaattgcgagctgcacggtccggctggccagaatagggcaggacacgccgatttccgtgcgcaccttctcggacggatatcctgggtcgagcagttaaacccagaacggggcgccaggcttagagcgtccttcggacggattcgatggtga

SEQ ID NO: 12864 - RNA, 1254 nt, synthetic construct
  source 1..1254: mol_type = other RNA
atgattgaggttggagccagagccttgggcgccagaagaagatggctggggccactggcctcagagatcctgagctcctatcccagggccccaaccgacgctccaagagagctggccgcccacataacagggtgcactgccttttctaatgccgtggaggaagcgacaagcaggggcgtgcccatcaccatcgcctcttatcccctgacaccccctcaagcgggcgctgtaacaagtgctcttccccggctcgataccctgggagacttggccgcattactaggcctcaccccgggcgaactcgattggttcgcagacactggccattggaatcgacgggcccgcccaggtgtcctacatcattatcgctatgagtggagggctcgtccgggaagaactccgcgacttcttgaggtgccagggactagattacgggccctccagagaacacttctgaacgacctgctagggttgattcccgcgcacccagccgcccatgggtttgttcctggaaggagcgcagtgacaggcgcagcacgccatacgggagcagctgttgtgatttcgctcgatctgacatctttcttcgcctctgtgtccgcacagaatatctacggcaccctgcggagagtcggttaccctgaagcggtggcctactcactgaccggtctgtgcacacacgcagtcccgcccagagttatagcagctatgcccccaggaggagatcctggtgagagggccgctttacggcgagctttggcctccgctcacctgccacaaggtgctcccacctcccctgtgctcgggaacctcgcaattcgacgcctggacgccaggttggacggttgggctgaagctgcagaggctacttacacccgctacgcggacgatctggcctttagcggaggcgatgctcttcatcggcgtgcagatgcgttcgtacggggcgttaccaggttagtaacggccgaggggcacaccgtcaatccccacaagactcgtgtccgccctgcgtcagtgcggcagagtgtgactgggattgtcgtgaacgcaaggcctaacctcgtgcgcgtcgaagccgaccgccttaaagcaatcgtccacaactgtgtagtgcacggaccagccggccaaaataggggcgctcatcctgacttccgagctcacctgctgggccggatcagttgggtggaacagctcaaccctcagcggggggcacgtctaagggctacgtttgcccgcatcaggtggtga

SEQ ID NO: 12865 - RNA, 1176 nt, synthetic construct
  source 1..1176: mol_type = other RNA
atgattcggggccataccccccacagttcgacggctgacgtggcatcagctttggctggggccttcttggctgcagatgcctggacagaacgggatctggttgccgcaggtgcccacgttttaggggccaggaggcgatggcttccaccactcgtgcgggagacacttgctgcgtatcgccgcccacctgtggatgcccctagagaactcggcgactttgtcgaaatgacagctgcgttcggactggcagtcgttgccgctcacgatcgacggacccccattcgcattgaacatcgggtattggtcgccgctagagccgtaccagccacacctgccgtgcctagggtggacggactggacgacctcgcagacctgctgggcttaacacccggcgagctcgactggtttgcagaccgccgccactatactcgtcgtgccaccgatacccggctgcagcactaccggcacgaatggcggactcgtccacagaggactcctcgcctgttagaggtgcccggatcccgcctggtggcagtacagaggacagtgctggccgagctgcttgggccactaccagtccatggggccgcccatggttttgtaccggggcgaagcgcgatcacaggtgctgctagacacaccggcgcagcagtggtgatcgccctggatctctctactttctttagtcgggttaccgccggcagggtctatgccaccttgcggagagcaggatacccggaggctgtggcccatgccatcactggcctgtgcacccatgcagtgcctccgagggtcattgcggccatgccttccggaggcgatgccgatgaacgctttgctgcaagaagagcgctcgccgcagctcacctgcctcaaggtgcacccacatcccccatgctagcgaacctgtctgtccgtcgattggacgcccgacttagcgcatgggctgagagagtggatgccacctacaccagatacgctgacgacctcgctttcagcggtccaccggcccttgctcgaaggtcagacgctttcataggaggaggggagagaatcgttacggccgagggccaccccccaaatgcaaggaaaacgcctgggaggccagctagacccccacctagaggaccaggcaatgcggggacagatcccccccatactcctcgcactggctga

SEQ ID NO: 12866 - RNA, 1113 nt, synthetic construct
  source 1..1113: mol_type = other RNA
atgcgtgccgcactgcgcagggccgtaaaacgcggaactccggtaatcattgcacaccacgttctggcagaaccggtcgctcccgcctctgcatcccctgtacctcggctcgccagtgtgaccgagctcgctgctgccctgcacctggagataggcgaattggaatggttcgccgatacccgactacagcttcggcgggcgtcatctacgaggctccagcactatcggtacgagtggcgagaaaggcctggtcgcctccctcgacttctggaggtgccagggaggcgtttaagggccgcgcaacgcgctgctcttgatgctgtgatagggttagcccccttgcacgatgccgcgcacggctttgttccgggaagaagcgctcgcactggggctgaaaggcatgtggggtccgaggtggtcatcgctctcgatctaacgacattcttcgccagagtcaccgctagagacgtgtaccgcgccttgcgtgctgagggtctgccagaatctgtggcatatgtgctgaccggcctgtgcactcatgcagtcccatatcgggttgcagcccatcctccacgcggaggagacttggatgagagatttgccctgcagaaggccctgacagttccccatctaccacaaggcgcccccacttcccctgcactggctaacctgtgtgttcgtcggcttgacgcccggcttgcgggttatgctgaagccgccggagccgtgtacaccaggtacgcagacgatctcgctttttcgggagggcctgccttagctagacgagcagacgcttttgcacggggcgtccggagaattgtggctagcgaggggcacgagctgaatgaccataaaaccagaattcggacagccagcgtcaggcagagcgtgactggcatcgtggtcaacacacgccccaacgtgacaagagccgagtacgacgcgctgaaggccaccttgcacaattgcatcagggatggcccagcaagtcagaacagggcgggtcatgcagagttccgcgcacacctcctgggccgaatctcctggatcgcttcactcaatcccgccaggggagaaagactgcgagccgagttcgacagaattccctggtga

SEQ ID NO: 12867 - RNA, 1095 nt, synthetic construct
  source 1..1095: mol_type = other RNA
atgcgagccgccctagctgacgctgcacacagagggcgtccactgggtattgctcaccatctgatcgcagaaccgcccagcggtacacatcctggtagcttagctgaactcgccgccctcctggaactcacacctggcgagctggattggttcgccgacacacagctgagacagaggagggcccccgatggaccactgcagcactaccgctacgagtggagggagaggccagggagattgccccgactcttggaagtacctggcagaaggctgagagccgcccagcgagttctgctcgaggaagttgtaggcctgctcccactgcatgacgctgcccacggctttgtgccaggtcgctccgttcgaaccggagccgaaagacacctgggccaggaggtggtcattgctttggacctaaccacttttttcgccagagtgagcgcacgcgatgtgtaccggctgttgagaggggcctctatccctgaagcggttgcatatacaattaccgggctgtgcactcacgctgtcccctatagggttgctgcacaccctcctcgcggaggagatctcgacgaacgcttcgccctccagaaggcccttacagtcccccatttaccccagggggctccgacctcacctgctcttgcgaacctgtccctgcggaggctggatgccagactggctggatatgcagctgcggctggcgcagcatacacgcgttatgccgacgatcttgccttttcaggaggccccgcattagccagacgggctgacgcatttatacggggtgtggagcgtatcgtggcagcggagggccacctaatcaacgcacataagacccgagtccggaaagccgctgtgcggcaaagtgtgactggggtggtcgtaaatagggtcacgaatgtgactaggaccgagtttgacgcgcttaaggcaactttgcacaactgtgtggtccacggcgctgcctctcaaaacaggggcgcccatccagatttccgcgcccatcttctcgggcggataagttgggtggcagcgttgaatccagcccgcggagccaaacttcgggaggagttcgaccgcatccattggtga

SEQ ID NO: 12868 - RNA, 1380 nt, synthetic construct
  source 1..1380: mol_type = other RNA
atgaaggaaacaacagtgtctgccgccgcccttgtacttgctcgtcacccacacccgtctgtacccgcactggccacagcactaggacacgccttcctggccgccgaccaatggactgcgagggagctgattgcatccgcagccagaactttgggtgcccgccataggtgggtggggcctttggttgccgaggtgctggctgcatatcaccggcctcccatcgatgctccgcgcgaactagccagcatgatcgaggcagctgaggcttttcgggctgccgtggctcgagctgagcagagaagagctccgatacgaatcgcccactacgcagtggaacctggaacggcaaggcctatgcccgcaggtgttccccgtatcaacggccacggggcgttagcagagctcttgggattaagcccaggcgagcttgattggttcgccgacaccgcgctctggaatagacgaggcacaagcgagcggttgcagcactaccgttatgagtggcggcagagggaaggacgcgtaccgagactgctggaggtgccacagcggagactcaaaggggtacagcgcagtgtgctggcatccatcctcggccccattcctgcccatgacgctgctcatggctttgtgccagggcgatctgccgttagtggtgcggccttacacaccggcaacgatgtcctcattgctctcgatctgtccacctttttcgctcgcgtcccagccaggcggatattcggcaccttgcgccaagctggactgcccgaggctgttgcgcataccgtttcaggcctgtgtactcatgcagtgcctccaagggtgatagccgcaatgcccaggggaggcacagcggaagatagatttgccttgcgaagggccctggctacgcctcatctgccccaaggagcccccacttcaccagcactggctaacctggcaatccatcggcttgacgctcggctttccggttgggccgatgctgctggggcaacctatacaagatacgcagatgacctcgccttttcagggggtcctccacttgcccggagagctgacgccttcgtccgaggagtcacccgcattgtggaggccgaaggccactctctgaaccgcctgaagactagagtgcgtgcctcgagtgtccggcaggtggtgaccggtattgtcgtcaatgaccggactaatctcccccgagccgaatttgaccgccttaaagccgtcctgcacaattgcgtgatgcatgggcctcactcccagaatagggccggtcacagcgacttcagggcgcatctactcggcagaatcagctgggttgaagcgctgaaccctgggaggggtccacgccttagagaagaactggagaggattcgttggtga

SEQ ID NO: 12869 - RNA, 1476 nt, synthetic construct
  source 1..1476: mol_type = other RNA
atgaacgagacgggccccatcccaggggacgatgatccaaccggaccagccacagctagacggaggggaggcaggcatgtgcctagccctaggtcgacacgcggcagtgccactctcggtagagaacccgcacccggtgcaccagggttatccctgttgctcgcatacgcattccttgctgccccggactggaggcaggaggaactgatagccgtaggtgcggtgctccttggagcccgtagacgttggttaggccctctcgctcgcggcgtactaacagggtaccctcgaagaccagtgggagccccgagggagctggctagatggatcgctgcccagccagcctttacggatgcaatcgcccgtgcatcagctcggggcatgcctatttcccctgcccggtacctaaccgccgtgactgaaggtccggctccagctggttctgcacctggctctgccgtggctacacctggcacaagagacttggcctggctggctcgggaactgaggcttacccccggggagctggattggttcgccgacactcgccattggaataggcgtgccgcaagccgtgcactccaccactatcggtatgagtggagggtcagacccggtcgggtacccaggttgctggaagtccccggtatccggctccggacagttcagcgacacgttctggaccacatcttggctcctatccccctgcacgatgccgcccatggctttgcacccggacgatcagctaggaccggtgccgctgttcacactggggctgacgtggtggtcgccttagaccttgtgtccttcttcgctcatattaccccagggcgcgtgtttggggtatttcgacaagccggcttccctgaggccactgcgcatgcactcacgggcctgtgtacccacgaggttcccgacgccgtcctgcaatccatgcccgatggtgggggaagtggcgagcgctttgccctccgtcaggcacttagggcagctcacttgcctcagggagctccgagcagcccagccttagcaaacctggccgtgcgccgcctagacgctagactagccggatgggctgcagcggctggaggaagttatactcgctatgctgacgacctggccttcagctcacccgcacctctggccagacgagctgatgcgttcatccggggggttgagcgcattgtggtcgccgaaggacatgccgtgaatcgccccaagactagagtgtccggagcgtctgtccgccagaccgtgacaggcgtcgtggtcaatgcgaggaccaatgttgccaggaccgattacgacgcactgaaagcaattttgcacaactgcagagtgcatggcccagaatcacagagacgggggcaagccgatttcagggcgcacctagcggggcgaattgcgagagtcgaatctctgaacccacagcgaggccggagacttcgggatgcatttgagcggatacgctggtga

SEQ ID NO: 12870 - RNA, 1479 nt, synthetic construct
  source 1..1479: mol_type = other RNA
atggatcgcaccgggccgaccacaggagacgatgaccgaatgaggccagccacagctcgtgacggaggaggtagaggcagaccctctccaaggcccactcctgcaagtgctaccctagccagggaaccagcccctggagtacccggactctcccttctgctggctcacgcctttttagccgcgcctcagtggcgacgcgaagaactcatagtcgcaggggcggcacttctaggagctaggcggaggtggttgggtcccctcgttagaggcgtgctgagtgggcaccctagaccccctgatggagcacccagagagctggctcgatggatagcggcgcagcctgctttcacggaagctgttgccagggccagcgctagagggacacccatcggtccagctcaccacttaccagccgtcccagaggaacgcacccccttgagaaccactgcctccgcagatgctgtgagaaccccgggaactagggacctggcatggctggcccgcgaactcagactgacaccgggcgagcttgattggttcgcggatacccggcattggaacagaagagccgcccatcgagccttgcaccactaccggtatgagtggcgagtaaggccaggtcgcgttcctcggctgctcgaaattccgggcatcagacttcgcaccctgcagaggcgcgtgctcgaccatattctggccccactccccttgcacgatgctgcgcacggctttgttccaggacgttccgctaggaccggagccgctgtccatacgggagctgatgtggtgattgcactggacctggtagccttcttcgctcgggttcctccgggacgggtctttggcgtgttccgccaggcaggcttccctgaagccactgcccatgccctgacagggttatgcacccacgcggtcccagacgctgtgttacgtagcatgccagacggaggctcagcaggggagcgttttgcactaggccgggcccttaggacggctcatcttccccagggtgccccctcttcccctgctttggccaacttggccgtgaggcgcctggactctcggttagcaggttgggctgcagcagccggcggtacatatacccgttacgcagacgacctgagcttctctgggcctgccagtctcgcacgaagggcagacgcgtttgtccgcggagttgagcgcatcgtggtcgccgaggggcacactgtgaacagactgaagacacgcgtgggtggagcccccgtacgacagacagtcactggcattgtggtgaacgtgcgtactaatgtggcccggactgattacgatgcactccgagccatcctgcacaattgtcgggtgcatggccccgagtcacaaagacgggggcaagctgacctcagggcccatctagctgggcgcatcagctgggtcgagtcactgaatcctcagcgggggaggagacttcgggatgcctttgagcggatctcgtggtga

SEQ ID NO: 12871 - RNA, 1455 nt, synthetic construct
  source 1..1455: mol_type = other RNA
atggacggtgcagggccacgtgcagtacgtggaccagctaggccacggcggggaagaggtgcaccagaaggccctacttccgcaagcgccacactggctagagaaccagctcccggagttccgggccttgcgttcctgctggcccatgctttccttgccgcaccagactggcggagggaggatttggtcgctgccggtgccgctttattgggcgctcggaggcgatggctagggccattggtgaggggcgtcttagcaggctaccctcgtagacccgaaggagcccccagagaactggccagatggattgccgctcagccggctctcacagacgcagtcgccagagcggctgcaagaggcgagcctgtacggccagctaggtatctcccacctgcccctgaggaacaggctttcggggatcgctcagcgcctggaggtgtggaggcatctggggcacgcgatcttgcttggctggctcgggaggttcgactaaccccgggggagctcgattggttcgccgataccagacactggaataggcgagccggagcccctgcgcttcatcactaccggtatgtgtggcgtgcgaggcctggaagagctcccagactcctggagatacccggcatcaggctccgcacagtccagcgtagagtgctggatcacctgctggccccgatacctctgcatgaggcagcccacggattcgtgcccggaaggtcagctaggacgggagctgccttgcataccggggctgacgtcgtgattgccctcgacctcgtctctttctttgcgcgagtgccccctggacgagtctttggggtgtttcgccaggccgggtttcctgaagccactgcgcacgccctaaccggactgtgcacacatgaagtgcccgatgccgttctgcgcgccatgccagatggcggttccgcagaggacaggttcgcactcgctcgggccctcagaaccgcacatcttccccaaggtgcaccctcgtcccccgctttggcaaacctagccgtgcgtcgcttggacgcccgcttatcaggatgggctgcagccgcaggtgggagctacactcggtatgccgacgatctggcgttcagtggtcccgctgatcttgcgaggcgagcggatgcatttgttcgcggcgttgagcgcatcgtggtggccgaaggccacactgtgaatcggcgaaaaacccgtgttcggggtgccgccgtaaggcagaccgtgactggcgtcgtggtgaacgcccgcacgaatgtggcccggacagactacgacgccctgaaggcaatcctgcacaactgtagggtccacggcccagagtctcagagacgggggcaagccgactttcgagctcacctggctgggcggatcagctgggtagaaagcctgaaccctcagaggggccgcagactgagagacgcctttgagcgcattagttggtga

SEQ ID NO: 12872 - RNA, 1467 nt, synthetic construct
  source 1..1467: mol_type = other RNA
atggacgacaccgagtcccttccagacgatggtggatccttccccgctagagggggccctgttagggcatccagagggactgctgcggctcgcacactggcaaggacgccagcaccaggtggtcctgggttggcgtttctgctggctggtgccttcctgacagccccagcatggcaacgtgaggacctcctggatgcaggggccgcagtgttaggaggcaggaggagatggcttgggccgctcgtcagagcggtgctagctggatacccccgtagacccgatggtgccccacgagagttggcgaggtggattcgcgcccagccagtgttcacagacgctatcggcagagctgccgcccgaggagtaccgatcactcccgcacggtatttaaccgccggtgcacccgaggagggacatagaccgagccgcgttgatctgggtactggtgcacctgctgctccaggagccggagatttgggcaggcttgccagggaactgcgactgaccccgggggaacttgattggtttgcggacaccaggtcctggaatcggcgggctcctagtcaggctctgcgacactaccgctacgagtggcgatctcggcctgggagagtgcccagactgctggaagttcccggaatccggctccggaccgtgcagagaagagtcctcgatctcgtcctggcacccatccctctgcatcctgccgcccatggcttcgtccctggcagaagtgccagaacgggcgctgccctacatgcaggcactgacgtggtcattagcctggacctcgtgagcttctttgcccacgtgagtcccggcagaatcttcggcgtcttacgccaagctggctgtcctgaggctaccgcccacgtcctgacaggcctgtgtacccattctgtgccagaagctgttctgcgagccatgccaggtgggggcacacctgaggaacgatttgccttggcacgcgctcttcgtgcagcccacttgcctcagggggcaccatcatctcccgcccttgccaatctcgccgtgaggaggcttgactcacggctggctggatgggcggaagctgcaggaggcacatatacacggtatgccgacgacctcgccttcagcggacctgctgggttagcacggagggcagatgccttcctgaggggggctgagcgcatagttgccgctgaggggcacgaggtaaaccggcacaaaacccgagtacgctcggctgcgacgcgtcagactgtgactggcgtagtggtgaacgcccacccaaacgtggcacgggctgactatgatgcgctgaaggccaccctatacaattgcttggttcacgggcccgaatcacaaaggcggggacaggccgattttcgtgcccatctcggcggccgcataagctgggtggagtctctgaaccccctccggggacgcaagttgagggaagcctttgatcgcattggctggtga

SEQ ID NO: 12873 - RNA, 1680 nt, synthetic construct
  source 1..1680: mol_type = other RNA
atgctcggctggcaacgcagaataccagcggaggcggaacatgtgcacagggcccgatcatcgcctggacttccccgtgggacccagacagaccaacaccgtgcaccccaagcccctgactgcgcatccaggtcttccgctcctgagcaacgggaacaagtcggtcgtgacccctctccggccgataggcagggaggaaccggagaaggtggtcacgggggcaggcgaagcaatgacgggaggcagcctgatgtctcctcccggaccagaagagcgggacctccaccaacgaccgctggtgcagcccttgcacgtcttccaacaccgggggggccaggtttagccttcttactcgctagcgcctttctcgactccccctcttggcagagagagcacttggtggaagcaggggccgccgtattgggagccagacgaaggtggctgggacccctcgtacgcagtgtcctgagcggctatcccagaagacctgacggagccccacgcgaactggccagatggattgcagctgagccggtgttctcagatgccgtcggtagggccagagctcgacggagtcccatcagacccgcacgcttcctcgttcaggaggactctgaaagagccgacccacctgagcccgttccacctgacgcagcagtggagagcggacggacctcaggcatcaaagatctcgcttggctagcgagagagctgcgcctgactcctggcgagctggattggttcgccgatacccgccattggaacagaagggcagggtcggccctgcagcactaccgatacgtgtggagggtcaggccagggagagttccccgactgctcgaggtgcccgggataagactgcgaacagtgcagcgccgcgtgctcgatctgctcctagctccgatgcccttacacggtgccgcacacgggttcgttcccggaagatccgctcgtactggagcccgggtccactctggcagtgacgtcgttatcagcctcgatctggtcagtttctttgcccgggtgccccctggccgagtatttggagtgttccgccaggagggctttcccgaagccacagcccatgtgctgaccggcttgtgcacccatgctgtgccagaaagggtattgagggacatgcccgatggcggttccggtcaggaacggtttgacctggcccaggcgttaagggcccctcatctgcctcagggagctccttcttcaccagcccttgcgaatctggctgtgcggcgcctggatagcaggcttgcagggttggctgacgctgcagggggtcgttatactcgctacgccgacgacctggcatttagcggtccgggagccctgactcgaagagctgatgctttcattcgcggcgttgaacggattgtggaggcggaggggcacagtgtgaatcggaggaaaactagggtgcggggagcttccacacgccagacagtgacgggggtggttgtgaacgtacggccaggcgtcgcacgccctgattatgacgccctgaaggccactcttcataactgtgtcgtacgcggtccagagtcacagaggcggggcagagctgatttccgggctcatttggctggccgggtgagctgggttgagtcactagacccgccacggggcaggaagctacgtgaagcatttgatcagatcgtctggtga

SEQ ID NO: 12874 - RNA, 1464 nt, synthetic construct
  source 1..1464: mol_type = other RNA
atggtcagcgacgagcgtggccatcatagagggtcagacggagctcctggtgctccaggacgtccagcactgatctctagagccacagcccccacatcagccgcctccagagctctggctcgcacaccagatcctgggacagcagggttggccctacttctggcggaggcatttctcgaagcttccgcctggcagagagaggagctggttcgggtgggcgccgagttgttaggtgccaggcggagatggttagggccgctgcttcgaggtgtactaggcggctacccacgtagaccgggtggagcaccgagggagctggcaagatggatcgaagcccagcctgtattcgtggaagctgtttcaaccgcccgggcagctgggaggcctattgttcccgtgcgctacttggtcggtgagcgcgatgggcccagaactccagaggaccctgaggcaagcgaagcagagtgtagggacttggcctggctcgcaagggagcttggcttgcccccaggcgaactggagtggttcgccgacactcgccactggaacagacgggcggggcttctcttgcagcactatcgatatgtatggcggtctaggcccggtcgcgtacctcgattactggaggtgcctggcattcggctcagaactgttcagcggcgagtcctggaccggcatctgttaccaatccccctgcatcccgccgcccatggatttgtgcctggaaggagtgcgcgaagcggagcgactcttcacacggggtctgccgttgtgataaccctggacctcgtctctttttttgctcgcgtgaccccaggaagggtgtttggggttttcaggcaagccggttatccggaggcgacagcccacgtgctgacaggactctgcacccacagtgtacccgaggccgtgctcagggcaatgcccgatggaggcaccgctgaagaacgcttcggcctgacgcaagctctacgcgcccctcacttacctcagggagctcccagttcacccgcccttgctaatctggccgtgcgccgactggatgctcgtcttaccggatgggccgaggctgccggaggtgtttataccagatacgccgatgacctggctttctccggacccgccgaattggcaaggcgagctgacgcgttcgtgagaggggctgatcggatcgtgactgccgaaggccacgctgtgaacccacggaagacacgggtgagggggtcctcggtcaggcagtctgtgactggcatagtcgtcaatgcccgcccaaatgtcgcacggaccgaatacgaagtcctgaaagcaattctgcacaactgcacgctccatggccctgaatcccagagtcggggccaaggcgatttcagaagccacctcgcaggccgcatcgcatgggtgtccagcctgaacgcgctgagagggaagaaactccgcgatgcatttgagcgtattagctggtga

SEQ ID NO: 12875 - RNA, 981 nt, synthetic construct
  source 1..981: mol_type = other RNA
atggcccgggaactacgcttgacccccggagatctcgactggttcgccgacacgcgccagtggaatagacgcgcggtgccagtgctgcagcattatcgctactcatggagacaacggcccggacgagtacctcggctgttggaggtcccaggtcccagactgcgggtggtccagaggaggctcctcgacagaatcctggctcctctgccattacatcccgccgcccatggatttgtacgggggcgatcagcccttacaggagcggcacttcataccggggcagacgtcgtgatttccctggatctcacggcattcttcgcacacgtggttcctggcaggatttttggcgccctgaggcaggccggatatcctgaggccactgcgcatgtcttgacagggctaaccacacactctgttccagacgctgttctgaggtcgatgccggacggaggtggcccagatgagaggttcgctctccgtagagctctgcgaacagcccacctcccgcaaggtgctccttcatcccccgctttagcaaacctggccgttcggcgccttgacgcaagactgacaggctacgccgaagctgccggcggagtgtacactagatacgccgatgaccttgccttcagcggttccgcagatctggctcgcagggctgatgcgtttgtgcggggtgtgggccggatagtcaccgcagaagggcttgccgtgaacgctcgaaaaactcgtgtccgcggcagcagtgtaagacagtctgtcaccgggatcgttgtgaacgctcaccccaacgtggcccgcactgaatatgataccctgaaggccatcctccacaattgcgcattacacggccctgaaagtcagaggcggggaagggcagagtttagcgatcacttggctgggagaatcgcctgggtgtccgccttgaatgcgagccgtggcgagaagctgcgagacgcatttgagaggatttcttggtga

SEQ ID NO: 12876 - RNA, 1284 nt, synthetic construct
  source 1..1284: mol_type = other RNA
atggcaaggcttctggctcgcgccttcctggatgcaccaacctggcagcgggaggatctactggctgcgggagctgatctgctcggagccagacgcagatggttggggcccctcgttcgcacggttcttagcggacatccgagaaggccagccggagcaccgcgagaattagcagcctggattgaaagggcccccgcattcgaagaggccgttgccagagctgcggcagctggtactcctttagcgccctcacactttttgctggaggatgcacctgccgatacacatgacctgggagagctggcgagggagttacgactgacccccggggagctcgattggttcgccgatactagatcatggaatcagaggacaccacagccggcccttcggcattatcggcatgcttggcaagtcagacccggcagaacccccaggctcctggagattcccgggatccggttgcggactgtacagcgtcgggtcctcgacagaatacttacaccactccctctgcatggagcggctcatggcttcgtgcctggtcgaagcgccagaactcatgccgccgcccacactggaagcgacgttgtcattgccctcgacctggtgagtttctttgcaagtgtcccaccagggagaatcttcggagtactcaggcgggcgggctaccctgaagctgttgctcacaccctaaccgggttgtgcacccacgccgtgcctgaacgggttctacgcgcgatgcctgatggcggtacacccgaggaacgctctcgtctgacccaggctcttcgtgctcctcacctgccacaaggggcaccatcctccccagccctggctaatctgtccttgcgccgtctggacgctcgccttgaaggttgggctgaggcagccggcgccacatacacaaggtatgccgacgacctcgccttttctggccccgcatcgctagccagacgagctcacgcatttgtgaggggcgtggaacgtattgtaactgccgagggccaccgagtgaacccaccgaagacgcggatcaggggagctagcgtgcgccaacaagtcaccggggtcgtggtgaaccgacaccctaacgtgcccagaaaagagtacgacgccctgaaagcaatactgcacaattgtcgggtgcacggtcccgaatcccaacggcgaggtagggtgcgctttctcgagcatttagcagggcgcatcgcatgggtggcctctctggaccctcagaggggcaggaagttgcaggacgcctttgatgctatcggctggtga

SEQ ID NO: 12877 - RNA, 1374 nt, synthetic construct
  source 1..1374: mol_type = other RNA
atgaccaacgattataaggccgcccaggtgctggcacatacaccacacccaacccctgcaatcgtcgccactgctctgtctcacgctttcttagccgcacccgactggacagtggaagcgttagttagcgctggcgctgaagtcttgggtgccagaaggcgctggctaggacccctagtacgagccgtggtgtgtgcctaccatcggaagccagcggacgccctccgagagttagctgcacacattggggcctcggagccattcgctgccgcagtagacaaggcccacgaccagaggaaacctctgaggcttgctgcatatgccgtggcagagcctgagctcagagagggaacacaccccgtgcccgaagtagccggactcgagcagcttgccgctgttctgggggtcaaactgggagaactggaatggtttgcagataccagacatctgaatcggcttgcttcccggagttgcctgcagcactatcgttacatgtggagggaacgacccggacgaactccgcgcttgctggagattcccggccttcgcttaagaagcattcagcggaaagtcctgcacggactcctcgccccgataccacttcataatgccgcccatggcttcgtgcctggcaggtcagcttcttcaggcgctgcgctgcatacaggcgcagatgttctgatatccatggatctcttgtcatttttcgcaaatgtgacagctgggaaggtgttcggcgctctgaggcaaagcgggtatccggaagcggtcgcccacaggttgactgggctgtgtactcacatcgtgccccctagggtcatctcatccatgccacctggtgggagtgcagcagaacgcttcgccttgacccaggcgctccggcttcctcacctaccacaaggtgctcccacctccccagcgttagcgaacctagccctgcgccgcctcgacagtagactgcaaggttgggctgaggctgccggcgcaaagtacactagatacgccgacgatctggggtttagcggtggacccgctctggctaggagaaccgagagatttctgcgcggcgcaaagcacatcgccgcagacgaaggacataagctcaatgagagaaaaacaagagtgcgtcctcggagtacgcgccaacaggtcacggggatcgtggttaatcagcacctcaacgcaccccggcgtgagtttgatgcccttaaagccattctccacaactgcatgctgttcggccctgagagccagaaccgagccgatcataccgatttccgcgctcatttgctgggccggattacctggatggagtccctgaactctgcccggagcgttcgattgaggcgtgactttgaccggatctcttggtga

SEQ ID NO: 12878 - RNA, 1467 nt, synthetic construct
  source 1..1467: mol_type = other RNA
atgctgggggctacccagagcgtcttcggagtgaggcatcggtggctgcccgccttagtgcgagaggtgctcgtggtgtttcgcacagcgcccgttgatgcacctcgggaactcgccgccgttatccgtaggtccgccgctttgacaggagccctgagccgtgcaggcgaaagaggcagacccctggccatcgcacactatcccgtgggggaagccgaacaccctgaacccgcaccagctgctgagccagctagagcatccgcctctgctagtgcttctgctcccgaacccgccagggcttctgctagcgcagctgaacctccaccagctccctccgcagccgaaccagcaccagctctgtcaggagcggaacctgcacctgcagcgagtgcgctggtcccagtacccccacctgctttggctctcccgctcgagcctcctttgccacctcctatgccgttaccccgcacgctgcccgctttagcagcacttctggatgtgactgcaggcgagctggactggctcgcggacactggaggttggaatcgaagggccagggagggccccttacatcactacaggtacgaatggagaactagaccaggccgcgttcccagactcctggaggtccctaacgagcggatgcgcacagctcagcgcacactcctcgctgaagtcctggggggacttccgctgcacgatgcagcccatggcttcgttcttggaaggagcgccctgacagccgccggactacacacagggacggatgtggtgattactttggatctggttacgttttttacaagggtcaccgccgggcgggtatatggaaccctaaggcaggaaggcgttccagagcgggtagccctcgctttgaccggcatcgccaccaatcgggtaccccccagagtcattggagccatgccaccgggtggtgacccaggtgagcgtttcgcgttgagacaggcccttgcgactgctcatctgccgcaaggcgctcctacctcccctatgctggcgaacctggccatacgccgcttggactcgaggcttgctgggtttgcacttgccgccgatgcccgctatacccgatacgcagatgacctgaccttctctggtcctctgcctctaagacgccgggccgatgcgtttctgcgaggtgttacccggattgtggtggacgagggccataccgtgaatcgacgcaagacacgggtccgtccagcagccaccagtcaacgggtcactggcatcgtggtgaacgagaggactgccctcccgagagctgagttcgaccgcctgaaggcaattcttcacaactgtgccgagcacggcgccgcctcacagaatagagccgggctggaggactttcgtgcacacctcctagggcggatatcatgggcccgagccttgaaccccgtgaaagccgagagactgcagcgggagttcgacaggatcgtgtggtga

SEQ ID NO: 12879 - RNA, 1599 nt, synthetic construct
  source 1..1599: mol_type = other RNA
atgcgatggtccgccgacgaagtggacggaagccgaagggatccaccatcacctgggccaccaagggggacccaaaccgattctggaacttctccccaggcatcccatcggacaagtagcggcagaacgcctgcccagacgcataggagctcagccggacataggtctactatccgtgctccaagacctactgccgcggcagccgtccttgctagaaggccaaccgctagcgccggtcaggttgcgacagctctggcactggccctgttagcagccgctgattggacaccggagggtatgcttgccgttctgcagtccgtattcggcaggaggcacaggttccttccggtcctagtccgcgaggtgcgtgcagtgtacagaacagctccacaggatgccccaagggaactcgccgccgtgattagacagtcggctgccctgaccgacgcactggatagagctcgggcggctggcagacccttggctatcgttcatcaccccgtgagccctggatcggaggatcaccgggagagcgcattgccacacgctcctgccgctctgtctgctccagctcccagtactgccgcgcctccacctaggaccttaaccgagctcgcggctctcctggatgtcactcccggagagctagactggctggccgacaccggtgggtggaataggcgtgctcctgccggccctctccatcactaccggtacgaatggcgaagtaggcccgggcgcgtacctagactcctggaagtgcccacagaaaggatgcgcgcagcccagcggatcctccttcacgaggttttcgccctccttcccctgcatggtgccgcacatgggttcgtgcccggaaggagcgcattaactgcagcgcgtctccacacagggcgcgatgtggtcatagcacttgacctggtaaccttttttacccgcgtgaccgctggacgcgtttatggcgcattacggcaagaaggtacccctgaacgcatcgcactggccctgaccggcttagccacaaatcgggtgccggctagagtcattggcgcaatgccgcctggcggtgaccctgatgagcggttcgctctccggcaagcccttgcagcagctcatctaccccagggggccccaacatctcctgcgttggccaacctggccattcgccgcgtggactcccgattggccggatatgcagaagccgcagatgccgtatacacacggtatgccgacgaccttactttcagtgggcccgttgccctgggaagacgagctgacgcttttatacgcggcgtcactcggattgtggaggatgagggccacctggtgaaccgacagaagacgcgcgtcagacccgcagcgacttcccagagagtcaccggaatcgtggtgaatgagcacacggctctccccagagtggaatttgatcggttgaaggccattctacacaactgcgcggagcggggccccgaatcacaaaatcacgacgggcactccgactttcgagcccatctgctgggccgattgtcatgggcccgcgacctgaacccgtctaaaacagagagattggaacgtgagtttgcacggatcagatggtga

SEQ ID NO: 12880 - RNA, 1599 nt, synthetic construct
  source 1..1599: mol_type = other RNA
ccgacaccagcaagcctggctgccgcaggtgtgccttccccttcatctgcacgagccgctccggtgagcccaggaagtggagtcttagcccgcagacccgtctccacgcccgatacagtagcgaccgccctcgctcttgcattattggccgagggcgagtgggcaggggaaaggatgatagcccgggccgcaactgtctttggcgttcgccaccggtggctacccagactggttagggaactcctggccgtgtatagacaggcacccgaaggatctccaagggaactcgcggctgtaatacgacggaccgcgtcattcacagccgcgctcgaacacgcaacggaagttggaagacctttgaccattgtatcgtatcccgtggctgctgacggcccacccaggttaagtcccgctctgtctcctcctagtgccgccgttgacggcattccccttgtcgccgccagtaacccacgcgatccgaggcacggtactgcaccagccgccttggctacagctgcaggacccgcagcactcgctacagcaactggcccggcagcactcacaccagctgctccaccccgagggctagctggacttcgcaccctggccgacctggctgaactgttgggcgtgacaccaggcgagttggattggctggcggacgtgggggcatggaatcgcagagcaagccccgggcctctgcatcattaccgctacgaatggagagcaagaccagggagggtccctcggcttctggaggtaccttcagcgcgcatgcgttctgctcagcgcacgctgctgcatgacgtgtttgccctgctcccgctgaatgacgctgcccacggctttgttcccggaaggtccgcagttactgcggctcggctgcatactggtgcggctgtggtggtgacgctggacctaaccacctttttcgccacagtgaccgccggcaggatcttcggggccttaagacaagccggggcaggcgaaagggtggctttagccctgaccgggatcgctaccaatcgggtcccccctcgcgtgatcactgccatgcctccagggggtgacccagatgaacgagccgccctacgacgtgccttagcagctgcccatcttccacagggaggccccagctcccctgcacttgctaacctggctctgcgacgcctcgatagcagactggctggatatgccggggctgctggtgccagatacaccaggtacgccgacgacctcactttctcaggcggtacagatctccgaaggcgggcggatgctttcgtcgtggccgtacgtaggattgtggaggaggagaaccacaccgtcaacctgcgcaagactagagttcgtcccgcggccacttcccaacgggtgacaggtatcgtcgtgaacgagcacaccgccctgcctagagcggagttcgatcgtctgaaggccattctccacaattgcgctgagagaggacctgcaagcgagaatcgggccggccacgacgattttcgcgcccatctgcttggccggttgacctgggcccggtctttgaaccctgccaaagccgagaggctccagcgggagtttgatcggatcgcctggtga

SEQ ID NO: 12881 - RNA, 1599 nt, synthetic construct
  source 1..1599: mol_type = other RNA
atgagatggagcgccgacgaggtggacggctctgatgctgacccctcatcaccggggctaccccgaggtacacagatcgattcagggactaccagtcaggcgcctctgagaacaccctctggacgtgccccagcccttcagcacaggtccagtgcaggccatagaacaccccctccccccacaccagcaacacctgcatctgctgtgctggcaagaagaccgcaaccgagcgctgaggccgtcgcaagtgcgttggcgttggtcctgttggctccaccggctgcaccagactggacaccaacggggatgctgtccgccctgcagggagtgtttggcgctagacatcggtggctgcccgcccttgttcgggaagtgcgcagcgtctacaggactcctcctcaggatgctccgcgcgaacttgccgccattattcggcacagccagccattcctggatgcggttggaagagccgaggcccgtggtagaccattagcagtcctgagatatcctatcacggccgaagcacccgctcaacctccagttgctccagggccaacccctgccactcctggtcctatacccgccactccagctgcgttagctgccttgctcggtgtgactcccggcgagctcgactggttggctgacgtgcgggcctacaatcggcgtgctagacccggtgccctccacctataccgatacgaatggaggttaagacctgggcgctgtcctcgcctgctcgaagtacccacggaaaggatgcgccgagtacaaaggaccctgctgcacgaggttctggccctactccctgtgcatcatgcggcacacggatttgtaactggtaggtccgccctaaccggagcacgggtgcattctggctcagccgtagtgatctccctggatttgacaaccttcttcgcccgagtaaccgcagcgggcgtttatggctccttacggcgggcagggttttctgaggccgtcgcaaccacgattactgggctgaccacaaacagggtgccccctagagttatctccgcaatgcccccaggaggaggaccggatgagagattcgctctccgtcaggccctcgctaccgctcaccttccccaaggagcgccaacttcccctgccctcgccaacggagccattcgacggcttgacgctcggctggagggatatgccgcagcagtcggggctaggtacacaaggtacgccgacgacctggtgtttagtggccccgttgcacttcagcgcagggcagaggcctttgtccgcggtgtcacacgcctggtggacgatgaggggcacgaagtgaaccccaggaagtcgcgggtgtctccagcctccacttcacagcgagtcaccggcattgtggtgaataccggcagtagcttgccccgggaggagttcgaccgactgaaggccctcctccataattgcgctaccctgggcccagcttcgcagaaccgtgctggagtgcctgattttagggcccacctgcttggccgcataagctatagcagcagcgtgaaccctctcaaaaccaggcgcctgatcagagaattcaattctatcgattggggggtcccacgcgaatga

SEQ ID NO: 12882 - RNA, 1686 nt, synthetic construct
  source 1..1686: mol_type = other RNA
atgcccgctgatgcctcgagacggactgctcacggcaggctgaatcgaagcattgcgccccccaggtgcagaaggtccggatcattcagcagacggattgtgatgggcagacctgccggccatactccagcaccctccttggcagccgtagccgattctctagctgccgcctttttggctgccgcccacccaaaaccagcgagagacagagatcctgctcaaggaagtgatcccacaggtgatcgggaagcagcgagtggtcccgccccaacacagaaccaggacgctccacaggggcaggactccacacagggcacagacctgactggagacagggatcccgcgtttaccatcgcctggacaaggtctgtgctgatcgcggctggggctgatgttctgggagcacgtcgcaggtggttgccaggcctggtgtcagccgtgttggctgcctaccccagagctccatttgaccgtcctcgcgaacttgggcgctggatcgcccaatctgccgagctcactgcagctgcagaacaagcagctgccgctggccggcaccttgtactggtcagacatgccctctatgagattcccgcagcacatggagctggggctgctggagagaggcctgcttcatctggcgcagaggtcttagctcgtgagcctgccagcaggaggccacgaacacctgcagacttggcccggctgcttggtctagacgcaggcgagctggactggtttgctgacctccgcgggtggaatcgcttagccccaggcaccaagctccaccattatcggtatgagtggcgaagtagaccgggacgagtgccacgcctgcttgaggtccctggtcagcgactgatgtacctccagcggcagctgatcgcagaggtgtacacggatctgccagtgcacccggctgcacatgggttcgtttcagggagaagcgctatcacgggagcggccgtacatgcaggcagtcacgtggtgatcggcatggacctcaccacctttttcgcccgggtcacccgcggacagatacatgccggtctgtgcaggcaaggttggggcgaagccctggtccccatcttggcaggcttagggactcatgccgttccgcccgccgtaattcgcgccatgcctccaggaggagatccgggagagcgacaggccttagccgctgctctgcggattccacacctacctcagggggcacctaccagccccctgcttgcaaacctcgcaatgcaccgcctggacgagagattgacaggctgggccaatgccgttggcgcgaggtacaccaggtacgccgatgacttaaccttctccggcgatacccggctggccgctagatctgatgcgttcatacggggggtggaagcaatcgtgacagactccgggcagagaatcaaccctaggaagactcgggtccgccctaggggaactagccaacgggtgacggggattgtggttaacgagcaccctgccatggatcgacacgcctatgaccgactgcgtgctattctccacaactgtgcgcgcaccggtcccgaagcacagaatcgggatcgccatccccacttcagactgcacctcctcggcaggataaattgggccatcgcccttacccccgaaagagccccgggtctttggcgtctatgggacgcgatagaatggactgactga

SEQ ID NO: 12883 - RNA, 1437 nt, synthetic construct
  source 1..1437: mol_type = other RNA
atgacccccaatccagggcacaccccagcaccctccataagagctgtggcagactctctcgcttccgccttcctggatgcagcacgagtgccccttgacccgggatcaggaggcgaggttttaggccatggagccgccgctcgggaacatggatggaatcgacctgtgctcattgctgccggggcttcagtgcttggggcacgaagaaggtggttgagtcccctagtgcgggcggtcctcgatgcctatcctcgagccccttttgatcgcccccgtgagctggccgcttggattgaggcctccgctgtgcttggagacgcctgtgcggctgctaccgctagaggtcagcacctggttctggtgcggcacgccgtatatgaaccagtaggggcagcaagcccgcttcccgcaacaccagctgaactcgccgggctgttgggcttggacatcggcgaactcgcgtggttcgccgatcagcgcggatggaatagacgggctggttccgcccggctgcaacactaccgttacgagtggcgcgcaagacctggaagggtcccgagattgctggaggttccaggccagcgcctgatgagactgcagcgccagctcgttcacgaggtgctgacggcacttcctatccaccccgccgctcatgggtttgtcccaggcaggtctgcaagaacgggcgctgccgtccatgctggtagtcacgtggtgatcggcatggatctcacaacttttttcgcccgcgtgggcaggtcagaaattaccgcggcattgaggagggcaggatggggagaggcggtagctcctgtcctggcagctctggctactcatgcggtgcccgaggccgtcatcagagccatgccacccggtggcaaccctgaagaacgctttgccttagcccaagcactcagactccctcatcttccccagggggccccaactagccctatgttggccaatctggctatgcgtcgcctcgacgacagactgcttggttgggcagctgccgtgggagctcgttacacccggtatgccgacgatctgacctttagtggagatcagcgcctagcggcccgaagcgatgctttcattcggggcgtgagcgggatcgttgcggattgcggtcagcgggtgaacgaaaggaagacaagggttcggccccgcggtacaagtcagcgagtcacaggaattgtcgtaaacgcccacccagccgtcgaccggaggtcttatgacgccctgagggccccactgcataattgcgcacgcactgggcctgcagcccaaaacagggaaaacctgccatacttcagagagcacctgagggggcgaatagactgggtggtgtcgctgactcccaaaagggagcctgccttacggcggctatgggaggccatcgagtgggaagagccgggctctgcgcccttacgttga

SEQ ID NO: 12884 - RNA, 1326 nt, synthetic construct
  source 1..1326: mol_type = other RNA
atgatctcgtccgccctcgcccacggattcttggctgcttccacagaagcagactgggctcgggcaccactgattgccgcaggatctgctgtattaggcgcccgtcgacgatggctccccgctttagtagatgacgtgctgcgcgcgtttccacgtccacctttgcgtggcctgcgggagttgcgagagtggattgctagcgctccagggcccatagccgccgttgaagcggcagctgagaggggacgccctcttagacttgcaagacacccagtgtaccacgaacctggggctgcacctggaggaatgcctgccaaccccgctgagctagctgccctgtgcagcatcgctcccggccaattggagtggtttgctgacaccaggctctggaacagacgcctgagtggcgaccaacaccggctggagcattaccgctatcggtggttggaacgacccggtcgggttcctcgcttactcgagattcctggcgagaggctgcgcgcagtgcaacgaagcgtgcttgattgtgtgctggcagagctgccagtacacccagccgcgcacggtttcgttccaggtcgcgatgcaaggagtggagcggccgcacatactggcagggacgtcgtgatagggctggatctgaggacgtttttcgctagggtcggctaccctcagatcctgagagtgctgagagcagccgggcacacggaggcagttgccacacttatcgccgggttatctactcatgcggtgccgcctaggattctccgcgaaatgcccccgggaggatccccagaggaaagattcgctctccgtcgggctttggcagcgaggcatcttccccagggagctccaacttcacccgccctagccaacctggtcagtgccggtctggatcggagactcgcaggctgggcccagaagtttggggcgacctatacacgatatgccgatgatctgaccttctctggggacagagccctacggtcaagggccacccgttttattcgcggcgtcgacctcattatcgccgaggaagggcatgccctgaaccccagaaaaaccagagtgcagccggcagcgatcagccagcgagtgacaggcatcgtcgtgaataggcatccgaatctgccccggcgggaatacgatctgctcagggctatacttcacaattgcgccttgcacgggcccgcatcccagaatagagccggccaccccgactttcgcgctcatctgcggggtagaattggctgggctgccgcacttaaccctgatcgcgaagctgccctcactgccgccttcaataggatcgactgggaccggtga

SEQ ID NO: 12885 - RNA, 1506 nt, synthetic construct
  source 1..1506: mol_type = other RNA
atgcccgattcatgcacagctggggcttccctgaggagcgctcagcagagaacaagaactgactcacaggtgataggtgagacaattgccgctctgacaacacaacacggcccagagcacgcggaacccactactgccagcgtgacagccgcgtctgcaaccctaaagcgtactcctcgaccttcgtctagtaccattgccagcactctggctcaagccttcctcggatctcccgactggtcaaagcccggattagtagacgcaggggcccacgttcttggagccagacggcgttggctgggccctttggcagcacacgttctgcgcggctacccaagaccaccggtagatgcccctcgggaactcgccgcagttgtgctgcaatgtgaacctttccttgacgccttagcaaaggctgcccagcagcggaaaccaatccgactcgccaattacgtgttagcgtccgccgtcgcgagggagaatttggtgcagggggcgcccagaatcgatacgctcgccgatctggccgccttgttacacgtgaactgcggcgaactcgaatggttcgccgatacaaagcactggaacagacgggcaggtggcactctggctcactatcgctacgaatggcgcaccaggccaggtaggctgccgagattgctagagatacctgccccccgtctgcgcagcattcaacggacggtgctgcgcgagttgctctacccgcttgagctacacgacgcggcacatggcttcgttcctggccgtagtgccgtaaccggtgccgcacagcataccggcagggatgtggtggtcaacctggatcttgtgagtttctttgctaaggtcaccgctgggagggtgtttgggaccctcaggcagtccggcttcaccgaagctgtggcccatagactgacaggtatcgcgacccatgtggtccccccacgcgtactgtctctgatgccaccaggaggtgacccagccgagagatttgctctaaggcaggcactttctctgccccatctgccccagggggctcctacttcacctatgctggcaaacctgagtctccggagactcgatgcacgcttggctggactggtcgagaaatttgatgggggctatacccggtatgccgatgaccttgcattttccggagggagagatatggcccgacgcgctgacgcttttgtccgagcagctaccgtcatcgtcaaggacgaaggacatagcgtgaatcggttgaaaacgagagtgaggccagccggcgttaggcagtccgtaactaatgtggtcgttaatgagcgcacaaatgtgccgcgggtggacttcgataggcttaaagctacgctgcacaactgtcgcgtccacgggcctgagtcccagaactggaacggccatcccgactttcggggacatttactgggaaggatcagctgggttgccgcactcaatcccgctcgaggagcccgactccgtcaagacttcgaccggattcagtggtga

SEQ ID NO: 12886 - RNA, 1365 nt, synthetic construct
  source 1..1365: mol_type = other RNA
atgacgagggccgctgcgactttgaagagaacaccgaggcctagctcctcagccatcgcccagacactcgcccaggctttcctggcgagccctcagtggactaaagcggagttggtcgctgctggggctcatgcacttggggctcgaagacgttggcttggacccttagccgcacaagtggttcggggataccctaggccacctctcgatgcacccagggaactcggtgccatgatcggctcctgcgatcccttcatcgaagccaccgcaaaagccctgcagcaaagaaagcctatccttattgcaaattacgtgttagcgccctccgtagcccgcgaaaatcgccacgcaggcgtcccacagataggcacactcggtgagctcgccgagcgtctcaagttgtccggaggcgaattggagtggtttgccgatcctaagcactggaaccgaacagcagctcggaagctgcagcactatcgttatgaatggcgaacaaggccaggccgactgccaaggctcttagaaatacccgccccgcgactaagagcactgcagaggaccgtcctgagagagctgctatacccactggagttacacgacgctgcacacggcttcgttcccgggagatcggccgttactggcgctgcacaccatatgggacgcgatgtggtgctgaacctggatttggtgacgttcttcgcaaaagtgaccgccggtagggtctatggaaccttgcgccaggccgggtacactgaagccgtgtcacaccgcctcgtgggcattgccacccatgtggtgccccccagagtgctagcccaaatgccctcaggaggcgacgctactcaacgatttgctcttcggcagtctctgtcagtccctcacctgcctcaaggggctccaaccagcccaacccttgccaatctgagtctgcggaggctggattctagactggccggcctagctgagaagtttgacgggggctacacacggtatgccgatgatctggcattctccggagggcaggaccttgcacagcacgctgacgcgtttctgcgtgccgccaccctgatcattgaggaccaggagcatagcgttaaccagcagaaaacgagagtgaggcggagtggggtaagacagatggtgacttctgtcgttgtgaacgaacgcacaaatgtcccacgccctgacttcgaccggctcaaggcgatcattcataattgtaggatgcatggtccccagtctcagaaccgcgaggctcgcagcgactttagagctcatctgctcggacggatcagttgggtagcggtacttaacccggcccggggtgcaaaactgttgcaagactttcaccggattcagtggtga

SEQ ID NO: 12887 - RNA, 1515 nt, synthetic construct
  source 1..1515: mol_type = other RNA
atgcctgacccttgtaccgctggcgctgcgttacggtccgctcaactccgcacccgcacagatagccgggtgatcggagaggcaatcgccgcgatgaccgcacaacccagagcaagagcagcaggcagggccgatcctgcagtggctccagtcactgccgcttctgcaactctcaagcgcacacccaggccgagtcctacagccattgcggcaactcttgctcaggcgttcctgtcctctccagactggtctaaacctgccctcatggagtcaggcgcccaagttctgggcgccagacgacgatggcttggcccattggcggcccaagtcctacggtcacaccccaggcctcctgtagacgccccaagagaattggccgccctggtcctggtcagcgaaccatttgttgaagcactggccaagagtgtgcagcagaggaaaccaattcaccttgcgaggtacgttctcgcagccggagctgcacgcgatagccaggtaaggggggcccctaggattgatactgtcggagcactcgccgcacggttagggttaggggtgggcgaactggactggttcgccgacccacggcattggaacaggcgagctgatgcccggctccagcactaccgttataggtggctggttagacccggcagagtgccgaggctgttggagattcctcgccccagattgcgtttcctccagcgcgccgtactccgcgaactgttgcaccctctgcccctgcatgatgccgctcatggattcgttcccggcagatcagctgtgacaggggctgctcagcacacaggtcgtgccgtggtggtgaacctggacctagcctccttctttgcccacgtgaccgctgggcgagtctttggggtgctgcgacaggctggatttaccgaggccgtggcccatcagctaacgggcttgtgcacccacgtcgttccaccccgaatactggtgcagatgccaccgggtggagatcccgcagacaggcttgccctcagacaggcgctttcccttccccatctcccccagggagctcccactagtcccacactggccaatctgtccttaagacgcctagatagccggctggctgggctcgctgagaagtttgatgggggttacacacggtatgctgacgacttagccttcagcggcggtcgggacatgctgagaagagcagatgcgctcgtacgggctgccggcactatcgtggaggacgagggccaccgcctgaataggctgaagagcagggttagaccggcaggaacgcgccaagccgtcacctctgtggtagtgaacgagcggaccaatcttgcccgcgatgattttgaccgtttgaaagccataatccacaattgccgcgtgcatgggccagaatcgcagaaccgagactccgtcccagagttcagatcacatctgctgggtcggatcagctggctgagttctctgaaccctgctaggggagcacgtttgcggcaggctttcgaccttatcacctggtga

SEQ ID NO: 12888 - RNA, 1602 nt, synthetic construct
  source 1..1602: mol_type = other RNA
atggtagtttcaggggataccgtggtaagtgtcagcatgggtgcatgtgatgggttctccgatgaggccggcagtgtgtttcggaggccttccctaccgggggtcactcctggtcacgcagtgctgcctgacccttgcacttccgacgcatcgctgagatccgctcagctcgggaatcgcaccgattcacaggttattggcgaaacgattgcggtactcaatcccaacatcgcccatattactcctgcctccgcaacactgaaaaggactccacgaccctcgaccctcgccgtgacagagacactcgcccaggctttcctagccgcaccacagtggaataaagccgccctcatggcggcaggcgctcatgttcttggagcccgcaggcggtggttaggcccattagtgtccgatgtgctgcgtgggtaccttcgcgcacctgtagatgcccccagagaactggccgcgcgaatccatcatgccgagcccttcgtggaggcgttggctaaggcagcccaacagagaaaacccattcgactggcgcactatgtcctcgctcccgctgttgccagggagaatgcccctagacagactcctagaataaacaatttgggcgacttagcgcatctcctggaactgacacccggcgaactggagtggttcgcagacacccgtcactggaacaggatggccactcgcaagcttcaacattatcgctacgagtggagggtcagaccagggagattgccacgccttcttgaggtgcccgctcctaggctaagagctatccagcggattatccttcataagctgctgtacctcatcgaactgcacgatgcagctcacggttttgtcccaggacggagcgctgttactggagccgcccagcacaccgggcaagaagtcgtgatgaacctggacctggtgtctttcttcgctaaggttaccgccggaaaagtcttcggagccctgagaaaggctggttttccagaagccgtcgcacatcggctagccggcatatgtacgcaccgagttcccccccgtatcctcgccttaatgcccccaggcggagatccagctgaaagatttgcccttcgccaggccctgtctctgccacacttgccccaaggctcaccgacaagcccgatgctggctaacctgagtgtgaggcggctcgactctcgcctggcaggattgtctgagaagtttgacggagtgtacacccggtatgcagacgatcttgcttttagtggcgggaaagatctcgccagacgcgctgacgcttttgtggctgccgtgaccgcgattgtgcgggacgatggtcacaggatcaaccgcctgaaaacccgtgtccggcctgcaagcgtcaggcagagcgttacgagcgtggtagtgaatcaaaggacaaacccagctaggtcagatgtggaccggttgaaggccatactccacaactgccgaacacgaggccccgagtctcagaattgggacggtcaccctgacttcagaggccatctgctgggaaggattagctgggtggcaaccttgaatccggagcggggggcaaagttactgcgggagttccaccgtatccagtggtga

SEQ ID NO: 12889 - RNA, 1386 nt, synthetic construct
  source 1..1386: mol_type = other RNA
atgacaggcagtcagaagcccgtgacacctgcttcctcagtcctcagtcgcacccctaggcctacagattcagctgtggcggcaacgttggctcaggcatttctgaacagctcccgctggacctccgccggactgattgaagcgggggcacaagtcttaggcgccagacggcgctggttgggtccagttgtgactctggtgcttcgttcatacccacgccctccagtggatgcaccgcgagaactgggcgccatgatcctgggttgcgaaccctttgcccaagcgcgggccaaagctgccgttcagcggaagccactgaggctggctcattatgtactggaacctatggtagctcgtgagaacgggcagccaagagtcccgcgccttgacactcttgcagacctggctgccatgctggagctgacaggaggtgaactggagtggtttgccgatccccagcagtggaacagactagccgtccccgcacttcagcactatcgatacgtctggaggagacgacctggcagattgcctcggctactcgagatacctgccccacggctcagagggatccagaggactgtgctgagggatctcctgtaccccctggagattcatgacgcagcacacgggttcgtgccaggaaggtctgcagtgacgggtgctacacgccacaccgggcaggatcttgttttgaccctcgacctcgtgaccttttttgcacgcgtgactgctgggaaggtcttcggggtgttacgacgcgcaggctacacagaggccgttgcccacaggttggtgggactgtgtacgcatgtagtgccccctagagtgttgagcgctatgccacccggtggatctcccaccgaacgtttcgctctccgacaagccctgtcacagccccacttaccgcagggagccccttctagtccggtcttagccaatctgagcctcagacgactggatgctagactaaccggcctagcggacagcttcgaagctgtttataccaggtatgccgatgacctggccttcagcggcggcaaaaagttggcccggagatctgcggcttttattcggttcgcgacagtaaccatcggagaggagggccacggcgtgaaccaacccaagagtcgcctgagaaccgccggtgaacggcaacaggtgacatccgtggttgtcaatgagagaactaatgccgtcaggtccgagtttgatcggcttaaagcaactctccataactgctggactcacggcccagatagccagaatagggacaggcatgccgacttccgggcacacctgttgggacggatatcttggatggcctccctcaattcggacaggggggctcgtctccttcgcgacttccagcgtatccagtggtga

SEQ ID NO: 12890 - RNA, 1569 nt, synthetic construct
  source 1..1569: mol_type = other RNA
atggccccttgcgacgggtttttcgacgaggctggcagtggcttttggagagcgtcccttcccggtgccactccaggctacgcagtgctcccagatcgaagcacctctggggccgcactgagatctgcacaactggggacacgcactgaaagacaggttatcgaggaaaccattgccgccatgactacatcatcgatcccggtgacacccgctagtgccaccctcaagcgcaagccccgaccatcaacttcagccatagcagccacattagctcaggccttcctcaattcccctcagtggagtaaacccgaaattacagtcgccggagcccaggtactcggagcacgtaggagatggctagggccactggctgcccacgtactgctgtcttatcctcgccctccagttgatgcgccaagggaactgacagccacgatccttgcgagcgagccctttatcgaggctgtcgcaaaagcagcctctcagtacaagcccatactgcttgcgtcctacgctctggcacctaccactgctcgagagaaccgtcaggctcgcgttccccggattgacaccctcgctgctttggccgagaagctacatctgacactcggtgaactagagtggttctccgaccctcagcactggaatagaacagccgcccggaaactgcagcattacagatatgtctggaggagcagaccgggccggttaccaaggcttctggagattccgggcctgcgcctgcgaaatatccagaggaccgtgttgactgagctgttataccctttggaattacacgacgctgctcatggattcgtccccggacgaagtgtcgttaccggcgctgcgagacatacagggaaggaggtggtcgtgaacctggacctgactacattctttgcgaaggtgaccgcagggcgggttttcggtaccctgcgtcaagccggcttcacggaatccgtggcccatagactgacgggaatttgcacccacgtggtacctccaaggattttggcccagatgccaccaggaggggatgcagatcaacggttcgccttgcgccgcgccttatcgcaacctcatctcccccagggggcaccctcatctcccgtactcgccaatcttgccttgcggaaactggattcccgcctagctggacttgcggatacatttgacgctggttatactaggtatgctgacgacctgacgttcagcgggggaagggagcttgccagacgggtgaacgcttttatcaggaccgccaccggcatcatcgagaatgaaggccacggcgtgaacaaactcaaaagccgtgtgcgaccggcagcagtgagacaggttgtcaccagcgtcgtggtgaatcagcggaccaatattaaccggctcgacttcgataggctcaaggccactctgcacaactgtcggaggcacggccccgaatctcaaaacagagaagctcacgccgactttcgggcacagcttctgggccgcatcagctgggtgactgctttgaaccctgataggggtgcaaagctcctgcgcgattttcacctgatagcatgggagtga

SEQ ID NO: 12891 - RNA, 1179 nt, synthetic construct
  source 1..1179: mol_type = other RNA
atgtacccccgtcctccaattgacgctccccgcgaactggctgcaacgattttcctgtcagacccgttcacagaggccgtcgccaaagcagctcaccaacggaaacccctgcgggtggccaactacgctctccttccagccactgcccgggagaatcggcagccaaaaatacccagactggacacactggcctctctggcgggacttctagagttgtcctacggggagctggagtggtttagtgatccacagcactggaataggaaggctgagcgaaaactgcagcactataggtacgaatggagacagcgaccgggacgtttacctagactgctcgagatccctgcacctaggctccgcaatatacagcgcaccgtcctccgggaacttctgtatcccattgagcttcacgacgccgcacatggctttgttcccggtagaagcgctggaacaggcgcggctcaacataccggacaggaggtcgtgattaacctcgacttagtgacttttttcgctaaggtacctgctggtagggttttcgggacattgcggcaggcgggattcaccgagtctgtggcacatcgcctcacagggatctgcacccattccgtaccacctcgagtcttgtctcttatgccaccaggcggcaacttaacggaaaggttcgcactgagacaggctctcgcccgacctcatttaccccaaggggccccgacaagtccaatggtggccaacctgagtctaagaagactggatagccgcctatctggccttgccgaaaagtttgacgcccgttacactcggtatgccgacgatctggcctttagcggagggaatgagctggcccgtaggacctccgcctttattcgcaccgcgatctcaatcatcgaagcagaaggccacgaagccaacaggttgaaaacccgggtgaggcccgcctccgttaggcaattggtgacctcagtcgttgtaaacaagcacactaatgtgactcgatccgacttcgatagattgaaggcaatcctccataattgtctgagcttcgggcccgaatcgcagaacagagaggcgcacgcagattttcgcggctatctgctcggccatgtgagctgggtggctgctctcaatcctgatcggggtgcaaagctgctgcacgatttccaccgcatccagtggtga

SEQ ID NO: 12892 - RNA, 1416 nt, synthetic construct
  source 1..1416: mol_type = other RNA
atgaccacccccacacccggagctgctgtgcttgcacggacacccaatccgagcccgcggaatgtgagcacagcactggcttatgcttttcttgcagcccccacctggagtgaagctgagctggccgccgcaacaacttacgtcgtaggcaaacgaggaggcacaagaagcgccaagtggcacacccaactcgcaagtagcgttctgcgcgcctaccccaggccaccattacgtgagccgaggcagctcgcagtgttcattgccggcgctaaaccattctatctggccgttgatagggcgacccgactccacgccaccctaaccattgctcattatgtgcttccccccactaacgtcgccgagctgaagtctcctctggaagaaagatccctgatacctcagacactggcagagctcgccggcgtgctcgatctgacagtcggggaactggactggttcgcagaccctctccagtggaataggaccgcccggaataagagactggtccactacaggcatcagtggcgtttgcggcctggacgcactcctaggctactcgaaattccagctccacgcttgcgtgagatccagcggtccgtgttaagagaattgctgtcccccctgcctctgcatgatgccgctcatggctttactcccgggagaagcccagccactaacgcggctcatcacacaggcagaaacgttgtagtgaatgtcgacctcactaccttttttgctcgcgtcacggccggcaaagtcttcgggatacttcgccaagccggatttccagagacagtagcccataggctagcgggactgtgcacccacaccgtgcccttaggagttatcgctgagatgccccagggaggtggcgcttcagggagattcgcctttcgacaggcactggccacaccgcacttacctcagggggcacctaccagtccagccctggcaaacctgtcactgcgcagactggacagcagattggcagggcttgcggcttctttcgatgctgactatactaggtacgcggatgacttggccttctctgggggaccaggtttttctcaccgctcactcgccttcgtgagtttggttcacaaaatcgtggaacaggagggtcatacggtcaatgacgccaagacgcgggtgagaggctcaggggtgcaacagcgggtcactggcgtggtggtgaacgctcacacgaacgtgtcgcgagcagagtttgaccggcttaaggccatcttgcacaactgtgcggttcacggccctgctgggcagaaccgttgtggtcctcaaggatccgaacactccgatttcaggggccatctccagggtcgcattgcctgggtacggcatcttaatccagcgagggcagccaagctggagcgaatcttcgccgcaattatctggtga

SEQ ID NO: 12893 - RNA, 1371 nt, synthetic construct
  source 1..1371: mol_type = other RNA
atgaagccatcgcagcccactgccgctgccagtgtgttggtgcggattcctcacccctcagcaaacaccgtggctacagccctcgcccacgcattcctcgctgcaggagattggtcaaagcccgcactaacagcggcaggggccgatattttaggcgcccggcggagatggttaggcccacttgcttctcacgtactcagaaactaccatcgaccacccgctgatgctccccgtgagctggcagctgtcgtccttggatgtcctgcttttggcgaggcgcttgcaaaggcggcaacccagaggcgccctatcaaactggcccacttagccgtggcaccagccgtagcacaagccgctagggttccccggctggatactgtggcagacctcgcggggatgttagccttgaccccgggtgagctggaatggttcgccgaccccagacactggaatagaactgccgggccacggctccagcattattgctaccagtggcgtagtcgaccaggtcgcgtgcccagactgctggaaatacctcagcctagactgaggaccctccaacggacgatcctgcgcgagttactggcccccattcctcttcacgacgcggcccacggatttgttcctggtcggagcgctgtttccggagccgctatgcacacaggcgccgatgtcgtggtcagcctggacctcgccgccttctttgcgcatgtctcaccgggaaaggtatttggtgtgctgcgccaggcgggctttacggaagctgtggcgcataggctgacaggcctgtgcactcatgcagtgccggtgggggtactggctgagatgccaccaggaggggaccctgctagcaggttcgccctacgccaggcccttgctgttgcccaccttccacagggggcaccgacctctcccatgctggcaaatctcgcactgagacggttggactcccgactatctgggtgggctggcgctttcgacgccgtgtacagccgctatgccgacgacttggctttctctggtggtgccgaactagccagaagggccgacgcctttatacgcggagcagggcgaatcgtggccgatgaagggcacagcctgaatggcctgaagactagagtccataaagctggcgtccggcagaccgtgaccggagttgtggtcaatgagcgtacaaacattgcccgtgcagagttcgatcaattgaaagccgtcgttcacaactgtgccgcgcatggccctgagggccaaaacaggggcggacatcctgatttccgcgcacacctgctcggcaggatcgcatgggtgtcctccgtgcatcccgctagaggggctaggttgcgagccgcttttgatgaaatcagttggtga

SEQ ID NO: 12894 - RNA, 1380 nt, synthetic construct
  source 1..1380: mol_type = other RNA
atgatacctgcaggacaagctgtggctccagccgcagcggttttagccaggtcctctcgaccaacaccggatgccctcgcgtcggcactgagtcacgcctttctggccgcggatgattggtccaagcccgccctaatgacggccggaacgggaattctcggagccaggcgaagatggcttggccccttggctactcacgtcctgaggtcataccacagacctcccactgacgcacctcgcgaactcgctgccgtggtactggggtctgaagccttcggggaagccctggagaaagctgccagacagagacggcccatcactctggtgagatacgcagctgaaccagctgtcgcccgagctgcacgcgttcctaggttggacaccttggcagaattggctgaggtgctagacctgagcgtaggggagctcgagtggttctcagatcccggtcagtggaaccgcacagcctccagtcgtcgccttcaacattacagatatcagtggaggagcaggccaggcagagtaccccgattactcgagatcccacttcctcgactgcggggccttcagcggacagttttacgggaactcctgtcccccattccgctgcatgacgccgcccatggcttcgttagtggacgttctgctgtcagcggcgccgctcttcatgcaggtaccgaggttgtcgtcaatctggacctggccgccttcttcgctcacgtgtcacctgggagggtctatggggtcctgcggcaggcaggctttacagaggctgtagcccaccgcctgaccggactctgcacacacgcagtgcccgtgggggtcattgctgagatgcccccaggtggtgaacctggcgaccgcttcgctctgcggaaggcactcgcgactgcacatctaccccagggggctcctacagcgcctatgctggctaatttggcactgagaagactggatagccgtttgtcaggttgggccggcgcctttgacgcggtgtatacccggtacgccgatgacctggcttttagtggcgggactgagcttagccgtcgagccgacgcgtttgtaagaggcgcagcaaggatagtggcggacgagggccacagcttaaaccgcctgaaaaccagggtgcatagagccggcgtgcgccaatctgttaccggagtggtggtgaacaccaggaccaacgtggcccggccagagttcgatcggcttaaggcagtgctccacaactgtctgctcctgggtccggaaggacagaatcgggacggccacgatgattttcgggcccatctcttggggcgcatcgcttgggtcacttccgttaatccagacaggggagccaaacttcgcgctgtgttcgatgccatctcttggtga

SEQ ID NO: 12895 - RNA, 1431 nt, synthetic construct
  source 1..1431: mol_type = other RNA
atgaagcacactccggattctaccagaccggggcctctcgcggattctacccctggaccaacccccgcatcagccgtcttgggccgaacaccacggccctctcccaagacggtggcaactgcgctggcccacgctttcctagccgctgagtcatggtccaaacccgacctggtagaagctggggccactgtcctcggagctcgaaggagatggttaggccccttggccggacacgtgctagctagctacagaaggcctccggccgacgctcctcgagaacttaccgccgtcgtgctggggagcgcaccatttgctgaggccgtagccaaggccgaccttcagtgtaaacccatccgcatcgcgaggtacgctgtcccaccagcagggatgggagaagcagcaggtgtgcctgccggggtaccacgtctagataccctggcggagctagccgcaatccttggcgttgacgctggacggctggagtggtttgctgaccccaagcactggaatcggacgacgggcaatcccaggctgcagcactatcgctaccagtggcggacccgtcaagggagagttccacggcttctggagattccacaccccagactgcgcgccgtccaaaggaccgtgctgagagagctcctggctggcatacctctccatgcttcagctcacggcttcgtccctggcagaagtgccgtaagtggcgccgcaagacacacaggcagggacgttgtgatcaatctggaccttgcagcctttttcgcgcacgtgacccctggtaaggtctatggcgtcctccgggctgcagggtatcctgagagcgttgcccataggctgactggcctttgcacacatgccgtgcctgtgggagtgattgcagaaatgcctcctggagggagtgccgaagatcgcttcgccttaaggcaggctctcaggaaagcgcacttaccccaaggagccccaacttcccccgccttggctaatctcaccttgcggcggctggattctcggctgcagggttgggcgggtggtttcgatgccgtttatacaaggtacgccgacgatttagcatttagcgggggtcctgtactcgctcgtcgagctgacgcctttttgaagggcgctgcacgaattgtcgcagacgagggacatactttgaacgcgacaaaaacacgcgtgcataaggcaggggtgcgtcagtcggtgactggggtggtggtgaaccgccataccaacgtgtcccgccgcgattttgatcgcctgaaagccgttctgcataattgcgtggtccatggcccggatggccagaaccgagacggacaccccgacttcagagcccagctccgtggcaggatcgcatgggttgcctccgtgaacccaggtcggggagcaagactgctggccgatttcacactgatagactggtga

SEQ ID NO: 12896 - RNA, 1440 nt, synthetic construct
  source 1..1440: mol_type = other RNA
atgggcgcacccttacgctcagctaagcgcggggcccagactgatagactggtgatcatagaagcggtggctgctatgatcccaactctgtctgccgccgtgttggccaggaatccccgtcctacaccccaggctatcgccactgcccttgctcacgcatttttggcagccgaagattggtccaaaccctctctcatcagtgcagccgccagcgtgttaggagcgaggaggaggtggttggggcccctagctgagcacatcctgggcctctatcatagacggccagccgatgcaccacgcgaggtagtagccgtagttctgcacagcgaagccttcgagacagcagtcgagaaagccgcaaaggcaaggaaacccattattgtggcccattatgtagtccaacctgctgttgcccgcgaggcgcgagttcctcacctagatacacttgcggggttagcggggctgttgggccttagcataggagaacttgagtggtttgccgatcctaggcaatggaatcgtaccgccacatccaagcggcttcagcattaccgctatcagtggcggtcacgcccaggcaaagtgccaaggcttctggagattcctcagcctcgcctccgagctctccagaggaccgttctacacgaactgctggcccccatcccccttcataatgccgcacacggctttgtcccgggaagatcagccgtctctggagcaagggctcacacaggagctgaagtggtggttaacttggacctcgccgccttcttcacccacgtcactccgggtaaagttttcggcgtgctgagacaggcaggcttcaccgaggctgtggcccatagactcacgggactctgtactcatgctgttcctgtgggcgtcttagcagaaatgccgccaggcggggatccaaccgacaggttcgcactccggaaggctctcgcactgccacacttgcctcaaggggcacctacctcacccatgctggctaacctggctctgagacgcctggactcccggctcagtggatgggctggtgcgtttgacgcatgctacactcggtacgcagacgatctggcgtttagcggtggtagcgagctggcccgaagagctgatgccttcgtgagaggggctgccaggattgtcgctgacgagggccacagtctcaaccggctgaagacccgggttcacagagccggagtgcgccagtctgtaacgggggtggtggtcaatcagcacacgaacgtcaccagaggtgactacgacgccttgaaggctgtgctgcataactgcgtctccctgggccccgaagggcaaaaccgtgacggccaggcgaatttccgagcccatctgatgggtcgggtggcctgggtgtcctcggtgaatccaggccggggagccacactgcgtgctctatttgagcgaattgtgtggtga

SEQ ID NO: 12897 - RNA, 1383 nt, synthetic construct
  source 1..1383: mol_type = other RNA
atggcggtggccaccacgggtgcagccacattagcaaggacacctcgcactagcccggctgatctcgctaccgctttggcgcacgcgttcctaggggctgaatcctggtctaaggccgccttggttgcctcagctgccggtagtctgggagccaggagacggtggctgccacctcttgctggccacgtgctagctgcctatcatcgtccccccgccgacgctccaagggaattagccgcggtcgtggggcagtgtgacgcctttcgcgaggctttagccaaatcggctaggcagcgtaagccaatcaggctggcccatctggtcccagtggctggaaaggccagagacagcgccaccgatatcccacggatagatacccttgcggagctcgccggtaggctggagttgtccactggcgaactcgaatggtttgccgaccctgggcagtggaataggtccgcgagaacccccagactgcagcactaccgatacgagtggcgtagtagacccggccgagtgccgagacttctcgagatccctggaacccgtctgcgcgcgatccagagacgcattctgcgcgatttgctccagcccatcccgcttcatgacgcagcccacggctttgttcctggacggagcgcaattacaggggccgcacggcatacgggcaatgaggtggtcataaacctcgatctcagtacattcttcgcgagggtcactccagggaaaatatttggagttctgcgccaagcagggtacgcagaggcagtggcccatcggcttacaggcctctgcacacacgcagtacctgctcgggtattagcagccatgcctgcaggaggggatcccggagagagatttgccgtccggcaggccctggctagagcacatcttccccagggagctccaactagccccctgctggcaaacctggccctgcgtagactcgactctagactggccggctgggctgcagctgtaggagcatcctatacccgctatgcagacgacctggccttttcaggcggtcctgatttggcccgcggtgctgatgctttcatcagaggcgccgctcgaatcgtggccgacgaaggtcacgacctgaacaggcggaaaacacgggtgcgcggtgctgcaacgcgacaaagcgttaccggcgttgtggtcaacgctcacactaatatttctcgaggcgactacgatcggattaaggcaattttgcatcactgcgtgctcgacgggcccggagagcaaaaccggtcaggccacccagatttccaggcctatctgagggggcgaattgcatggatcgaatctctgaatgccgccaggggcgctcaactaagggcggaattcgatcgcattcagtggcagactgcctga

SEQ ID NO: 12898 - RNA, 1365 nt, synthetic construct
  source 1..1365: mol_type = other RNA
atgagcaacaacggctcagcagtgttagcacggacacctcacgcccttcccatggccctgtccacagcgctggcagatgcatttctcgcagcggaccaatggacagccccggctttagtacaggctggcaaccatacaataggatcgcagcggagatggatccctaccctggccgcccatatcatcgccacatatccacggcgccctctggacgcgcctagagaactcgccgcagtagtcagacgctccaagcccttcgcacgtgccctagcacgtgccagtcgaactggtaagcccctcccccttgccaattactgcctggaccctgcaagtgcgagggagtccccactgggaattcctgttgtcgacaacctgggagtgctctctcagcatttgggcataactcccggcgaactggaatggtttgctgacccaaaacacttcaaccgctccgctgcccccatcttacagcattacaggtatgagtggcacaccaggcctggcagagtgccgaggttactagaggttcctgccccgaggcttcgcactctccagaggacgatcttggccaatctcttgagtccaatccccttgcacagcgccgctcacggctttgttcccggtcgatctgctgttagtggggctgccgcgcacgctggtaatctggttgtgattaatttggacctggcgaccttcttcgcaaaagtgtctgctggacgggtgttcggcgtccttcgccaagccggatatgctgaggccgtcgcacatcggattactggactgtgtacacatagggtgcccgccagaattctgagcaggatgcctgctgggggtgagccaaccgaccgcttcgcactgaggcaggcccttgccctaccgcacttgccacagggggctcctacttcccccatgctggctaacctggctgtgagacgcatggactcaaggctgagcgggtgggccgggaagtttgatgccggctacacaagatacgcggatgatttggctttctcagcagggacaactctcgcccgggggtctgatgatttcatagccggcgtgtctcgtatcgtaaccgatgagggccacagcctgaatccaagaaaaaccagagtccgaggagcaagcctccggcagacggtgaccggtgtggtagttaatgaacaccccaacgtgaccagggcggattttgaccgactgaaggctattctgcataattgcgccgtccttggaccagaactcgccaatcgccaggctcatgccgattttcggtcccacctgcttggccggatcgcatgggtggcctcagtgaacccacgtcgaggggctcaactccgcgcagactttgctagaattgtctggtga

SEQ ID NO: 12899 - RNA, 1344 nt, synthetic construct
  source 1..1344: mol_type = other RNA
atgctggctcggaccccacatccctctcccgaagctgtctctacggcccttgcggacgcttttctagccgccgaacagtggaacgccgaggcactcgctcgtgcaggcaatcatacttgtgggtcccctcggagatggattaccaccctggctgcccacatcgttgcttcctatcctcgaccacccgtagacgcgcccagggaactggctgctgtcgtcaggcagtccaagccttttacaagagccttggcaagagcctcgaggactggcaagccactgcccctgaagcactatacactggatccagccgtcgccagacatagccccctcgacgtccccgacattgggaacctctcagagctcgcgcgcttgctcggaattacacctggggagttagagtggttcgctgaccccaagcatctgaacaggaacgccgcacctatcttggcgcactacagatatgtgtggcacactaggccgggtcgtgtaccacgcctactggaggtgcctgctccaaggttgcgggccttgcagagggtggtgctgagccaactgctttgccctatcccaccacatcccgctgcacatgggttcgtgcccggtcgatcagctgtcactggcgcaggcgcacacacgggaaagctggtggtggtgaatctcgatctggctaccttcttcgcaaaagttacagccggccgcgttttcggcgtgatgagacaggcagggtacgcagaagcagttgcccatcgtctgacaggtctgtgcactcaccgcgtgcctgcccgagttctctctcagatgccaccgggcggagatcctgctgacagattcgccctgaggcaagctttggctctaccacacttaccgcagggtgcccctacttcccccatgctcgccaatttagccgtgcggcgcatggatagtcgcctggctggatgggcgcgacgctttgatgccgggtatacccggtacgccgatgacctggcatttagcggaggtcgcgacttagcacgaggcgctgatgcatttatagccggcgtgggccggattgtagcggatgaggggcaccggctcaaccacagaaaaaccagagtcagaggagcctctgcaagacagagtgttacaggagtggtagtgaacgctcaccccaacgtgcgtcggaccgacattgaccgccttaaagcgatcctgcacaattgtgccacctacgggcctagcagtcagaatcttgagggacacgccgaatttcaagcccaactgcttggccggatagcctgggtggcaggcgtcaatccgcatcgaggagcccagcttagggccgtctacaggcggatctcatggtga

SEQ ID NO: 12900 - RNA, 1470 nt, synthetic construct
  source 1..1470: mol_type = other RNA
atgagtacaaatagcactgctacccgccgagccacaagctcaggacttcccaccccctccccagaagggctcgcaactgctttggcccactccttcctggcagccaagtcatggaccgctcaggacctgaaacagagtgcggcggatatccttggggcacggagacgctggttgggtcccttagtgagaggcacgttagccgcctaccataggaggccggacggagcatccagagagctcgccagcttcatagcaacctctgagccattctttgaggcagtgagccgggcccgtaaacagcggaagccaatacgattagcacactacgcaatcttggggcctttgccgccacgtcatgccattgccaatcagcctcagaagacggggaaaattcctagcgtgtccggcctcgagggtctggctactatgctcgggctcgagatgggcgagctagaatggtttgctgatatagggggctggaatcgacgcgctactgccggttctggaaccgcaggctttaccagagagactggccggaggtatagacacagtaagttccagcactattcttacatctggcgatcccgggaaggacgcgcaccaagactgctggaggcccctctgccccgacttaaaacgatccagagggcagttctggacacctttctagcgccaattccccttcacccagccgcccatggtttcgttcctgggcgcagtgttgtgactggtgccgccaaacacaccggatcggccgttattattagtgctgatctgtccacctttttcgcccgcgtcacagccggcaaaatctacgacgccctgaggcagtccggctattctgaagctgtggctcacaggctgacaggaatctgcacaaacgccattcccgcctcagtgctgaacgcagtgcctcccggaggagctcccgaagagagacacgcactgaggcaagcgctggcaacccctcacctaccacagggtgccccctcatcacccgcgcttgctaatatcgccatacggaggctggatagccgtctcgctggatgggccagcaagatgaacgccacatatactcggtacgctgatgacctcacgttctcgggcgggcctgaacttgctcgaagagccgacgcctttatggcgggcgtcggtaggatcgtcaaggaccaaggacatacactgaaccatagaaaaactagagtgcggagagctggggtacgccaaaccgtcacaggcgtagtagtgaatcaacacgtcaatactacacggcgtagctatgacatcctcaaggctaccctgcataactgtgtgaggtacgggcctgagagccagaacccggattctcagacatctgctgataacgcccattttcgcgaaaggttggcgggccagatcgcgtgggtcgcatctgtgaatccagcacggggcgctaagctgcgcgctaagttccagcaaatttcctggtga

SEQ ID NO: 12901 - RNA, 1386 nt, synthetic construct
  source 1..1386: mol_type = other RNA
atgatgcacgcacctcggaggatccagtctgaggggactcgggtccttgccagaaccccccaccccacaacttctggggttgccaccgcagtcgcttttgcctttctcgccgctggtgagtggaccaaagccggtttggttcagagcggtaccgaattgctgggagttaggcgaaggtggctccctagtctggctgctcaggtgctgggctggtacccacggcctcctgtcgatgccgtgagagagttagcagcagttgtcgagggctgtccagcctttattaatgccgtcgatagggccgctcgacagcgggtacccattcgtatagcccgctatgttctcgcgccaggccaggctcgtcaaacacccttccccatccctcgaatttcatccgccggcgatttagcagacttgcttgagttgacaagcggggagctggactggttcgcagatgtcaaacactggaacgggcgagcggagccccggttacaacactaccggtacgtgtggagaactagaagcgggcggactccgagactgctcgaaatcccagcaccccgcctgaggtcactacagcggactgtcttgaggagtattctggcccctgtccctctccacgatgccgctcacggcttcgtttcaggacgttccgccgtgacaggcgctaggctgcatacgggcgcccagatggtgatagctctggacctgaccgctttcttcgcacgcgtcacagctggtaaggtcttcggcatcctccggcaggctggatattctgagagtgtggcacatctattgactggactatgcagccacgtggtacccccccgcgtgctttctagaatgccgcctgggggagccgtggatgagaggtttgcgcttaggcaggccctctccctgccacatcttccacaaggagcaccaacctcccccatgctggccaatctggccgtacgacggctcgactccagattaagtgggtgggcgtcagtggcgggagctgtgtacacgaggtatgccgacgacctgacctttagcggcgggaaagagctggcaggacgtgcagacgctttcgtgcgaggggccgctagaatcgtgggcgaagaaggacatgcactgaacccacgcaagtcgagagtaagggccgccggtgttagacaggtggtgaccggcatcgtggtgaacgaaagaacaaatgtggcccgcagcgaattcgaccgcctgaaggcggttcttcataactgcgtggtacatggtcctgcaggccaaaaccgcgatggccacggcgattttcgcgctcaccttctggggcggatcgcttggctggaagccctcaatccgggtcgtggagcgaggctcagagcagactttgcccgcattcggtggtga

SEQ ID NO: 12902 - RNA, 1356 nt, synthetic construct
  source 1..1356: mol_type = other RNA
atgaccacaacaactcccggtgccagggtgcttgcgcgaacacctcatccgtcccctgtcgctatcgcgactgctctagcccacgcctttttggcgaccgatgactggtcaaagaacggcctgttggctgccggggcagaggtattaggagcccgcagaagatggctgggacccgtcgctgcagaggtgctcagattctacaggcaaccgcccgttgacgcccctcgtgagttagccgccgtggttgtgctgaacgatgcatttcgggcagctgtggcccgggcaaaaaaaaacggggtcccaatcaggatcgctcacttcgccccaactcctgtgcgtgctcctagaggcttgaacgacctcagtgatctcgcacgactccttcggctcccagccggagagctcgactggtttgcggatacacgccactggaataggagagctcacagcaaaagactccagcactacagatatgagtggcgatccaggcctggaaggatgcccaggctgctggaagtcccacggccaaggttgcgggagttgcagcggacagtgcaccgggaaattttggccggcctgcgtgttcatagcgccgcacacgggttcgtttccggaagaagtgccgctaccggagctagatttcacgagggagcgagggtggtaatcaacctggatctggccactttcttcacccgggtacgcgctggccgagtatacggtatttttcgcagagccggctttgcagaaccggtggcacatgccctcaccgggctctgtacgcattctgttccttctggcatagcaaggaacgctcctgcaggagggactgctggggagtggttcgagcttcgacgcgcccttgtcctaccccacttgccacagggcgcaccctcgtctccagccttagcgaacctggccgtgcgcaggctggatttcaggctggaaggctgggcaaccgctgctggtgcagtgtatactcgctatgccgacgacctggctttctcaggaggggaccaacttgctcgtcgcgccgacgcatttgtccggggtgcaacccggatcatagaagccgaggggcacctggtcaatgcgcacaagacacgtgtgagggggagttcagtgcgacagaccgttacgggcatcgtggtcaatgaacgcgctaatgccagccggcccgagtacgagagactgaaggccattctgcataattgcgtgagacacggccccgagtcccagaataggtctggccatcatgattttcgcgcccatctgctgggcagagtggcttggatggaactgcttaatcccgcccggggtctaaagctgcgcgaaagcttcgaccgaattgaatggtga

SEQ ID NO: 12903 - RNA, 1209 nt, synthetic construct
  source 1..1209: mol_type = other RNA
cggtggctgcctcgggtagtcgctggggttctagggttctaccatcgaccaccacgggatgcacatcgcgagctcgccgctgtcattgagctaagcgatacttttcgggcggctgtcgagcgtagcgtcgaacagaggcggccgatcagaatcgcgcattatgtggtggggccaggacatggtgcgaagcacgccgtgctcccgctcaatgatctggccgaccttactagacttttgggcttgacccctgaccaactcgactggtttagtgacacacgccactggaaccgccgagcatcatcaggctccctccagcactacagatacgaatggcgcgcgagagccggacgagttccaagactcctggaagttcccaggcctaggctgagagaggtacagaggaaggttctgtctttgatactgagtcggctagctgtccatgacgccgcccatggattcgtgcccggaagaagcgccgcaactggtgctaggccccacgaaggcgcaaaagtactgattaatctcgatctgagcaccttcttcaccagagtgactgctggcagggtctacggcgtgctgcgacaagagggatttcctgaggcagtggcccacacaataacagggctgtgcacccactccgttccacctcggcttgtgacggctgccccctctggtggtcgcttagacgaacggttcgttctcaggcaggctctggctgtgccacatcttcctcagggcgccccctcctcacctatgttggccaacttagcggtgcgtcgattggaccggagacttacggggtgggccgaagcagcaggagcagtctataccaggtatgccgatgatctggcttttagtggcggggatgatctgacaaggcgggccggagcttttatccgtggggtgcggagaatcgtcgaggacgagggccactttgtgaatgcacgcaaaacccgcgtgtctggctggtccgtaaggcagtcggtgacaggcatcgtggtgaacgagcatactaatgtcacccgctctgaattcgaccgcttgaaggccgtactgcacaattgtgttctgcacggtcccggaagccagaacagatcagggcaccacgacttccgatcccacctccttggcaggattgcttgggtggcaatgttaaaccccgccagaggagccaaactgcgtgagacattcgataggattctgtggtga

SEQ ID NO: 12904 - RNA, 1389 nt, synthetic construct
  source 1..1389: mol_type = other RNA
atgttggccgctccagcatggaccgaggctgccttggttgccgcttgtgccgctgctctaggacccgcagcggaactgtccaccaccttccatcacgatgccgacccgggcgatggtgggttaagagatgacggaagccgggacgacggtccacatgacgatggccctccccacccttggctacctggtcttgcgcacgaggccttgcgcgcatttcccagggctccccacgacgagccaagactgctggccgaggtgctccacactagtggtgccctcggacgcggtagagcacgtgctgcagcccagggtgcatctctgaggatagttcgcgtggccgtggtgactactccaacgcgagctgccgatcctcgtctccgcagactagggtccgttgccgacctggccgcattactgcacctgacagtcggcgagctggactggttcgcagacgtccggcattggaatcgacggcacgcctctgggcctcttcagcaccacaggtacgaatggaggaccagacccggcaggacgccaagactcctggaggtccctggccatagactgcgcgacctgcagcgcgtggctttggatgaagttctcgccgccgtccctctgcatgacgcagctcacgggttcgttccggggcgttctgctgtaacaggcgccgctgtgcataccggagcggaagtcgtggtggctctggatctgagaagcttttttgcacgcgtgggagcaggacgcgtgtatggcgctctgcggagggaaggcttgccagaggccgttgcgcatgtcctaactgggctgaccacaacaagcgtacccccggccgtacttagcgccatgccaccaggcggcgatccttcagagagggccgctctcaggagggcacttgcgcttcctcatttggctcaaggagcgcccacaagtccggcactcgccaacgttgcctcacgacggctcgattccaggttagctggatgggcggcagcggcaggtgcaagatacactcgctatgccgacgatctcacattttcggggggacccggagtagccgcaagatcagatgccttcgtcaggggagtaggccgtgtggtggccgacgaagggcacgaactgaatccacacaaaacccgagtgcgaggggctgctacgcggcaaactgtgaccgggatcgtcgtgaacgagcacgtgaccgtcactcggacaagttacgatgcgctgcgggctcttctccacaatgccgaacggaccggccttgaggcccaaaaccgggctggtgtgcccgagttcagagcccatctggagggccggattggctgggttgagcagttacatcccgccaggggggcccgtttgagagaactgctggcacgagtgcctcgctga

SEQ ID NO: 12905 - RNA, 1374 nt, synthetic construct
  source 1..1374: mol_type = other RNA
atgacaggagctcccgacgctgtggcaagaggtctggcactcgcgctccttgctgtggctgacgccgattggaccgaacccggactcgtcaccgctgcttcggatgccctgggactggagccaggcgatgtggacgctcgatggctgcccggtttggcgcatgaggttctgcggcggttcccaagacctccccgtgacgaggctaggctgcttgctgtggtggtggaccgttcaggcgctcttggcagaggtagggaacgcgcccgcacagaaagacgcgctcttcgggtggtccatcccggtgttgttgcccctggccggacagagactgatgacgcaggagctggtgcccctgatggacgaccagaacttagaggcgttggggatctcgccgccctgttgggtctgaccattggcgaactcgaatggtttgccgacacacggctctggaacagacggcatcccagtggccctctccagcaccaccgctatgagtggagggcacgcccaggcagaacaccacgactgctcgaggtgcccgggttcaggctcagagacttacagagagtcgttttggatcgagtgttagcaggtgccccggtacatgacgccgcgcatggtttcgtcccgggaagatctgctgttacgggggcagctgtgcatcagggcagtgaggtggtggtggcactggacctgcgctctttttttgcgcgcgtgacagctacccaagcctacggagcactgcgaagggaggggctacctgagcctgtcgcccacttactggtcggcttgtgcactaacgccgtgccagccgccgtattgagcgccatgcctcctgggggggaactggatgagagagtggccttacggagggcccttgctgtaccccaccttgcgcagggagccccaacttctccggccctagccaatttggccatgcgccgtctggattcccggttagcaggatgggcagcagcggcaggtgctcgttatactcggtacgcagatgacctttcattctccggcggacaagaagtagcagccagggcggatgccttcgtcaggggagtcgggaggatcgtagccgacgaggggcacgagctgaatcctcacaagacccgggttaggggtgccgcaactaggcagacggtcaccgggatcgtggtgaatagcgggaccaacgtcacccgagcttcctacgatcggttgcgggccatgctccacaacgccgcaagcacaggactagaggctcaggaccgaggcggggaaccagactttcgcgcccacgttctaggccgcatagggtgggtggagcagctgaatcccgctcgtggcgcaaggctgagagaactgctggcgcgcgtgcccaggtga

SEQ ID NO: 12906 - RNA, 1371 nt, synthetic construct
  source 1..1371: mol_type = other RNA
atgagcgtgcggtcacccgcttcagctgcaggagcccacgaaccagacccaggacccgacgctgtcgccactgttctcgctgacgcattcttaggcgccgaatggtctgtccgcggactcgcagcagcagcaggtgaagctattgacggctctgcccggttttggcgtccactagcgcgggacctggtccatgcccttcctcgagccccccttgacgaccctagaacactggccgcgctgataaggagagatcccgcgttcacggaagcagtggctgaagcacgacggcgcggacgtcctctacggaacgtgcaccacgtgccggtgactcaggaggcaaggtcagcggacccgagattacttagactaggcaccgtcgctgacgtggccaggctgcttcacctgaccgtcggggagctcgattggtttgcagatccaggcaggtggcaccgtagggtggatggtggcccactccaacatcaccgctatgagtggcggagcagacctgggagaacacctaggttgctggaggtgccagggtttagactgcgcgatctgcagcgcgtggtcttggacgaggtgcttgctgcagtacccctgcacgacgctgctcacgggtttgtgcctggcagaagcgctgttactggggcacggcggcatgttggacgagaggtcgtgatcgctctggacctgacatcgttcttcgccagggtgacagccggacaagtgtttggatccctccgccgggaaggccttccagatgctgtcgcccatgtcctgactggcctctgcaccaccagtgtacctcccggcgttctctccaggatgcccccaggtggcagtcccgaacagagattcgccctgagacacgccctggctgtggcacatctagcccagggtgctcccacatccccctccttggccaatgtggcggtccgcaggctggatagtaggttggatggttacgcccgagcagccggggcaacctataccaggtacgccgacgacctcgcctttagcggcgatggaaccttagccgctagggctgatgccttcgtacggggggtgggacgcattgtcggggatgaggggcacttgctgaatcaggccaagacgagggttcgaggagcggccacgcgtcaagtggtgactggagttgttgtaaaccagggcacaaacaccgtgcggtctgagtacgaccagctccgcgctgttctgcataatgctgccactacagggttagaggcccagaaccgcgccggtcatcctgatttcgcggcccaactgtgggggagaatcggctgggtagagcagctgcatccgggtagaggcgcccgtttgcgagctgcattcgcgcgtgtgcctagatga

SEQ ID NO: 12907 - RNA, 1377 nt, synthetic construct
  source 1..1377: mol_type = other RNA
atggatgaatcaagtggcagccggaggtcacatctggtgacacggccaggtcctcctcctgcaccagacgtagcaaccgccctagcaggcgctttcttggcagcggaggaatggtctgccccatcccttcgtgaagccgcagcagcctgtctcggatctcgcaggcgctttgttgggcctgtcgtgactgccgttctgaccgcccatttacgcgctccaagagatgccccacgcgaattggccgccctgatcctgagggtggatggctttgaggacacagtacgcagagccagtagaaggcggcccgtgagaatcgcccaactgtcacccaccacgacggtcagtcgggttgctgatgagaggaggcctagagtcgacaccgtcgctgacctcgctcgcctgttgggcaccgatgtgggccatctggattggttcgctgacacaaagctatggaacaggagagcaccggccgggcctcttcatcactataggtatgaatggcggcaaagacctggacgagttccgcggctgttggaagttccaggcctgcgcttacgggagatccagcgcaccgtcttagatgagctcctggccccgttgcctctccatgatgccgcacacggatttgtagcgggtagaggagctcggagtggagcggcactgcatactggcagagaggtggtcatagccctggacctcgtcagcttcttcgccagggtggacggcagaagaatttattccgtgctgcgtcaagcagggttacccgagcccgtggctcactcggctactggacttgtaacacacgccgttccccccgctgtcctttcagcgatgcccccaggagggacctccgatgagcggtttgccctcagaagggctcttgcggtaccccacctgccccaaggtgcaccaaccagcccaatgctggctaatctggccgtgcggaggcttgactctagactaggcggttacgctcgagcagccggggctacttatacgagatacgctgatgacctcgcctttagcggggatgctgctttggctggccgagtggacgcctttgtgaggggggtgggtcgcatagtctctgatgagggccaccggctcaatcacgccaaaacacgcgtgcgtcgtcgaggggtgcgacagacagttactggaatcgtggtgaacgagagcacaactattgggcgcagggaatacgacaggctgcgggctatcctgcataactgcgccgcatacggcccctcctcccagaatcgagccggacacgcagacttccgggcacacctcctgggtcgtattggctgggtggaaagcctggaccctgaccgaggacgacgcctcagagccgagttcgctcggattgcgtggtga

SEQ ID NO: 12908 - RNA, 1437 nt, synthetic construct
  source 1..1437: mol_type = other RNA
atgaacgcccgagacttggacgcctacaccagaacagtcgccactgcgctggctcacgcctttctgatggcagatacatggatgaaaccagccctcttagacgccggcgctagtgttttaggggctcgccgcaggtggttaggacctctggccagagagattttggccacctacaggagtcgaccaaccgatgcgccccgggaattggtggcagttataagatccgcgcccagctttgtgtccgctatagaggtgagtgtggagcggcaggccgcgattagaatcatccaccaccccacatctcctaccgaggcacgaataagggtggatcaagtcagtgccgagctggccctagcttctctcgctaatgctcataccgcatcggccaacccggcatccgctcacaccccttctgcacatacagtgactaggcttgacagcttggtggacctcgctgcactgctggacctcacgcaaggcgagctggattggttcgcagatgtcaggctctggaataggagggcgcgtccagggagactccaccactatcggtatgagtggcgtcaacggccgggtcgcactcctagattgctggaggtccccgggcagagactaagggccatccagcggaccgtccttgatgaggtgctgtcccccatccccttacatccagcggctcatggctttgtggctgccaggtcagccgttactggggctgccgtacataccggagcagcggtggttatcaacctggaccttactagcttcttcgcccgggttactgccggtcggatctacggtgtactgcgacaggccggcctccctgaagcagtagctcacactctggtcggcctagccgtgcatgctgtgcctccacacatcctttctcagatgccaccgggtgggtcacctggcgagagattcgcactgcgcaaggtactggctgtaccccatctgcctcaaggcgccgctacaagccctgccttggccaatctcgccgtgagacggctggacagcagactcgctggttgggccgatgctgccggaggacagtatacccgctacgccgacgatctggcctttagcggaggacccgaacttgctcgcagagccgatacagctattcgtggcatcacccggattgtggaagacgaagggcacacaatcaatccccgcaaaacgcgggttcgcgcggctattgtgaggcaggtggtgactggagttgtcgtcaataagcgtaccaacacaccacggcgcgaatttgaccagcttcgaagcgtcttgcataacgcagcaacgcagggccccgactcacagaaccgtggctcacactccgatttccgagcccaccttctggggcgcatttcttggatggaatcggtgaatccatcccgggggccaagactgagggcagcattcgcaaggattgaatggtga

SEQ ID NO: 12909 - RNA, 1329 nt, synthetic construct
  source 1..1329: mol_type = other RNA
atgcggcagcgaagcgtggctgtgggcttaagtcacgctatgctggcctgtcctgaatgggctttcgatgcacttgtcgacgcctgtggtcgggctcttggtgtgcgaccaggctggctctggcccttggtggacggtgtgctcggtgcctatagacgccctcctctggatgcccaccgcgaacttgcccggtggatcgaggcctcagatgattttcagagcgcattcgtcgcagccagagaggccgggagggtgattacgctagcgcgcctggagactgtagccgcctctatggcacccacctcgctcgctgttccctcgatcgctggcctgggcgaactggctgatttcctggaggtgagtcccagccagctggactggctgactgataccgtgcattggaaccgccgcacacctagagggaggcttcatcactacggatatgactggttggtgcggccagggagaaccccaaggttactcgaggtcccgaccccccgtatgaggcgagttcagcggttggtgctgagagaaatcttaggcaggctcccactaaatgacgcagctcacggctttgtaccgggaagatctgcggcgacaggagcagcagctcatgtgggcgctcagaccgtgataactttggacctgcgcactttctttgctagagtccccgctaggagagtctttagcgttttcaggcaggcaggctacccggaaggagtagcccatgcgctgacgggcctctgcacacacgccgtacctccatgggttggggctcggatgcctgctgggggatcctcagagaatcgcgcagctctcaggagggctattagcgagtcacatctcccccaagggtcccctacatcccccgcactgagcaatctggcggtgagacgcttggattcacgcctgagtgggtgggctgaagccagtgacgccacctacacccggtatgccgatgatctggcattttccggggttcgacttcgaggtagagccgccgttgctttcatcgccggcgtggaacgtatagtcagggatgagggccacgtgctaaatgagtccaagactcggattgccggaagaggagcgtcccaacgggtgacaggcctggtagtgaacgacgttgtcgccgtcgaccgtgcctacttcaacgaattgaaagcgattctgcacaactgcgcagcccacggaccacgtgggcaaaaccgtgccggtcaccctgactttcgggcccatcttgcaggacgcctcgcatgggtggagtctgtctctccatctcgaggcgccaggctgcggagagattgggacaggatcgactggagctga

SEQ ID NO: 12910 - RNA, 1329 nt, synthetic construct
  source 1..1329: mol_type = other RNA
atgcggcaacggtctgtcgctgtcgggctcagtcacgcgatgttagcctgcccagagtgggccttcgacgctctggtcgacgcctgtggtagggcccttggagtgaggcctggctggttatggcctctggtcgatggcgtgttaggggcctaccgtcgccctccactggatgctcatcgtgagctcgccctgtggatcgaggcgagcgacgattttcagagtgctttcgtggccgcacgtgaggccggaagggtcatcaccctcgccaggctggagactgtggctgcatccatggcccccacttctctagccgtgccctcaatagctgggctgggggaacttgcggactttctggaagtattgccgtcccagctcgactggctgacagatacagtgcactggaatcggcgcacccctcgtggcaggttgcatcattacggttatgattggcttgtgcgacctggcagaacccctcggttgctggaggtgccaactccccgcatgaggcgcgttcagcggcttgtcctgcgcgagatcttgggccgactgcccttaaatgatgctgcgcatggctttgtcccgggaagaagtgcagccacgggtgctgcagcccacgttggagctcagacagtgatcactctggatctaaggacgttcttcgccagagtgcccgcacgacgagtgttctcggtgttcagacaggcggggtatcccgagggtgttgcgcatgctctgacaggcctgtgcacacacgccgttcccccatgggtaggtgctcggatgcctgcaggcggaagcagcgaaaaccgggctgcccttcgcagagccatttcagcaagccacttgccacagggctctcctacctcaccagcactgtccaatctggcagtacggcggcttgactcacgcctgtctggatgggccgctgcaagcggtgctacttacaccaggtacgcggacgacctcgcttttagcggggatggaatgagaggccgagccgcagctgcctttatagccggggccgaaaggattgttagagatgaggggcacctgctgaatgggtctaaaacatcgattgcaggccgaggagccagacagaccgtgaccggactcgtcgtaaacgactctgttgctgtggatcgcccatatttcgacgaactcaaggccatcctccacaactgtgcagcccatggcccgagaagccaaaaccgcgcaggacaccccgatttccgcgcacacctcctaggacggttggcctgggtggaatccgtgtccccctccagaggcgaacggctcagaagggagtttgacaggattgactggagttga

SEQ ID NO: 12911 - RNA, 1614 nt, synthetic construct
  source 1..1614: mol_type = other RNA
atggccgccagcattcgtgaagaggccgctatctctcggacctcggttcccgaggaaaataacggcgcaagacgcagacgcaggctgcccttagcttggggcaacgctactgactgtgggcgaggggggtggagtagacagaccaacactttatcaggcgtgacacccgggtataatagccagcctgagcgcactacagcaggaactactcccagattcgcacgttcccgtgcccgaactgatcgcagcgtggctcggggttcatctcatcccttccagggctctgtaaaagagcacagcattgctgtgggcctgagtcacgccatgttggcagcgcccgaatgggcctttgaccctctcgtcgacgcatgcggcagagcattgggcgctaggcctggctggctttggcctttggtcgacggaatcctggatgtctatcgaagaccgcccagagacgcacacagagagctcgcgcggtggatcgaagcgagtacggccttcagaggagccatagaagctgctcgggaggccgggagaagcattgctctggcacacctggagacaattccagcgagcatgggcccaacgccactgaccgtgcccagcatcgctggtcttggggaactggccgacttcctgggagtgagtccgggacagctggactggcttacagacactgcccatttcaaccgcaggaccccacgaggccgactgcatcactactcctacgattggctggttcgccctggtagggctcccaggttactggaggtccccacgcctcgcatgaggagggttcagcggcgtgtacttcgggagatactcaccgccctgccactcaatgatgcggcccacggattcgtgcctggtcggtctgcagttacaggcgccgcagcccatgccggtgctgaaacagttatcaccctcgatctacaaaatttctttgcccgcgtccctgcccagagagtctactctgtgtttaggcaagcagggtatccagaggccgtcgctcacgccttgaccggactctgtacccacgccgttccaccttgggtgggagctaggatgccggtcggagggagtttggaagatcggcttgcattgaagcaggctatctccggctcccatctgccacaagggagcccaacctcacccgcgctttccaatctctcagtgagacgcgtcgatacacggctgaacggatgggccgcagcttctggggcagcgtacacacgatacgctgacgatctggctttttcaggagagggactaaggggtcgggcagccgcaacctttatagccggcgtggcacgcatcgtgttagacgaggggcatctgctcaacgaatccaagactcgcatttccggtcgtggagccagacagagcgtgaccggcctggtagttaatgatggcgtggccgtggaccggctctatttcgatgagctgaaagcgattctacacaattgcgccgtgcacggtccgcacggccaaaacagggcccagcatgctgactttagggcccatcttctcgggcggttggcttgggtggagtccgtgtcgcctagtaggggcgtaagactgcgacgggaatttgaccgcatcgattggtcttga

SEQ ID NO: 12912 - RNA, 1038 nt, synthetic construct
  source 1..1038: mol_type = other RNA
atggcccccacctctgcagccgttccctctttagacggactgggagaactggcagattttctcgaggtcacgtccccgcaactggactggttgactgacacagcccattttaaccgcaggaccccccggggcagattacatcactatagctatgattggttggtgcgtccaggtagagctccccgccttctcgaggtacctactcctcggatgcgaagagtccagcgccgggtgctcagggatatactggggccactccccttaaacgacgccgcgcacgggtttgtaccgggaaggtcggccatttccggcgcatcggcacacgctggcgctcataccctcatcacacttgatctgagtacgttcttcgcccgagtgcctgccaggcgtgtgtattctgtgttccggcaggctggctaccctgaagctgtcgcccatgccctaaccggcctgtgcactcacgctgtacccccatgggtcggtgcacgcatgccaagcggaggaagcccagaggatagagccgcccttcgtgatgctatatccaggagtcacctgccccagggaagtcctaccagcccagccctctctaatctgactatgcggaggcttgatagccgcctcacaggttgggcagctgcatctggtgcggtttacacaagatacgctgacgacctggccttttccgggagtgatttgaggggccgcgcagcaacatcattcatctccggcgtcgataggattgttagggccgaagggcatgtgctgaaccggagcaagactagaattgctgcgcggggtgcacgacaatccgtgaccggactagtggtgaatgacggcccctcagtggataggcctacctttgacgagctgaaagccctgctgcacaattgtgtggttcacgggcctgcctcacagaatcgagctgggcatccagacttccgggcccaccttctgggcagattgaactggatcgcgtcagtcagccagacccgagggacacgcttgcgcagagacttcgacagaatcgactggtcttga

SEQ ID NO: 12913 - RNA, 1356 nt, synthetic construct
  source 1..1356: mol_type = other RNA
atgcgccctggagcaacagcccagccatctgccactaccctagccgccgggcttgcacacgctatgctagcttgtccgctgtggacctttgacgtgctcgtcgatggctgcggcagggcacttggaagtcgcccaggatggctctggcccctcgttgagcgcgtcctcagtagttaccatcgccctccccacgatgccactagagagctggcaagatttatcgcccagacgcgtgccttgcacgatgcggtggaagctgcgcgtgctgatgggaggactatagcccttcagcacctggagacaacaccagccaggtcgggggaaaatggcgcccgaggtgtcccaaggatcgatggcctaaatcaattagccgaatttttcgccgtcacaccaggtcagctcgattggctgaccgacacagcccactataatgggagaacgcgtcgggggcgccttcaccattactcttacgactggatgcggagagaagggcgggctcccagactgctcgaagttccctccaggcggatgcgtgaggcacagcgattagtgctggctgagattctgactcctctcccgttacatgacgcagcacacggcttcgtacccagcaggtctgcgattacaggcgctgctgcgcatgtcggtgccgaaaccttgattacactggacctgtccaccttctttgcccgcgttccagcccgaagggtattcggcatccttcggcgagcggcatatcccgaggccgtagctcatgctctgaccggcttgtgtacccacgcagtgcccagctgggtcctggcaagaatgccgcctggagggtcccctgaagaaagggcagcccttcgggagtctttgacgaggtcccacctgcctcaaggctcccctactagccccgccctgtcaaacttgtcagtgcgaggtctggacgggcggttagatggttgggccgctgcttcaggcttcagctacacaaggtatgctgatgacctctgcttcagcggacctcacctcacccatcgagcggctgcttcttttatcgcaggtgctgagcgcatcgttgccgctgagggacaccgggttaatcggcgcaagaccagaatttcaggagcgggcagtagacagagcgtgaccggcatagtggtgaacgagcgcctcaacgccactcgcgagcatgtggacgagctgaaagccattctgcataactgcgcagtgcatggccaggcctcccagaacagattcgggcacccagaatttagagcccacctggaggggagaatcacttgggtggccgcactgaatcccggaaggggagcaaggttgcggcggcaattcgacctgatcgactggggatga

SEQ ID NO: 12914 - RNA, 1188 nt, synthetic construct
  source 1..1188: mol_type = other RNA
atgctcgccgcctatcataggcctcccggaggtgcaccgagagaactggccaggttcattgcgcaaacgagtgcctttggcgccgctgttgctcgggcagtggagaagggggtccccattcccgtagccaggtacgctgtgggattcgccgctgtgggtactagcgctggcattgcagctgatgtcggcgccctggcggaactgctcgacttaacggtgggcgagctcgagtggtttgctgacaccggacactggaataggcgggctaggcctgggcctcttcgccattacagatacgcatggagaacaagaaccgggcgcgtaccccgactgctggaagttccaggtcccagattgaaagctgtgcagcgcagggtgctgcaccagatgctggggtcgatccctctccacgacgcagcccatggctttgtaccaggacgaagtgtggccactggggcagggagacatcttggcgccgagatgcttataagccttgacttgcgggcttttttcagctccgtgggggccagtcggattcacggaatcttccgacaggcaggcatgcctgaggccgttgcgtacacactgacaggtatatgcaccgccgctgttccacctgcggtcctgtcacggatgccagacggcggttctcccgacgaacggttcgcactgaggcgcgctttggccgcagctcatttgccgcaaggcgcaccatcctctccagcactggcgaacttgtcagtgcggcgcctagacagccgattagccgggtgggccgaagccactggagcagtttatacccgctatgctgacgatctggcattttccggatctgagcctctggccagaagggccgacgcgtttgtcaggggcgtggaaggcatcgttacctcagagggccacctcgtgaatccccggaagaccagggtgaagggtgcctccgtccgccagactgtaacaggagtggtggtgaactccgtcccaaacgtccctcgacccgtcttcgatgagctgaaagccatccttcacaattgtgtggctgatgggcccgaatcacagaacggagcccgtgggccagctcaccgtgatttcagagcccacctactcggccgtattagctgggtcgagtctctcaatccggcacggggacagagattacgcgatgatttcgatagaatccagtggtga

SEQ ID NO: 12915 - RNA, 1299 nt, synthetic construct
  source 1..1299: mol_type = other RNA
atgcaggggcgtgaggtgctggttgaaacgctggtgcacgcattcctgggcgcagagtggaccgcagatgctcttagcgcagcagccgtagacgctttgggcgcacgaagaagatggcgaggccgggttgttgcgggcgttttagtcgcctttccccacccccccttagatgcccctagggagctagccaggtgcctggacgcactcctgcctgaccgtgctcaacccggggttgcgcatctggctcctgtggctgcgagagcctcagcttcaagctctcctgtcccgcgcatagatggctggggggacttggctaggctgcttgccctgacaccgggcgaacttgaggccttcgccgacgtgcagcactggaaccgaagagcccccgagggacccgtacagcactacgaccacgtgtggcgcgaaagacctgggagggcaccaaggctgttagaggtccctcgtccacgcctgcgggcagttcaacggtcggtgctggatcagctcgtggggttagccccagtgcacccagctgttcacggctttgtccccggccgatccgctatttctggggctgctgtccatgccggagctgccatggtcgtgacccttgatctgcagcggtttttcgcccaggtaaccgctccaagagtcttcggcgtactccgggcagagggtctaccagaaggggtcgcacacgccctaacgggcctgtgtactcatgaggtgcccgtggccgtgctgcgaagaatgccctccggtggaactccagaggaacgcgcggccttgagacgctccctctctctggcacacctccctcaaggagctcccaccagtccggctctcgccaatgtagcgcttaggcggttggtggccaggctagcgggatatgcggaagcggctggagccaggtatacacgctacgctgatgacctcgccttttcagggggtcctgctttcgccaggcgtgcagacgcttttgcacggggagcagctaggcttgccgccgaaagcggttgggccgtcaatcctagaaagacacggctccgcccggccagtaccagacagacagtcactggggtggtcgtgaacgcccatcctaacgtgcggagggcagacgtggatcgcctgcatgctatcttgcataattgcgccgtgcacggcagcgctggtcagaatagggccggcgtgccagattttcgcgcccatctcctgggaagagtggcgtgggtggccgcagttaacccacggagaggagccgccctgcgagcattgttcgactccatcacctggacttga

SEQ ID NO: 12916 - RNA, 1362 nt, synthetic construct
  source 1..1362: mol_type = other RNA
atgcacggacgcgacgccgttgtggaagcgttggcccacgctttcctgggtgcagagtggacaccagccggcctacgagctgctgcagcagatagcttgggcgcccggaggagatggattggaccactcgtgacggctgtgctggtggcgtttccgcatcccccgctggatgctcccagagaactggcccaggtagtcgccggcctccttcctgaaagggcccaacccgtcgttgcccatctcgcacctgtacccgcacgcgcagttccatcctctagccctgtgcccgcgattgacggacgcgatgacctcgccagactacttggcctggcaccggcacagctggacggttttgcagatcttggccagtggaatcgtagaaccccccatggggcactgaaccccggtgctttgcagaactacgatcacgtgtggaggcagaggccaggtagggctccacgactgctggaggtccctcggtcgcgtctgagagctgtgcagaggtcagtgctggacgagatcgtagggttggcgccagtccatcctgccgcccatggtttcgtgcccgggagatcagccattaccggggctgctgtccatgccggcagtgcaatgctgataacactggacctacagcgcttcttcgctcaggtgactgctgcccgggttttcaggcttctccggggggagggattaactgaggccgtcgcctttgccctcacggggttgtgtacccacgccgtgcctgtcgctgccattcaccgcatgccagcgggtggcgaacctgaagaaagagccgccctgcggcgatctcttgcccttgctcacctaccccaaggggctcctactagccccgcgttagccaatctcgccttgagacggctcgatgcgcgactgactggttacgccgaggccgctggagctcgctatacaaggtacgcagatgacttagcgttttccggcgacgcccgctttgctagacgtgcagaggcctttgccaggggagctgctcggatcgtggaggacgctggctatgctgttaatccaagaaagacacgactgcggccagccagtacccgccaatccgtcaccggcatcgtggttaacgcccaccccgcagtgaggagagccgatgtagaccggctgcgcgcaatcctccacaactgcgcagtccacggacctgccgggcaaaatcgggctggagtgcccgacttgcaggctcatctcctggggcgaatcgcatgggtgtctgcggtgcaccctggtagaggagccaggctgagggccttattcgagcggataccatggcctgaaccgagcggtgcagcaccatccctggatccggcaggacctcgtccctga

SEQ ID NO: 12917 - RNA, 1305 nt, synthetic construct
  source 1..1305: mol_type = other RNA
atgcaagggcgtgatgtcctggtggagacactgacccacgcgttcctgggcgctgaatggactcgtgatagcctgagagccgcggctgttgattccctgggagcgcgacgcagatggcttggacctctcgccactggcgtcctagtggcctttccacaccctcctctcgacgccccacgggaactagccagatgtattgcaggcctcttaccagagcgagcgcagcccgtcgtagctcatttggcacccgtgccggcacgcgctttaccttcaagctcagccgtgccaagaatcgacggacgagacgacctggctcgcctattggccatcaccccggctcaactggatggctttgcggatctgggccagtggaacaggagagctgcggaaggcgccgttcagcattatgatcacgtgtggagggaaaggcctggcagggttccccggttgctggaaattccacgggccagactgcgcgcagtacagaggacagtgttggaggaggtagttggccttgccgcagtgcacccagccgcacatggcttcgttcccggacggtctgccatatcgggtgcagccgttcacgccgggagtgcaatgctggtcacactcgacctccagcgattcttcgcccaggtgactgctccccgcgtctttgggttactgcgggctgagggattgccagaggcagtggcttacgctctgacaggcttgtgcacacgccccgttccgatcgccgtgttaagacggatgcctacggggggcgatgtcgaagctagagcagccctgcgaagatcccttacgctccctcacctccctcagggagctcccacctctccagcattggccaacctcgccctgaggcggcttgatgcgcgtctcaccggttacgctgaggccgcaggagcacggtatactcggtatgctgacgacctggcattctccggcgatgagcgctttgcacgccgagcagaagcttttgctcggggggccgcgagaattgtcgaggatgccggttacgccgtgaacccccaaaagaccaggctgaggcctgctagcgtcaggcagtctgtcaccggagtggtagtgaatgtgcacccgaacgttcgcagagccgacgtagaccggctgcacgcaatccttcataattgcgtggtgcatgggccaagtgggcagaataggggagctgtgcccgactttggggcccatctgctcggtagaatagcctgggtcgctgccgtgaatcctgccaggggtgccaggctgcgtgctcttttcgacgccatcgtgtggcccggggcctga

SEQ ID NO: 12918 - RNA, 1299 nt, synthetic construct
  source 1..1299: mol_type = other RNA
atgcgtggtcgggacgcgctcgtagaggcacttgtccacgcttttctcggcgccgagtggacccacgacgcattaagagctgccgccgcagacagtcttggggctagacgcaggtggctaggacctctcgtcacaagagtgctggtcgcttttcctcaccccccagtggatgctcccagagaactgggccggtgcatagccgctctactgcccgataaagcccagccggtggtggcacatttagctccagttgctgcatcagctgccgaatccagcagtcccgtgcctcgcatagacggaatcgccgacttagccgccctgctcggactctcagttgacgccttggacggcctggccgattctggcagctggaatcgtcgggcaccagagggtcgtctgcagcactatgatcacgtctggcgagaaaggcctggtcgcgtggctcgactattggaggtgccaaggggacgactgagggcagttcagcggtccgctctggacgagattgtggggttagccccagtgcatcctgcggcccacggtttcgtgcctggcagatctgccatcactggcgcggccgagcatgtcggatctgctgtcgtggtgaccctggatctccagcgctttttcgctcaggttaccgcccccagagtgtttgggctgttgcggcgcgaaggtctgccagaggcagttgcctacacactgactggactctgtacacacgccgtaccggtcgcagtgctgaggagactgccggagggaggctcacctgaagaacgtgcggggctgcgcagagccctcacacttcctcatttgccccaaggggctcccaccagtccagccttggccaacctggctctgcggcgacttgatgctcgcttgaccggctatgcagaagccgccggggcaagatacacgaggtacgccgacgacctggccttctctggcgacgagagcttcgctaggcgcgcagaagcctttgcaagaggtgcgcaacgggtagttgaggacgccgggtatgctgtgaaccctcgcaagacgcgcattaggagagcatccgtgaggcagagcgtgactggcgttgtggtgaatgtcaggcccaacgtccggagggctgatgtagatcggctgcacgctatcctccataactgcgcagtgcatggccccgcgggtcaaaatcgggcaggagtcggggatttcagggcccacttgcttggacgaatcgcgtgggtagccgcggttaatccagggcgaggcgctgcacttagagccgtcttcgatcggattgagtggggatga

SEQ ID NO: 12919 - RNA, 1434 nt, synthetic construct
  source 1..1434: mol_type = other RNA
atggctgagccgaccggagtagacggggctcatccctttgctcgcacagccgatgttacaatcgcccgcaccacagatgcaacgacaacgaggcggacagctgtggcatcggctcgtacagcagagatcgccaccgtgcttgccgacgcctttctcgctgctgaagactgggccgttgacgccttacttgcagccggcactgcagccgtaggtccccataggcgcttcgtgcccatgaccgtcctcgcagctctaaggggatatcctcgggcacctcgggacgctcccagagaactggcagcgtttctgcagagtgttgacggtttcgccgaggcggtaaggcgatccgcggaaagagcgcccattaccgtggcaagtcgaagggccactcctacagaggcaccccctaatacaggccacgtgccccgcattgacaccgtcgcagatctggcacgcctgttagacctgactattgggaggctggaatggttcgcggacaccaaacagtggaacagaaggacgcatgacgctgtcctccagcatcacggctatgtttggcgggccagaccaggacgagtccccagattgctggaagtcccaaagccgcggttgcgcgctgtgcagagaactgcactcgacgagatcctgacttttctacccgtacacgatgccgcccatgggtttgtgcccggacgttcagcagtgtctggagcggctcaacatactggccggcaggccgtggtcaccctagatctggcccattttttcgccgccgtgtccgcccctatggtttacggcctgctgcgcagaggcggtcttcctgagcctgtggcccacaccttaacaggcttgtgcatccacgtggtgccacctcgcgtcattgccgccatgccaccaggtggcaccccagaagacagagctgccctccgtagggccttggcaactccgcaccttccgcagggagctccaaccagccctactctggcgaacgcttccgtctggagactggacacacgactcgccggatgggcagcgagtgcagatgccacctacacgcggtacgctgatgacctcgccttcagcggcgatgatcgtttcgccgctagagtggacgcttttgtaaggggcgttgggcgcatagtgaccgatgaggggcacatactgaatgcctctaaaactcgggtgcggcgacggggtgtcaggcaatcagttaccgggatcgtggtgaatgaaagaccaagcgttggaagggcagagttcgatcgcctgaaggctattctgcacaactgtgctgagcacgggcccgacggtcaagatcgtgtgggggtccctgatttccgcgctcacttgcggggaagagtcggctggtttgagcaggtgcatccagagaggggcgcccgacttctcgccgaattccagcggatcacatggtga

SEQ ID NO: 12920 - RNA, 1314 nt, synthetic construct
  source 1..1314: mol_type = other RNA
atggttgcaggcgccctagccgacgccttcctagctgctgagggctggcaccgagacgagttgaccgctgccgggtatgatgtgctcggcgtggagagaacctatgtaggtgtagctgtcggagtggccctggaggcttatccacgtgcacccgtcgatgccccacgacaattagccgcagtactcgctagtgcccctcggctggttcggctccatgattccagggtacccctcagacccgtccgcgttctgttaaggagggccaccgcagtgagagcacgtccaatcgtcgcatcgcgccttctggtcgatacgctccccgagttggctcgcgaactggacttaacggctgggagattgctatggctggccgacaccaaaggctggaaccggcataggggtcccacatccgcgctgcaccaccatcgtcacgagtgggtgcaacgccctggcagagcaccaagactcctggaaaagccaatggctatgctgaagcggactcagagaacaatcctggacgagcttttagccgctatgcctgttcacgacgcggcccacggattcatcgccggaagaggggtagtgagctctgcggccgaacacgtgggatgccctgttgtgctcagcgccgacctcactgccttctttgctaacgtgagggctgcgacagtctacggcgtgtttcgctctgcaggtttcgcggagccccttgcccatgtgttgaccggcatctgtacgcacagagtgccaccccatgtcttgaccgccatgccccctggaggggatcctgatcagcggactgccttgaggcgggccctgactgaagctcatctgccccagggagcccctacaagccctgctctggcaaatctcgcgctgcgacacctggacgttcggcttgcaggctgggcagcagccgtggatgctacatacacccggtacgccgacgacctgaccttttccggtggcgatgctctggctgcaaggccagatgccttcttgagaggcgtcgaccgtattgtcactgagcagggacacacccttaatgcacgcaaaactcgagttcgaagggccggcgtgcgacagtcagtgactggagtggtcgtgaacgaacgcacatcaccggggcggagggaagtggatcgccttcatgccatacttcataattgcgtggtccacggtccggcaagtcaggatagggacgggcacgctgactttagagcccacctgctcggccgcattggatgggtggggcaagttcatccggtaaggggggcggctctgatgacactgtttgcacagattcggtggtga

SEQ ID NO: 12921 - RNA, 1491 nt, synthetic construct
  source 1..1491: mol_type = other RNA
atggaattccccggagaggcagacggtgcgagagatgcctctacctcccccggatcacctcgtgggacacagtaccagcaagatgatacaccgagggaagctcggagagctcccagggcactcccacatggcggaactgaccggtcacctggcaatcccacacccacccccctcgacgtcgtagctagggctctggcagacagcttcctggccgctgatagatggaacagggacgacttaactgctgctgggtatgatgtgctgggggtggaacgcacatacgtgggtctggccgtgggaatcgcccttgacgcatggccacgaccacccgtagatgcccccagacagtttgccgcggtgttggccagtgatccgagactgatacggctacatgatagcagagtcccgctgaggccagtgagagtcttacttcgtcgcgccactgcggttagggcggtacctagggtggactctcgcctgctggtggatacccttcctgagctcgctagggaactggatctgacggtcggccggctaatgtggctggccgacacacgtggttggaaccggcgtccgggaccatctagtccacttcatcaccaccgccacgagtgggttcatagagccggtcgtgcccctcgcctactcgagaagcctatggcaatgttaaagcggacacagcggaccattctcgacgaactgttggtcgcaatgccagtgcacgatgctgcccacgggttcgtacctggaagaagcgtcgtctccggtgccgccgaacatgttgggcgatccgtcgtcctatcagccgacctgacgtctttctttgcgagcgttaccgctccctcggtgtacggggtgttcagaagcgctggatttgcggagcccttggcacacgtgctgacaggggtttgtacgcaccgcgtgccacctcatgtgcttaccgccatgcctcctgggggagatgcagacgcacgaggcgctttgaggcgggcattagccgccgcacatctgccacaaggggcacctacatcccccgccttggcgaatctgactttgcggcaccttgatgttaggctcgccggttgggctgcagctatgggaggcacctatactcgctatgcagacgacctcaccttttccggaggagacgctatggccgccagagctgacgcctttctgcgtggcgtagaccgaattgtcagggagcagggccacaccctgaacacccgcaaaactagggttcggcgcagtgctgtgagacagagcgtgaccggcgtggtggtgaatgagcgcacttcacccggccgacgcgaagtggataggctgcatgccgtgctccacaactgcgtcgttcagggtcccgcaagtcaagaccgaggtgggcacccagatttccgcgcccacctcctcggcaggattggatgggtagagcaggtgcatccaggcagagctcggcgactgagagatgagtttgcccggatccggtggtga

SEQ ID NO: 12922 - RNA, 1320 nt, synthetic construct
  source 1..1320: mol_type = other RNA
atggacgtagttgcaggtgccctcgccgacgctttcttgaccgccgctcgatgggagcgcgatggactcacggccgtgggatatgatgtgcttggggtcgagcggacgtatgttggcgtggccgtcggtgtcgcgttagatgcgtaccctaggccaccagtagatgctccgagacagctggcagcagtactcgctggggcaccacggctggttaggctgcatgaagcccgggagcccttaagaccagtccgcgtgctcttacgcagggctgctcccgtacaagcccatcccacagtggccagtcggctgttagtcgacaccctgcccgagctcgcaagggagctagacctgactgtgggccgtctactgtggctggcagataccagaggctggaatcgcggaccaggccccacttctccgcttcaccatcatcgccatgaatggctgcaaaggcctgggagaactccccgccttctcgaaaaaccttacgcgatgctgaaacggacccagcgcactgtcctggacgatctcctggccgtgcttcctgtgcatgacgcagcccacggcttcgtggctggaagatcggtagtctccggcgccgcggaacacgttggaagaccagtggttctgagtgctgacctgacatcttttttcgctagcgtgaagagccccacagtgttcggggtctttagaagcgcgggatttgccgaaccccttgcccaggtgctgacagggttgtgcacccacagggtgccacctcacgtgcttacagccatgccccccggaggtgatccggatgaaagggcggccttgcgtagggctcttgcagctcctcatctgcctcagggcgccccaacgtctcctgcactggctaatctgtcactccgccacctggacgctagattagcaggttgggccgctgctgtgggcggaacatatacccgatacgcagacgacctgactttctcaggcggtgatgccttggctgctaggccggaggcctttttgcgaggcgttgaccggattgtgaccgagcaaggccacacactgaaccggcgcaagaccagggtccgtagagcaggtgtgcggcagtccgtcactggcgtggtagtgaatgagcgaaccagcccagggcggagggaagttgatcgactccacgccgtcttgcataactgtgtggaacacgggccttcctcccaggacagaggagatcacgcagacttccgagcccacttgctcgggcgtatagggtgggttgagcaggtgaaccctggacgcgccagaaggctatgggccgagtttgcccggatccggtggtga

SEQ ID NO: 12923 - RNA, 1311 nt, synthetic construct
  source 1..1311: mol_type = other RNA
atggcccaggcgctcgccgatgcctttttggccgctgacgactggtcccgtgacgcactgacggctgcagggtatgatgtgctaggcgtggagcgcacgtacgtgggagtcgcagttgggactgccctcgacgcataccccagaccacctgttgatgcccccaggcagttggccgctgtgcttgctacagccccccggttagtgcgccttcatgattcacgcggaccccggcggccagttagagttcttgcgagacaagccacagcagtccgagcacggcccgttaccgattccccgctcttagtagacaccctccctgagctcgctcgagctctggacctgacggtgggacggctactgtggctggccgatactaggggttggaaccgcagacctggcgcctctagtccactccaccacgttcgccacgagtgggttgcgaggccaggacgtacaccgcgactgctggaaaagcccatggcaatgctgcggcgaactcagaggaccgtcctggacgacttgctcgccgccttgccagtacacgatgccgcccacgggtttgtaccaggacggtctgtggtaaccggcgcagctggtcatgtcggcagaagggtcgtgctgaccgctgacctgaccagcttcttcgcaaccgtacgcgcccctaccgtttatggcgtcttccgagctgctggctacgcggaaccactggctcatgtgctgacagggctctgcacacacagagtccccgtgcacgtccttactgctatgcccccaggcggcagcattgacgagaggagagcgctgcgcgatgccctggtggaagcacatctgcctcaaggggcccccacttcacctgccttagctaatcttgcactccggcatcttgatgctcgccttgcaggatgggccacagctgctggggctacctacaccaggtatgccgacgatctgacattctccggtgacgatagactggctgcgagagccgacgcattcctacgcggcgtggagagaatcgtggccgaccagggtcatacattgaaccctcggaaaactagggtgaggccggcaggcgtaaggcagagtgtcactggggtggtggtgaacgaaaggaccgcgcccggtaggagagaggtcgatagactcaaggcagtcctgcacaattgtgtggtgcacggacctgcaagccaggatcgagctggccatgccgactttcgggcccacttgttaggtcgcatcgggtgggtgggacaggtgcatcctgaccgtgcggccaaattgcgggccctgtttgcccgtatagaatggtga

SEQ ID NO: 12924 - RNA, 1485 nt, synthetic construct
  source 1..1485: mol_type = other RNA
atggagttcccaggagaagctgctggcgccagagatgctccaacttctcccgggagccctcgaggaacaagataccagcaggatgacactccacgggctggtcgcagagctcctcgagcaacgccccatggagggactgacgggagttcggggaaccctacgcccctggacgttgtagctgtcgcgctcgcagactccttccttactgcagagcaatgggcccacgacgagcttaccgcagccggatatgctgtggtcggagtcgaacgggcctacgtcggcctagcagtagcagccgcattggaggcctatccacgcccccctgttgatgctccgcggcaattggccgcagtactggccagtagcccccgcttagcagagctgcaccgctcaagggaaccacgtagacctgtgcgggtgctcgcaaggcgagccacagctgtaaggagtcgccccgagacagtgtcaagactgctcgtggacaccctaccggagctggcacgggaactggatctcaccgtcggcaggttgctgtggctcgccgatacacgcgggtggaacagacgacccggtccttcctcccctttgcaccatcatcgccacgagtgggtgagacgccctggaagaacaccgcgcctcttggagaagcctatggatatgctccggaggacgcagagaaccatcctggacgagttgctcaccgccctgcctgtccatgacgcagcccatggctttgtggccggtcggtctgtcgttaccggagcagccgcacacaccgggcaacaagttgtggtgtctgccgatttgaccagcttcttcgcctcagtgagcgcccccacagtgtacggcgtgttccgctctgctgggttcgcggaaccactggctcacgtgctgaccggcatctgcacacaccgggttcctccgcatgtgctgaccgctatgcccgacggcggtacacccgaagaaagggcggcccttagacaaatgctcgccgctgctcacctaccacagggtgctccaactagccccgcccttgctaacactgcactgaggcatctggacgccagacttgctggatgggctgccgcggtagatgccgtctacactcggtatgcggacgatctcaccttttccggcggtcaccgtctggctcgtaggacagacgcctttttaaggggcgtggataggattgtcactgagcaggggcatagactgaatccaaggaaaacacgagtgcgtaggcgtggagtgcgccagaccgtaacgggagttgtggtcaacgagcgaactagtcccggccggagggaagttgaccggttacacgcccttctgcataatgccgccgagcacgggcccgcatcccaaaatagggccggccacccagattttcgagcgcatctgctggggcggataggctgggtggaacaggttcacccaggccgtgcgagacgcttacgggaggaatttaccagaattgtgtggtga

SEQ ID NO: 12925 - RNA, 1485 nt, synthetic construct
  source 1..1485: mol_type = other RNA
atggagttccctggagaagcagacggagcccgggatgcatcaaccagtcccggtagccctaggggaacacaggatcagcaggaccacaccccaagggaggcacggagagcacctagagctcgccctcatggtggcaccgacagatcccccggcaatcccaccccactcgacgttgtggccactgccctggctgacgcgttccttgctgccgatgcttgggacgtggaccacctaactgccgccgggtacgacgtggttggactcgagcgtgcgtacgtcggcttggccgtgagagctgccctggagacttatccacggcctcccgtaggcgcgccaagacaacttgccgctgccttggctggctctccccctttagtgaggctgcacgatgctcgacgcgatcgaaggcctgtcagagtgctccttcggagagcggtcgctgtgcaggcagtgccaaccgtgtcaagccggctcctggtggacacactcccagagctggctagagagctggacgtaactgtggggcgactcctgtggctggcggatacacgcggttggaataggaggccagggcctgcctcacccttgcatcatcataggcacgaatgggtacaccggcctggcaggacacccagacttctggagaagccaatggatctccttcgacggactcaacgcaccgtcctggacgagctcctggccatgctcccggttcacgacgcagcccacggcttcgtacccggaagatctgtggtcacaggcgcccgcgtccacgtaggtcaacaggttgtggtcagtgctgatctgactacctttttcgcatctgtcagagcacccagcgtgtatggcgtgtttcgttccgccggactagctgaaccgctggctcacgtgttgaccgggttatgtacccatcgggtcccggtccacgtgttaaccgctatgcccccagggggagatgctgatgaacgcggggccctaaggcgacttctcgcggattcccatctaccccaaggggcccccacttctcccgctcttgccaatactgttctgcggcacctggatgcacgcctggcaggttgggcagcatcggttggggctgcctacacacggtacgccgacgacttgacgttcagtggcggagcagagttggccaggcgaccagatgcctttctgaggggggtggaaagaattgtgacggatcagggctataggctgaacgcgccgaaaacacgagtcaggcgtgccggagtgcgtcagagcgttacaggggtggtggtgaacgaacggacggctccaggccgtagagaagtggaccgcctgcatgccgtactgcataactgcgttgttcatggtcctgtttcccaggaccgcggcggtcatgctgactttcgggcacacctgttgggcagaataggatgggtcgcacaggtccaccctgcacaagccgtgcgcttacgggccgagtttgatcgcatcgcctggtga

SEQ ID NO: 12926 - RNA, 951 nt, synthetic construct
  source 1..951: mol_type = other RNA
atgcttgcggacacccgcggctggaatcgaaggccaggttccgcgtctcccctccaccatcaccggcatgagtgggtaaggcgtccaggtcgtacacctcggctgctggagaagccgctggatatgctgagacggacacagcgcaccgtactggacgaactcttggctgtgttgcccgtccatgatgccgcccacggctttgtgcctggccgttcagtcgtgtccggtgccactttgcatgtggggcagagggtcgtgataaccgccgatctgacctctttcttcgctagtgtgcgcgcaaggtccgtgtatggagtgttcagggccgcaggatttgccgagccactggcacacgttctgaccggactgtgtacacatagagttcctacccacgtgttaaccgctatgcccccaggaggcgatgtcgacgaaagggccgctctcagacgcgccttagctgatgcacatttgccgcaaggagcccccactagtcccgccttggctaatacagttctccgccaccttgacgctagacttgcgggatgggcagatgcagctggggccgtttacacacgctacgccgacgatcttacgttttcaggggacgacagactagcccgcagagcggacgcattccttaggggggtagatagaatcgttactgaccaggggctaaggctgaacgctcgcaaaacccgggtgcgacctgcaagcgtgcggcaaagcgtcacaggcgtggtggtaaacgaccgaactgcaccagggcgaagggaggtcgatcgtctgcacgccgtgctgcacaactgcgctgagcacggccccgagagccagaatcggtctggccatcctgactttcgggctcacctcctcggcagaatcggatgggtcgaacagactaaccctggtcgggccgataggctgcggagagaattcgttcgaattacgtggtga

SEQ ID NO: 12927 - RNA, 1485 nt, synthetic construct
  source 1..1485: mol_type = other RNA
atggagtttccaggggaggctgcagacgccagagacgctagcacctcccccggttcacctaggggaacccaagaccaacaggatgacacacccagggctggaagaagagcaccccgcgcaacccctcacggtggtacagacggctcaccagggaatcccacgcccttaaccgttgtggctggagccctcgccgatgcctttctgacagcggaacactggggcccagatgatctgacagccgccggatgggccgttgttggagtggagcgcgcatatgtggggcttgcagttgcagccgctttggccgctcatccacgccctccagtggatgcccccagacagttagcagccgtgctggaggcttctcctaggctggcggaactgcacagagctagggaagctcgccgccccgtcagagtagtggctagaagggccacagcagttcgagcccggcctgagacagcatctcgactgctggtggacacactcccagagttggccagggaacttgacctcactgtcggacggcttctgtggctggcagacacgcgatcctggaatagacggcctggcccttcttcccctctgcaccaccaccgctgtgagtggattcgtcggcccgggagaacaccgaggttgctggaaaagccaatggacatgctgcgaagaacacagaggactatactggatgagctcctcactgcgctaccggtccatgacgccgctcacggattcgttgggggacgcagcgttgtaaccggtgcggctgctcacacgggtaggcagatcgtggtcaccgcggacctcaccagtttctttgccagcgtcactgccccgactgtgtacggcgtgttcagggctgccggcttcgctgagcctcttgcacatgtgctgactggagtgtgcacccatcgggtccccgtccatgtgttgtccgccatgccagatggcggctcgccagaagaaaggcaggccctacgggcgatgctgagagaggctcacctccctcaaggcgcaccaactagccccgcccttgccaacaccgcattgaggcatctggatgcaaggttggcggggtgggcagcatctgttggcgcagtgtacacccgctatgctgacgaccttaccttctccggagatgagcgattagcggcacggcccgatgcttttctgcggggtgtagaccggatcgtcaccgaacagggcctccggctgaaccccagtaaaactcgtgccaggcgccgtgggacaagacagagcgtcaccggggtggtagtgaacgatcgcacttcaccagggcgccgtgaagtagaccggctccatgctattctacacaacgccgccgaacacggccccgagagtcagaatagagccgggcacccggatttccgcgcacatctgttaggccgaattggctgggtggaacaggtgcatcctggtcgagcccgtcggctacacgaggagtttgcccggatcacgtggtga

SEQ ID NO: 12928 - RNA, 1485 nt, synthetic construct
  source 1..1485: mol_type = other RNA
atggagtttcctggcgaagccgccggagctagggatgcatccacttcaccaggggcaccaaggggaactcaggaccagcaggatgacactccaagggccggggagagggctcctagagcaacactgcacggcggtacagacagaagttccggaaatcctaccccactgtcagtcgtcactgccgcccttgcggatgcattcctgacagctgaacggtgggaggctgacgagctcaccgccgttggctacgtggtggttggcgtggagcgcgcttatgtcggcctggcagtcgctgccgcattggaagcctatccccgccccccagttgatgcgccaagaaggctggctgcagttctggccgctgctcctcggctagtggcccttcataggtccagagaggaccgtagacccgtgcgggtgttagttcgccgggcaaccgcagtgagagctagaccagagactgccagccgcttactggtcgacacgctcccagagcttgcgagggcactcgatctgactgtcggcagactcctgtggttggccgacacgcgggcatggaaccgacgatccggtccgtcgtctcccttgcaccaccatcgacacgaatggataacacggcctggaagggcccccagacttctggaaaagcccatggacatgctgcgccggactcagaggaccatcttggatgagctgctgaccatgctgcctgtgcacgacgcggctcacggttttgtgccgggcagatccgttgtcacaggtgccgccgtgcacacagggcagcaagtggtagtgaccgctgacctgaccaccttctttgcatctgttagcgcccccacagtgtacggtgtgtttcgcgctgcaggattcgcagagcctctcgcccacgtcttgacggggctgtgcacccatcgggtgcctgtacatgtactcagtgccatgccagctggaggctcaccggaggaaaggcacgccctacggcaagcgttagcgaccgcccatttacctcagggggctcccacaagccctgctctcgctaatacaagcctgcgccacttggatgcgcgattagcaggatgggcgggggccgttgatgccgtatacacgcgctacgccgacgacctcaccttctctggtggtgatcgccttgctgcccggccagatgcctttctccgtggcgtcgatagaattgtcactgagcaggggtataggctcaatccctctaaaaccagagtgagacgccgaggggtccgtcaaagcgtgacaggcgtggtggttaacgagcgtcctagtcccggccgaagggaggtagacaggcttcatgccgtgctgcacaacgctgccgtgcatggaccggcctcacagaaccgtagcggacaccccgaattccgtgcccatctactggggcggatcggctgggtcgaacaggtgaatcccggcagagcaaggcgcctgcgggaagaattcgcacgaattgtatggtga

SEQ ID NO: 12929 - RNA, 1485 nt, synthetic construct
  source 1..1485: mol_type = other RNA
atggagtttcccggcgaagctgccgatgctcgagatgctagtacctcccctgggtcgccccgggatactcaagaccagcatgatgacacaccacgagccggagaaagggcacctcgggctacaccacatggcgggacggatggtagccccggaaatccaacccctctgagcgtagtggccagtgcactcgccgacgctttcctgaccgccgaccgatgggccgtcgatgagttgaccgctgcaggctatgccgtcgtcggagtagagagggcttatgtgggccgcgctgttagtgcagctctggacgcatacccacgacctcccgcagatgcaccaaggcagttggctggggttctggccgccaatcccagacttgcggccctgcatagaagcagagaggcgcgcagacccgtcagagttttggctcgcagagccacagccgttagggcaaggcccgtgaccgactctcctctgctcgtggacactctgcccgagcttgctcgggccttggacgtcacagtgggacgccttttgtggctggcggatacacgcgcctggaacagacacgctcctgccggatctccgctgcatcacttacgccatgaatgggttgttcgccccggacgagtgccacgcttgcttgagaaaccgatggacctcttacggcgcacccagcggacagtactggatggcctgctgactcggttacctgtccacgatgccgcacatggcttcgtgccaggccgaagcgttgtgactggtgccgccgtgcacactgggcagcaagtcgtgctgaccgccgacctcactaccttctttgcaaccgtatccgcaccaaccgtgtacggcgtgttccggtccgccggatttgctgagccactcgcccatgtgctcacgggcctgtgcacacatagggtgccccctcacgtccttgctcgtatgccagcgggggggacacccgaagaaagagctgcactgagggaggcgctcgccgtagctcacctacctcaaggggctccgacttccccggcacttgcgaacaccgcactacggcacttagacgctcgtctagcgggttgggcatctgccgccggtggaagatatacgcggtacgcagatgaccttactttttcaggagatgatcggctggcggctcggtcagaggcctttctgaggggtgtggagagaatcgtagccgatcaggggcatagattgaacccccacaagacgcgtgtgagacgtcggggcacaaggcagagcgttaccggcgtcgtggtgaacgacctcccctctccaggcaggagggaagtcgaccgactgcacgccgtgctgcacaattgtgtcgtgcacggacctgcatcacaggacagaacagggcaccctgacttccgcgcccatctcctgggtcgcatagggtgggtggaacaggtgcaccctggcagggccagacgtctcagggaggaattcgcccggattcgctggtga

SEQ ID NO: 12930 - RNA, 1314 nt, synthetic construct
  source 1..1314: mol_type = other RNA
atggtggccaccgccttggccgacgcctttctagctgctgaaggctgggacactgcacacctcactgccgctggccttgatgtcgtgggaccggagcgagcctatgtgggcctagcggtacgcgcagcattagaaacctaccctaggccacccgtaggagctcccagacaactggctgccgtggttgcgagagccccagctttggcccggcttcatcaccgaagggctgacaggcgcccggtgagagttctgcagaggagggctgtgcctgtcagagcggtacctaccgtgagctccagactgcttgtggatactctccccgagttggcaagagagctcgatctgacagtcggtcatttactctggctggcggacacccggggctggaatagacgtcctggtgctagcagtccgctccaccaccatcggcatgagtgggtcagacgccctggtcggacaccacgcttactggagaagcccatggatttgctgcggaggacccagcgcacgctactcgacgaactgctggtccatctgcccgtgcacgatgcagcgcatggctttgtagccggccggtccgttgttactggtgcagccgcccacaccgggcaagaagtggtggtaacggccgacctgacgaccttctttgccagcgtgcgtgccccatccgtctatggcgtgctgaggagtgccggatacgcggagcccttggcacacgttctgactgggctgtgtactcattcagtccctgttcacgtcttgcgagcgatgcccgacgggggatctttggacgatcgcgccgcattaagaagggccctggctgatgctcatctccctcagggagccccaagctctcccgcacttgccaacacagtgctgaggcacctggacgctagacttgctggctgggcagccgcctctggagctgtttatacacgttacgccgacgacctcacattctccggcggaactgctctcgctggcagagtcgatgcattcctgcggggggtagatcggattgtgaccgaccagggacacaggctcaaccccgctaaaacacgtgtgcgcaggcggggggtccgtcaaagtgtgacaggggtggtggttaacgagcggacctcaccagggcgccgagaagtggataggcttcacgcagttctgcacaattgcgtggagcatggaccagcctcgcaagaccgggcagggcatgcagattttcgcgcccatcttctgggtcgcatcggctgggtggaacaggtccaccctggcagagcacggcgactgcacgaagagttcgcccgaatacgctggtga

SEQ ID NO: 12931 - RNA, 1494 nt, synthetic construct
  source 1..1494: mol_type = other RNA
atggagttccctggcgaagctgatgacgctagaggggcctccagctcaccaggttctccacgggggactcaggatcagcaggacactactcctagagctggacgacgagctcccagggccactcctcatggaggtacagacggatcacccggcaacgccacccccttagatgccatcgccgtggcgctggccgatggatttttggctgccgacgcctgggacctgccaacactccgagctgccggctttgacgtcgtgggcattgagcgggtgatagtcggtgcggccgttgttgctgcactggacgcattcccaagaccacccacggacgctccaggctcgttggctgcagtgctagccaggacaccgcgcctcgtaagcgaacacgggaggcgtactcggcgtcgtccagtgagggtactcgctcgccccgttagccctgtacatgccgccagacacgtggaaggccccttgctggtggataccctgccggagcttgcaagggctctcgacctgacagtgggtagacttctgtggcttgcagataccaagggctggaatagacatgcagatcccgacggccccttacaccactaccggcacacatggactgtacgccccggcaggacgcctaggttacttgaggcccccatgcatcttctgagacgcgcccagagaacagtgctcgatgagttgctgacaaccctcccagtccacgacgctgcgcacggatttgttcccggccgcagcattgtgaccagtgccgctcgtcacgtcgggacggaagtggtggtcacaatggacctgacctccttctttgcgaccgtcagggccccttccgtgtatggggttttccgcaacgcagggttcgcagagcctgtggcacacgttctcaccggtctgtgcgtgcatgaggtgccccctcacgtccttcgagctatgcctgggggaggagggggctctctggatgaacgggtcgcactgcgcagggcactggcagaagcccatttgcctcagggcgcccctacttctccagcgctggcaaatctggccctccgacatctggatgcccgcctcactgggtgggcagtagctgcaggggccacctatacgcggtacgctgacgatctgaccttctcaggaggggccgctctagctgcccgagttgatgccttcatcgcgggagtcgaccggatcgtacgggaccaaggccatgaggtcaatccccacaaaacccgggtgcggagacgaggtgtacggcaagccgtgaccggcgttgtggtgaacgacagattaagtccaggtagggccgaggtggaccgactgcacgcaatcttgcacaactgtgtccggcatggaccagcttcccagaatagggatggccatccggagtttcgcgcgcaccttctcggacgcataggctgggtgggacagacacatccggcaagggcggccagactaagggccgaatttgatagaattgattggagatga

SEQ ID NO: 12932 - RNA, 1491 nt, synthetic construct
  source 1..1491: mol_type = other RNA
atgggctttcctggtgaagccgacggagtgcgaggcgcatcttcctctccggggcaaccaaggggcacccaagagcagctgacccatccacctcgagaagcccgtagagccccacgggcacttcctcacggctcaaccgaccagtctcccggcaatcctggaccccttgccgaagtagcgcaggcccttgccgatgcgttcctgacagctgatgactggagccgccccgctttgactgctgtgggatacgacgccatcggtgtggagcgggccatagtgggtctggctgttggggctgccctcgatgcctatccaagggcgcctagtgacgctccgcgacaactcgcccgcgttcttgcagctgctccacggctgcagtccgcatatgctgccagggaccccagagtcagacctgtccggatcttggcacgcccggtaggagctgttagggctggacggagcgttgatagccccctcctggtcgatacagtccccgaactggccagggccctggatctgactgtggggcacctgctgtggttagccgatccaggcggttggaataggcgccccgacgcatccagcgcattgcatcactacggatatgcttggatccctcgaggcggtcgtacacctcggctgattgagaagcccaagcctttactccgacgcacccagcgcctcttattggacggactgctcggggcattgccagtgcatgacgcggctcacgggtttgtcgccggtagaagtgcagtaacgggggccgccgaacatgtaggtaggcaggtggtggtgacggttgacctgacagcgttcttcgcttcagtcactgccgggtccgtgttcggcgtgttcagaacagccgggttcgccgaaccagtcgccagagtgctaaccggcttgtgcaccgctcgagtgcccgttcacgctctacgtactatgccagacggcgggtctgtcgagcataggtttgccctgagacaggccctgaggctgcctcacctaccccaaggcgcaccctcaagccctgtgctggctaacctcagcctgcggcacctcgacgcaagacttgcaggacttgctgccgcatccggagccacctacacgcgttacgcagatgatctgactttctcgggcgacgatcattttgccggcagtgtggacgggtttttaagagcggtcggccgtatagtggtagagcagggccacacaattaatcaggccaaaacaagggtcagacggaggggacgcaggcagagtgttaccggcattgtggtgaacgaacgcgttgcgccaggtcgggcagagcacgatagactcaaagccatcctgcacaactgtgcagtgcacggaccacaggggcaaaatcgcgcggggcatccggatttccgcgctcatctcgagggaaggattacttggatgatgcagttgaaccccgagagaggagcacggcttcgggctgtgtttgagagaatcgagtggggctga

SEQ ID NO: 12933 - RNA, 1500 nt, synthetic construct
  source 1..1500: mol_type = other RNA
atggctcgattcagaggagaggccgatgacgctaggagggcccctagtagcccgggatcacctaggggcacccagaacgaccagcagcatacacctcgagaggctaggcgtgcttcccgggctaggccacatggacggatcgatggttcccctcggaacagaggacacactcccctggcagtagtcgcacaggcccttgccgacgcattccttgctgcgccagaatggactatacccgctctcgatgaagccggttttgccaccgttggcgtggtccgccccttcgttagggtgactgtggtgactgccctggaagcatatccacggccaccccgagatgctcctaggcagctcgccgcagtcatcctacggtcaccccgtgtggtggatctgttcgaggccagggcagccacaaatcctgttagagttgtgtctcgcagcgtcggtcctgtagaagcgagagccgaccacgaaaccgcatcccgccttctggtggatactgtacccgcgctggcaagggaattggacctcaccgtagggcggctactgtggctggccgatactagagggtggaatcgcactgccgcagagggcccattgcaccactatcgctacgagtggctcgcaaggcctgggagaacaccgcggttgctcgaaaaacccctgcatcgtctcaaaacaacccagcggaccatccttgatgacctgctgacggcccttccagtccacgacgctgctcatggcttcgtgacgggcagatccgccgtgacaggagcagctctccatgtgggccaggacgttgtaatttctgctgatttgacgagcttcttcccctccgttagggccggcagcgtctatggggtgtttcgcgacgctggttttgcagagcccctggcgcatctgctgaccggtgtgtgcacacaccgggtgccggttggtattctcagtgcgatgcctcccgggggatcgcctgatgagcgattcgccctgcgccagcggttaagtgccgctcacttaccacagggggctccaacatccgccgcattgggcaatctggtgctcaggcatctggacgcgcgtttagccggctgggcaaagtctgcaggaagtgtgtattctcggtacgcggacgaccttaccttttcaggcggagcgtcattggccagcagagccgatgctttcgctagaggggttgaccgaattgtcgccgatcaagggtacgctctcaacccccagaagaccagagtgaggcgccaaggggtgagacagagcgtcaccggcgtcgtggtcaacgaacgcacctctgccggccgacgtgagtacgacttgctgaaggccacacttcacaactgcctacgggacggaccagcccgccaaaatagagggggccggccagattttagagcccacctggccggtagagtgggctggtttgagcaatgtaatccggagcgaggagcccgcctgaggagcttatttgagcagatcgcatgggcttga

SEQ ID NO: 12934 - RNA, 1539 nt, synthetic construct
  source 1..1539: mol_type = other RNA
atgaggtggtccccaggagaagctgatggcgctagagccgccgcttcttcacccggtttgcctcgcgggactcggatcgaccaggaacacacacctcaggagcttggaagggcgccacgggcagatgcaccagagagacacgacgaaagctcaggcgatcaccagcatgccgacccaccccctacctcaaggttggtggcacccgagcgaagcgctggactcgtcgagacagccatcgccctggcagacgccttcttagccgctagtgcttggcgcccggccgaactatctgcagcgggtacaacgaccgtgggcaggaggccaggcttagtggaacctgccgtcgccgccgttttggccgtgtatcctagggcaccacgggacgctccaaggcgacttgctggcgtgctggcatccgatcgcagcttcacagccgcatttgctcggctcactgccagacggcccgtacgtttacgcgtgcggaccgtagccccagtagttgccgctcccgttgcggcacatgtgcctgtggttgacgccctccccgatctggcagccttgcttggcgtgaccactgagaggctcctctggtttgctgacacccgtggttggaatcgacgcgtgcctgccggatccccactgcatcattacgagcaccgttgggtgcaaagaccaggcaggactcctcggcttctggaggcacccctgcatcagctgcgcaccatgcagcgggtagtcctggaccaggtcctagcacccctgcccctcagcgatgctgtgcatgggtttgtgaggggaaggagcgcgcttagcggtgccgaagtgcacgttgggcacgatgttgtcgtatctgctgacctggtgtccttcttcgccgcagtgcccgcctctagagtttacggaatttttagaagggtagggtatgccgaaccggtcgctcacgtcctgaccggtctgtgcactcacgtggtgcccgatgctgtgctcagagcgatgccccctggtggggatcttgacgagcggtgggccctgagacaagccttggccacaccccatctgcctcagggtgctccgagttcacctgcactcgctaacctgtcgctgagacggctagacgctcgtctcgctggctgggctcaagcagcagacgcggtgtacacccgatacgccgacgatttggctttcagtggggatggggcaattgctgcccggccagatgcttttctgcggggcgtggacagaatcgtggccgatgagggtcacgcactgaacccgcgtaagacgcgcgtacgcagacagggagtccgacagagtgttacaggagtcgtggtcaatgcggtcccaggggtcggacgacgcgaacttgatagactgagagcggtgctgcacaactgtgtccgctatggtcctgcctcccaagacaggggcgaccacgcagactttcgggcccatttagaaggccgcgtggggtgggttgagcaggttcacccggccaggggagccactttgagagcggagttcgagcgaatagcctggtga

SEQ ID NO: 12935 - RNA, 1521 nt, synthetic construct
  source 1..1521: mol_type = other RNA
atgcaacgcccaccaggggaggctggaggaacaagagcggtccccccttctcctggtcttcccaggggaaccaaaatcgatgaaaatactacaccacgggaagcggaacgtgcatctcgcgccctgccacctgcacctgcagatgagtccttcgggggtcgcagccagcatgacgccaatgccgacattgctcacgagcccccaggagccaccttagccgaagtggcacgagccctcgcagatgctttccatgccgcgcctgagtggtctgcacccagcttgttggccgctggctccagtgtggtggggtctagaagagcctttgttcgggtcgccgtcggcggcatactggagtcactgcccaggtctttacccgattccccaaggctactcgcccggctcattttggatcttccggggtttgtagccagtttccgcagagggactcggagaaccccagttcgaatccgatctagagcaattgccccaaccagggcagtgggtcctggaccaagagtggacactgtggtagacctggctaggttactgggagtcacggtcggccgcctagagtggttcgctgacacccaggggtggaatcgcctcgccgaggaaggtcctctgcaccactataggtacaagtggagggtacgccctggccgagttcccagattgctggaggtgcctctggaccgtctgcgaaccatgcagcggatcatacttgacgaactgctgaccccgatgcccctgcacgatgctgctcatggcttcgttgccggcagatcggcaattaccggggctgctgagcacactgggcgtgatgtggtcataggcctggatctggtcagttttttcgcgagtgttaccgccaaacaaatttacgggctctttcgccgggccgggttaccagaaacagtagcgcatctgctgacaggtgtgtgtacacatagcgtgccgcctagagtgcttcgtgcaatgcccgcaggcggctcagcttcagctcggtttgccctccggcaggcattgtccacgccgcatcttccgcaaggcgctccaagctcccctgcactcgctaacctgagcctccagcggcttgattcccgccttgcgggatgggcagacgcattcggcgctacttatacacgctacgccgacgacttggcgttcagcggcgatgcctccttggcctcaatggtgagggagttcgtacggggagccaccgctatcgtggttgactcgggacatacgatcaacgcccctaagacaaggatcaggagggctgggacccgccagactgttacaggcattgtcgtgaacgccactactgcccccggaaggagagagtatgaccgtctccgggccgtggtgcacaattgcgtgacacacggccccgaaggtcagaaccgcgagggtcaccccgcttttcgacaacagctgctcggacggatcgcctgggtcagccagctacaccccgaaaggggcgcaagactgcggagagaatttgagctgatccgatggtga

SEQ ID NO: 12936 - RNA, 1422 nt, synthetic construct
  source 1..1422: mol_type = other RNA
atgacaccccgcgaggcaaagagagcctcccggactttacctcccgcacccgctgacgagtcatcaggcggtagactgcacgctcgcggaggtcaaccttcaggggcctctccttacgaggtcgccgtggtgcttgcagatgccttcgcggccgctccaggttgggatgttcgtagcctctccgcagcaggaaccgccgcttttgggagtggccggcgattcgtaccactggctgttctgggggtactgcaggccctgccaagaccgatcctagactctccccgcaccactgcccgactgatcgttgcgttgcctgggtttgtggaggccgtgaggaggtctgctgaacgagcgcctgtcgtggtcctgtcgcgggaagtggttcccgtagcagcggtaggaccaggaccgcgtgtagatacggttgccgacctcgccaggttactcggggttaccgtcggtcgcctcgagtggttcgcagacacaaagggatggaaccgcagagctcccgcaggtccccttcatcattatagatacgagtgggtttcccgccctggacggacacccagactccttgaggtccctctgggccttctgaaaaccgtccagcggacagtgttagacgaattgttggcccccatgccactgcatgatgccgcccacggtttcgtgcccggtcgatctgctgtgactggggcagcccttcacacaggcagagaagtggtcctggcactggatctagtgtcctttttcgctgcggtgagcgccagacaggtgtacggcctttttcgtcgcgcaggtcttgcagagcccgtcgcacacttgctcgctggcgtctgtactcacgccgtgccagtccacgttctgagcgctatgccggacggcggaagcagcactgagaggtttgaactgcgtcgggccctcgctgctcctcatttgccgcagggagctccatcttccccagccctggcgaatctgagtttggctgggctcgacagaaggctagacggatgggctagggccgccgaagctgtgtacacacggtatgcagatgatctgagcttcagtggggatggcgagttggggggaagggtacctgccttcctgaggggcgtggaacgcattgtgaccgacgagggccataccgtgaatgcccgcaagacgagggttaggagggccggagtccgccaaaccgtgactggcattgtggtgaaccagaccacaagtcctgggcgaacggagcacgaccggctgaaagccattgtgcataactgcgtgagatatggcccagcatcacagaatcgggatgggcacccagcgttcagagagcacctcctgggccggatagcatgggtcgaacagctgcatcccgccaggggagctagactccgagccgaatttgacttaatccggtgggattga

SEQ ID NO: 12937 - RNA, 1374 nt, synthetic construct
  source 1..1374: mol_type = other RNA
atgaagccccctggcactagaacggccagagcgcttgctgccgccttcctaggttcccccgagtggagcgcaccagccttagtcgaacaggggcgagtggtactcgatcctgcccctgactggcttcctgctgtagccgcagctgccgtcgcagcacatagggagccacccagagatgcccctagagagctggccggctttctcctgggggtgagagaggagttgctggatgcgcgccctcggcttgacgatgatggcgagccactacctaggccagcagagcccagggttcgagcctggttacccaccactccacggatgggaagagctcggtggcccgttcacccgctacacgacctggctgatgtcgccgagatgctgggcactgacctggatcacctgagctggtacgcagatccacagggccgccaacggacagaacccgcaggacacctgcagctgtatcggcgcagatggcttccgaggcctggtagagtgccacggttgctggaagtccccacccctcgcttacgggctgtccagagggtgctcctggatcgggttctcgcacccatccctcctcatcccgcagcccatgggttcgttgctggcaggagtgccctcacgggagcaaggcagcacgtgggtgccgaagagctgttgacactcgacctcgccgccttctttgctaccgtacgcgctggtcgggtgtgggctactctccgatctgctgggtaccccgaaccggtggcctcactgttgacaggcctgtgcacaacctccgccactcgagacgatcttgcaactatgccacccggaggttctgaaggcgcacgagcccatgttcgtgcggccctagccacacctcacttaccacaaggcgcaccgacgtctccccagcttgccaatctggcggcacaccggctcgacagaagactggctggattggctgcggcggcaggtgctgtctatacccgctacgcggacgacctcaccttcagtggaagaaggggcaccgccgctctcaggcatcgagtagcggtcgtggttgcagacgagggctttgcgctgcagccggctaaaacacgggtccgcggacgtggagctagacaagccgtgacaggcgtggtggtgaacgaacgccctagcttacccagggccgaactggacgccttgagggctcgcttgaccaacgccgttaggcgggggccatcagcagctgatctggctgccgtggacggggaccgtcaagctcttcgcagggagcttgccggaagaggggcttgggtgactcaggtccacccagtgcgaggggaacgtctggctgctctactggccgccgtggactttgcagagccagataccgacctgtga

SEQ ID NO: 12938 - RNA, 1455 nt, synthetic construct
  source 1..1455: mol_type = other RNA
atgagcgtcagatccgcccacgcttacgccggaactaccggtcaggtcgacccgcaccatcggactcctctgttccacgtgaaacagcctccggaacagagaacagcaagggccctcgccactgccttactggctgacggtccgtggaccgtcgagggactaaccgctagaggacggcgtgctcttgatccagcccccgattggctcccagccttagccgcagctactgtcgcagcatggcgcgaacctcctagggatgctcccggagagttcgcccgctatctgtcagccgctcgggaacatccaccagcggagccacctggctacgatgacgaggaggatctccctcctcctgttcccgagccaagagtgcgcgaatggctccccacagctactcgcatgggtagggccaggtggcccgttcacccattgcatgacctctcagacgtggccgagttgctggccaccgacctggatcaactgcgatggtacgctgaccccctggatagacagaggaccgagcccgctggccacttacagctctatcggcggcattggcttgcaagaccaggtagggtgcctcggctcgtggaagtgcccacaccaagactgcgccgcgttcagagagtgctgctcgatgcagtacttgcacctgtccccccccatcccgcagcacatggatttgtggccgggagaagtgcgctaacaggagcccggcaacacgttggcgccgaacaattgctgaccatggacctggctgcgtttttcgccaccgtgagatcgggacgcgtgtttgccacactgcgctccgcaggctatcccgaacccgtagctgccctcatcactggcctgtgcacaactagggccacacgggatgacctggctaccatgccagctggcggtactcccggagctagagatcacgtccgagccgcccttgcactgcctcacttgcctcagggggcccctacaagcccacagctggcaaacctggcagcacacaggcttgatcgcaggctggcaggtctagctgcaagcgcgggtgccgtatacactcggtatgccgacgacctcacgttctctggaaggcgcggcacggctggacttcgtcatcgtgtcgctgcggtggtggctgaagagggcttcacggttcagccgaccaagaccagggtgagaggtcgcggagcccgtcaaacagtgacaggggtggtggttaatgaccgaacctccctcccccgggccgagttagatgcactacgagcccggctgacgaacgcggtcagacgaggtccatctgcagccgacctggcagcgtttgatggggatcggcacgctttgcgtcgacacctggccggaagggttgcctgggtcgctcaggtgcatccggctaggggaggtcgattggcgggattgctggcggccgtagactggagtggaccagacaccgacctttga

SEQ ID NO: 12939 - RNA, 1383 nt, synthetic construct
  source 1..1383: mol_type = other RNA
atgaatcagcggaccccccctggtacacacactgctcgtgcccttagcgcagccttcctgggggcacctcattggacagtggatgccctggtggcccacggaaggagagctctcgaccctgccccagactggctagcaggagtagcagccgccgccgttgaggcttggcgagaacctccaagagacgctccacgggagttcgctcgctttctgctggctgtccggacccaattagcagccgtccctcccgcctatgacgacgaagaggatcttccccctcgaccggcggaaccacgagtgagagcctggttgccagctgcaactgccatggggagaaccccctggcccgttcatcccctccacgacttagcggatgtcgcggagctgctgggaacggacctagatcacctggcctggtatgctgatccgcagggcaggcaacgacacgagccagcagggcacttgcagctctacagaagacggtggttggcccgacctggcagagttcccaggctgctcgaggttcccacaccacgcctgcgagctgtgcagcgtgtgctccttgacgcggtcttggcccctatcccagcccatccagccgcacatggctttgtgcccggacgcagtgccctgactggagctaggcagcacgtgggggcagacgtggtcctaaccatggacctcgccgccttctttgccaccgtaaccgcgggccgtgtatgggctacccttcggactgccggctacccagaacctgtggctacgctgttgactggactgtgcacgacacgcgctacccgggatgacctggcaacaatgcctggcggcggtactgacgcagctagggatcacgctcgcgctgcactggcaaggcctcatctgccccaaggcgctcccacatctccgcagctggcaaacctcgcagcacaccggctcgacaggcggttagacggcttagctgctgcggctggagccgcttatactcgctacgccgatgatctgtcattttctgggggtagaggaaccgccgccttaagggatcgggtggcagggattgtggtggatgaggggttcgcggtgcaacccgccaagactcgggttagaggccgcggtgcaaggcagacagtaacgggcgtggtcgttaacgagcggacctccctccccagagctgaactggacgcccttagggcccgcctgaccaatgcggtacgtaggggtccgagcgcggctgatttagccgccttcgatggggatgtgcatgcattgcggcgtcacttgacaggacgcgtcgcctgggttgctcaggtgcatccagccaggggggaaagactggccgcactccttgccgacgtcgattggggccgcagagacacatccctgtga

SEQ ID NO: 12940 - RNA, 1638 nt, synthetic construct
  source 1..1638: mol_type = other RNA
atggcgagaggtaggggacgacgcacagctggcagatccgggtctagtggcgatgcacccgggactgctaggcgtctccaccatgacgcctctggcgctgccctaagatccgctcagcagtcagcaggcccgacaggtcaagtggaccctcgccacaggacacggctgttccacgtgaatccccctaccgcacggacaactgcacgtgccctggcagatgcctttctgggcgccagagagtggcaggtacctgcgctggttgctcgggggagattggtgctggacgcagagccggattggctgactgatctcgcacgcgcagccgttacagcctggcgtgtgactccacatgatgccccagccgagctggctcgcgttcttctggcggtcccaggtgtgttcgagccccctgtgccggagatggtcacctcaggcgaagatggcgaggatgacgacgaagacggctttctcgtctgggcggccgatgaggagcctgaaggatggcaaggtgctcgagcggccgcaccaggtagtcctcgtgtggtgagatggctacccgcccacacacgtatggggcgaacgccttggcgggtagctcctcttgacgacctcgctgacgttgccgaactgctcgccaccgatctggaccatctggcctggtacgctgacagacagggtcggcagcgggctgaaccatccggaagactgcagctctacaggagacactggcgcgtaagaccagggagggttcctcgcctgctggaaacccccaggcctcgattacgaaccgcgcagcgcgtgttgttggaccgggtgttagcacctgtcccgcctcaccctgccgcacatggatttgtgaccggaaggtcagcggtaaccggcgcccaacaacacgtgggcgctgatgtggtgttaacgatggacctcgcagccttttttgccactgtgacaagcggcagggtgtatgccacattgagaactgccggctatccagaacccgtggccgatcttctcacgggactgctgactactcgggccaccagggacgacctcgctaccatgcctccaggaggatctgatgccgctcgggcccatgtgagatctgccctagccgccccacatttaccacaaggggctcccagcagtccccaactcgcgaatctgtgcgctcagcgacttgaccgtcgccttgcggggtatgcagctgcagccggtgcagtctacacgcggtacgccgatgacctgaccttcagcggtggacccgatgtagcccggcgtgttggagctctgagacacggggtggcacgaatcgtcgccgcagaaggcttcgctctgcagccagccaagactcgggttcgtgggaggggcgcaaggcaaacagtaaccggcattgtggtgaacgacagaaccagcctgcctaggcgggagttggacgcactacgcgctaggctgacaaacgccgtcagattagggccctccgtccaggatcttgcggccttcgacggtgacaggggcgctttgagggcacacctcgctggacgagtcgcttgggtcgcccaagttcaccctgtgcgtggggagcggcttgctgctctgttggccgcagtcgattgggatcccgttgatacccatctctga

SEQ ID NO: 12941 - RNA, 1350 nt, synthetic construct
  source 1..1350: mol_type = other RNA
atgaatcgcgaggtggccagagccctggctgatgctttcctcggggcacctgcttggcgtgtctccgtcctggtggacagaggacgcgccgttctgtccaccgaacccagttggctaggcagagcagccgtcgcagccgtaacgtcatggcccgaaccacctgttgatgccccgggagaactggcgcgctttttgctcggcgtcgacgtcggccctgaagatgaagaggctcgccctgagccccctcccagagttgttcggcgggttccaactcccacccgtatgggtcgtacacggtggcctgtccaccccctgcatgacctggcagatgtggcggagctgttaggtacagatctggagcatctggactggtacgccgaccggcagggaagacaacgcgcagaacccgccggccaccttcagctttatcgacggaggtggttgccaaggccgggtagggttccgcgtctcttggaagtgcctacccctaggctccgcgcggtgcaaagactgctcttggaccgggttctcggaccagtgcccgctcatcctgcggctcatgggtttgttccaggccgatctgcagtcactggggccgctcagcacacaggagctgatgtggtgcttacactcgacctggctgccttctttgctacagtaacaagcgggcgggtgcacgccactttacgcactgccggctatccagagccagtggtggcgctactgaccggcctggtgaccactagagccacgagggacgatctcgctaccatgccgccaggaggaaccgacgctgcacgacaccagctgagaggtgctctcgccgctgcgcatttaccacagggcgcacccacctcacctcacttggccaacctgggagcccagaggcttgaccgtcggttggctgggtatgccgcagtagctggtgccgggtacactcggtacgccgacgatctgaccttcagtgggggccctgacgtagctagacgagtgcgcgccttgcagcacgggatcgagaggatagtggccgacgagggctttgtggtccacccaactaagaccagagtacgaggcaggggtgcccggcaaaccgtgacaggaattgtggtgaaccgcggaacaagccttcccagggcggagctggatgctctcagggcaaggctgacaaatgccgctcgccgagggccatctgcagcagatcttgccgccttcgacgacgatagggtggccctgagagcacatttaactggccgggtcgcgtgggttgcacaagtccaccccgcaaaaggggccagactggcagcactacttgccgccgtagactgggatggccccgatacgagcctgtga

SEQ ID NO: 12942 - RNA, 1362 nt, synthetic construct
  source 1..1362: mol_type = other RNA
atgagcacagatcgggggcaggaagtggctagggctctggctgatgcctttctgggcgcgcctgtctggctcccttcagcacttctagcgcgggcggagttagtgatcggtgccaggccaccctggttggctgctgttgccgtgaccgccgctactgcctatcaggagccacccagggatgcccctggagagttagctgggtttctggctgcaagcagcgccctggaagcaggcctgttagccggaaaccccactgtgaccgccagaggaagacgtagaagagcccccgttagagtcgttaggcgcctgcctgcctctacagcaatggggaggactaggtggcctgtcgtgcccctcgatgacttgggggacttggcccgcctcctcgacgtagatcccggtcacgtggcatggtatgccgacggacaggggcgccaaagattggacccccccggtaggctgcatctctaccgtcgcgcatggttgcctaggccaggcaggacaccgaggctgctggaagtaccgaccccccgactgcggagagttcacagactcgtgctggatcaggttctagccccagtgccagcccatcctgccgctcatggatttgtgcccggtcgatctgccctaacaggggctcgccaacatgtaggcgcaggggtcgtggtatccatggacctgctttcattcttcgcaactgtgcacgtgcgccgggtgtattgggtgctcaggacagcaggctaccctgaacccgtggcatctgcactggccgggatctgtaccgttgcaactccggtcgccgatcttcgggctatgcctgctggtggcgacgatcaggagcgcagcgctcttagacgagccttggcagctccacacctgccccagggtagtccatccgccccacacctcgcgaatctgtgcgctcagcggctggaccgcagacttgctggctacgctggctcagtcggagctgtttatacccgctacgcggatgatctgaccttttccggtagattccgcgcgggaccactcatatcgggagtgggagctgtcgtacgggaggagggcttccggctaaacgtggacaagacgcgagtccgtgggcgtggcagtaggcagagcgttacaggcattgtggtgaacgagcgccctacggtacctcggccagagtacgacgcactgcgtgcccaactgttcaatgcagcaagaagagggccgagtgcccgggacttagcggaacacccagacctcagggcccatctgaccggaagagtcgcctgggtggcccagttggaccctgaacgaggccgacggcttagggcccttctggatcgggtcgattggtctggccccgcctcctga

SEQ ID NO: 12943 - RNA, 1065 nt, synthetic construct
  source 1..1065: mol_type = other RNA
atgacaggcagaggcgaacaagctgtcgcctccgccttagccggggcttttcttgccggcgattggaccgcgagcgaactctttgagcgcggtagcacaaccttgggcaggcgtccgcgatggttgagacgagtggttgtggaggtgctgtcactgtatcgagaggcacctgtggatagacctcgcgaactcgctacagtggtgctggcaactgacgggttccagacagcagcgtctcccgcacagcggcatgaaggtcctcccctgagagtcgtgagaattctggtggagcctactcggatggtccgctcaaggtggccagtagcccgggtggacacggttaccgaccttgcggatctcctggaactgggggtcggccacctgacttggtacgccgataccgctggaatgcagaggagaactagggttcaggctctgcagctgtatcggtataggtggttagaccggcccggaagggccccaaggttactggagattcccaaaccgcgcttgcggcgagcccagagattgctgctggacaggatcgttgccagagtcccagctcatgccgctgcccatggcttcgtaccaggacgtagcgcaaggactggcgcaaccccccacgtaggtaccgacgtggtgatcggactggatctcgctggatttttcgcctccgtccccgcgcaaagaatctacgggatccttagagtcgccggttaccccgaggcagtggctcacataattaccgggctgtgcaccactgcaacacctatagctgttttagcggctatgccagccgggggttctgccgatgatcgctacgcattgcgtcggaccctaacgatgcctcacctgccacaaggggccccaacatccccgcagctcgcaaacctctccgcttaccgcctcgactgcaggctagccggacttgtggctgctctaggcgccacctatacgcgctacgccgacgaccttcgctgtcctgccgatcccacatggcgtggtcggcctcgaggatcgagtgctgcaagtggcgggtcaagcgcaactcggggatctggctga

SEQ ID NO: 12944 - RNA, 1038 nt, synthetic construct
  source 1..1038: mol_type = other RNA
atggcaggatcacgctggcccgttgccactgtagatgatcttgccgacctcgctgggctgctcgatctcagcatgggacacctgggatggtacgccgatcccgcaggcatgcagcgcagaaatcgggtgcccgcattgcagctgtatcgttatcggtggttggataggccaggccgagcgccaagactattggaggtgcttaaacctcgcctgcgtagggcccagaggatgctgctggatcgaatagtcgggcttgtgcctgcccatgccgctgcacatgggtttgttgccggcagaagtgctaggacaggagcagctccacacgtcggaactgatgtggtaattggactggacctcgcagggttcttcggtagcgtgtccgcgcaccgaatttatggcatattacgcgtagccggttacccggaagccgtggctcatatcgtgaccggactgtgtaccaccgcaacgccaatcgcagtgctaggtactatgcctcctggcgggccagtggacgatcgctacgcactgcgccgtgccttgactacgccgcacttaccccagggagcgcctaccagccctcaactcgcgaacctgtctgcatatcggctggactgccggcttgctggtttagctgccgctgtcggtgccacttacacacgctacgccgacgacctgtcactttctggtggccccgaggtcgccagacagacagcaaggattgtcggcggcgtcaggcggatcgttagtgacgaggggtttaggctcaatgaagggaagacaagagtgcagccaagagccggccggcagacagtaaccgggatcgtggtgaacgaaagggccaacgctgccagagctgactacgacaggctgcgagccatcctccacaatgccgctcgcaccggggctcaaggacaaaaccgtggcggccacagagactttcggtcccatttgctgggccggattgcatgggttgaggccctgaatcccgctagaggacgaagattacgggcggatttcgacaggatcgattggacctga

SEQ ID NO: 12945 - RNA, 1332 nt, synthetic construct
  source 1..1332: mol_type = other RNA
atgacgacagggccagccgtagcccaggctctagcagacgccatgctcgcagaaggagcctgggatgccgctgccttagcaagggcagccgctagagtagttggcccgaggcgcagatggttaccagctctggccgccgaggttttagcgacgtgtcccaggccccccagagatgcaccacgctaccttggcgctgtggtcgctggtgctccttccttcgcccgtgctgaagaaagggctcagcgccgtggacatcctctgccagtgctgtcccgaccagtggtggctaccagagccggtggtagcaggtggccaactgctccactcgacgatgttggcgacctagcagacctgctggggttggacgtcggacacctcgattggatggcagacgtccgaggcctgcagcgtagagctcctgctggcccacttcacctccaccgctatcggtgggttgaaaggcccggccgagtaccccgcttactggaagtgccgagtccaagacttcgccgcgtgcagcgtaccgtcctggatgctgtgctggcgggacttcccgcccatgatgcagctcatgggtttgtcccgggacggggggtgttgtcaggtgcaagggagcacgtggggagggcagtagtcgtgcgagcagacctgactgccttctttgccgccgtcacagccggcagggtgttcagagtactgagagccttgggccagcctgaagctgtggcgcacgtgctcaccggactgtgtaccacacgcgcgcctgttcgagtgctggcagcgatgcctcccggtggacgtgatgccgatcggcacttactccggaggtggctggccgagccccatttagcccagggagctcctacttccccccatcttgcaaatctggccgcgcatagactggacgtccggctgagctcatacgcagccgcatgcggcgccgtttacactcggtatgctgacgatctcgtcctcagcgggggagatgacgttgccagacgagccgggcccttgcttgaaggagtcaggcgagtagtccgcgaggagggctatcgggtgaacgaggccaagacccgggtgcagcctagacacaggcgccaatctgtgaccggagtggtggttaacgacaggcctggggctgggagaagagagacagacgccttgagggcgctcttgcataattgcgtgcgccacggccctgcctctcaagatcgtgacgggcggggtgagggctttagagcccacctggaagggcgggttagttgggtggagcacgtgtctccgagaagaggtgcggcactgcgaggcgagctaggcagaatcgcatggtga

SEQ ID NO: 12946 - RNA, 1326 nt, synthetic construct
  source 1..1326: mol_type = other RNA
atgtcagccgagacggcccttgccagtgcattggccgaggcaatgctggctgggacatggcatcgcagaggactgattcgtgccatgtctgctacactcaaccgcacatccagacgggtgagatgggtccgccctctcgctgtcgaagttctggcagcgtacccgcaccctccacttgaccgtcccagggaactcgccggatttgtgggcactactccagctgtccaaagggctttaggtcggcggcgccctccaaaagccctggttcgagtagctacccccacaaccaccgtttcccggccctttccaacaccacgtgtagatcacgtagcgcagctcgctgagttcctggcggtggaccccgatgaactggtcttgcttgccgacccgcagtctcgggcacgaagagctcctagtaggcgcatagctcactaccggtatcactggctggacaagccggcaggcgccagattgctcgaagcaccaaaaccccgcttgaaggcactccagaggaaagtgctcgatgggctgttgactcccattcccgtgcatccggccgctcatggcttcgtaccaggcagatccgcagtgactggggccgctcctcacgttggagcagctgtggtggttaccgtagatctggaacacttttttgctgctgttcgagccggcagggtgtggggtgtgttacgggcagctggctatcccgaaccagtggcccatctgctgacagctctcactacccacgcgtctcccgtcgccaccttaagcgcaatgccacccggaccagatcggggaagagatttccgcctgcgacggaggcttgcgacacctcatcttcctcaaggggcccctacctcgccccagttagccaatttggtggccttctcactcgatcgcaggctagacgcatacgcaagagccgccggggtcacgtacacgagatacgcagacgacttgaccttctcaggtggccctgagttatccagggctgcggaggccctacttcatgcggttgacggcattgtgagagccgcaggctatcggctgaaccccgccaagactcgcatcagacgaagccatgagcgccagagcgtgaccggcatcgtcgtgaaccggcacacaactctggctcgtcctgagtatgataggctgcgtgccgtcctgcacgactgcgtgaccaatgggccagaggccgccgatcggaatggacacgacgacttcagggcccacctgctagggcgaatcagctgggtggctgccctgcatcctgcaagaggtgcaaggctgagggcggcctttgatgccgtcgcttggggagactga

SEQ ID NO: 12947 - RNA, 1269 nt, synthetic construct
  source 1..1269: mol_type = other RNA
atgctagccgggaaatgggctccgaaggccgcaaggaagcgattagggcgcacccttggacaacagcccaagtggttgaaacggctggtccgggaggttctgacagcctaccctagaccccctctggacagacccagagaactggcggcctttgtgcttcgaagcgcagcactggaacgcgcccacaggaagtctgggcccttaccgcgccctgtgagacgtttcagtacaccaacttcaacagtgctccgaccctttcctacgcctgtcctggatcacgctggggcactcgccgatttgctcgacttggatctagatgagctggagctcctagcggacactgctttgcgggcacgcagagcccacgatcccagaatcgctcattataggtatcactggagaatgaggccaggaggaccacggctcatcgaagccccaaaaccgcggctgttgaccgtgcaacgccggatcttggaagagataataggcctgatcccagttcatcctgccgcccacggcttcgtaccaggcagaagtgccgtcacaggagccgcactccacgttggagcgggcactgtggtgaatcttgatttagaacacttctttgctggcattactgctggcagggtgtggggcgtactgagggcagctggtttccccgagccagtggctcatcttctcaccgggctgacaacgcacgcgactcccgttgccgttctgtcggtcatgcccgacaggccaggtgaggctcgcaatttcaggctgaggagaagcctgggaacccctcatttacctcagggagcgcctacctccccacagcttgcaaaccttattctctacagcctggatcgtcgactgcaggcatacgccgatgccgcagggcttcgatacacacgctatgccgacgatctgaccttctcagggccccaggtgagacatccggactctgttgtcgccgctgtcacctccatggcagctgccgaaggctttcgcgtcaacgacgctaaatcccgggtgcgtaggcatcaccaacgtcaggtggtgaccggtattgtagtgaacgagtggactaatctggcccgacccgagtatgaccggctgagagccgtcctccatgactgccgggtgaatgggcctgctgccgcaaaccgggatggccatgacgattttcgcgctcacctccagggccgcgtatcttgggcgggaagcttgaacccaggtcggggtgccaagctggctgcaatgtttgacaggatcgtgtgggactga

SEQ ID NO: 12948 - RNA, 1323 nt, synthetic construct
  source 1..1323: mol_type = other RNA
atgaccggcccggccgatagacttgctactgccctagcggacgccatgctggcaggatcctgggactaccagtccatcctcgatcggacccgccaagttatcgccagacgccccccctggttagacagcttagcacgggaagtattagccgcgtatcagagggccccggcagacagacctagggaactggccgccttcgtcgtatcttctgctgcgatggctcgcgcaagaaggtccccaccacggctcccaactccagttgtgcggttctcctcacctacccgaatgatccggcggccttttgccacacccgtgctccaccacgcgggagatctagccgatcacctggggatcacacttgaggccctcgacgccttcgctgatacgaggctgcgcgcacgtagagcaagggcagagagaattgcacattacaggtacaggtggatgcatcgccccggtggagctcgattgctcgaagcacccaaacgaaacttgcgtgccctgcaacggaccgtgctggatgatattctggcccctataccaacccacccagccgcgcatggctttgtagctgggcggagcgccataacaggagccgctgaacatgtgggagcagaggtggtgattacactggatctcgagcatttcttcgcttcggtgactcccggcaggatctggggcttacttcgcgccgcaggatatcctgagccggtcgctcacttgttggtcggcctgaccacacacgccactccagtggcaaccctggcttcaatgccagctagcgccgaccccggtagggactttaggctgcgacgtcggcttgctgggcctcatctcccccagggtgctccaacatcacctgccctcgcaaatctggtcgctttcagcctggatcgaagactggactcttacgcgagagctgcggggagtcggtatacgcgttacgccgatgacctcacctttagtggcgacgcagctcttgcacgcagaagtgccgccctgatcgccgctgttaaaaggatgattcgccaggaggggtttacggtccatcctggcaagactcgcgaacaccacagaagccggcgccaggtggtgactggaattgtggtcaacgacaggaccaatataccccgggcagactatgaccgtctgaaggcagttctgcacgattgccgaagaaacggccctctggccgctaatagagatgcgcatcccgacttccgggcccacttgcttgggaggctgagttgggtgtctgccctaaacccggacaggggtgcccgcttgagagctatttttgatgagatccgatggacatcctga

SEQ ID NO: 12949 - RNA, 1530 nt, synthetic construct
  source 1..1530: mol_type = other RNA
atgagtgatactccggaccctggaccccccccaagaagaagtggggatgatcccggcggattggtgcgaagaggaggtcccccacgtccaccttcaggtggaccccctgcacctcctataagacctagacgcaaacgtccacgggggcgaccaagtccctttcgggaggatcggccagggaggcctgatgcactggtggatgcaatcgccggcgcactgctggctgatgccgatgactggacagcgtctggccttataggccgcgtagcagtcgtcttcgcaggtccgcacgattgggtcccccgactggtggagcaggttcttgaactctaccctagaccacctgccgacagaccacgcgagctacaggccgtggttggcgtgctgctgaatgatcttctcgaccccgcccctgacgacgacggagatgaaccaacaaccgaaattagaccagtaccccgcccggttcactggccagtagctagcactcggactgtgaggcgaccattcgccacccctccattggacgacgcaggggacttggcagccctcttaggggtggacctggtgcaactgacagctctcgccgacaccagacttaggggaaggcgcgctcgctctgaacagatcgcgaactatagatatcagtggctggacaggccgtcaggcccaaggttgctcgaagcgccacgaccccgtctactgtccgcccaaagggtggtgctgcacgaactgctcgatttaattcctacgcacccggccgtccatggtttcgtctccggacggtccgtggtaactggtgccagagagcacgtcggcgctgaaaccgtcctcaccctggacctcgaacactttttcgccgctgtgactgccggcaggatttggggagtgcttaggtccgctgggtaccccgagccagttgcacatctgctcgccggtctgacaacgactgccacgccagtccgcgtgctgacagctatgcctcctggccccgatcctggcagacagtttcgtcttcgccggaggctggcagtcccccatcttcctcagggagctcccacctcaccggccctagctaatctggttgctttcaccctggaccggcgtttagccgcatacgctgccgccgttgggctgaagtatacccgctacgccgacgatttgacattcagcgggccctttaggcaacgcgcccatgtacggagctttgcacgcgctgtgggccggattgtggctgacgagcggttcaggatcaacgaggccaagaccaggtggagaggcaggcacgagcggcagacagtcactggggtggtggtcaacgagcatcccgccatcgcgcgcgatgaggttgaccgattgcgggcggttctccatgattgccgacggtctggacccgcggctgctaatagacatggccaccccgacttccgggcccacttactggggagaatctcgtgggtggcaagcgtgcaccctgcacgaggtgccaggttgcgtgagcagtttgatggaatcgactggaccgcgtga

SEQ ID NO: 12950 - RNA, 1335 nt, synthetic construct
  source 1..1335: mol_type = other RNA
atgcggagcgagcatgctgtggcgttagctgacgccctattgacgggtccctgggatgccggcagaatggtggcaagggctcggctggtgtttgctcctgtacccgtggagctggcccacgtcgtggacgtagtcctggcagcacaccccaccccacctgtcgatgcaccacgatccctgcagcatctgctgctcgggcttccactgtccgctccggttccggtggtggcagaaggagccccactgttgcccaccccaagaattagggtcgttagaaggctgctatttacaacctccatggtcggctctcgattccccttacctcgggttgatgacgtcgccgctttggccgagagactcgggctgactgtcggcgagctggactggttcggagatcggaggggttggcagcggcgtgaaccacgttctgtgcttcagcactatcgctttaggtggcttagcagaccaggcaggaccccccgattactcgaagctcctcgtcctcgcctgaaagccctacagcggcaagtgctggatgagctcctcgctcctgtagccgtgcatcccgcggttcatgggtttgtggctgggcggtctgtgctgacaggagctgccgtgcacgccggaagagacactgtcatcactttggatttggaacaattcttcgccgggctgacagccagtagagtagctggcgttctccgcagcgcaggctatcccgaagcagtgtcatgggccttgacaacactggtctgttctactgtgccgatggcagtacttcgcgccatgccgggagcagaagcaggaggagagcgcttccgtttgaggcgcaggttagctgctcctcatctccctcagggagcccccactagcccacacttggccaatctggcagccttcggcatggaccgacgcctgacggcacttgccagaaggttcggagcggactacacgcgctacgcggacgacctcactttttccggtgcgccatcgcttggacgagcagctgatcgactcatcggtaccgtggccagaattgccacagccgagggcttctcaataaaccctgcgaagaccagggtgaggcgggcttggcagcgacagagagtaaccggcgtcgtggttaatgatcggcctgcagttgcccgcgacgaggttgatgcgctcagagccaccctgtttaactgcgtgcggtttggccccgtgagtcaaaaccggtcaggtgtccaggatttccgggcccacctcctgggtagaatcgcttgggtggccagtacagatgcacgcaggggagagcgtctgagggcccttgctgaccgcattgactggaattga

SEQ ID NO: 12951 - RNA, 1536 nt, synthetic construct
  source 1..1536: mol_type = other RNA
atggccggacgcagttttcctcggccccatgcacgacccgctttggttgcggcggcgtcagatgccttgttggctggcccgtggacagcagctgccatgctggctcggctggctgagtctattgaccccgtgggtccctggggtgccgatcttgtaggcgcagttctcgctgctcaccccttccccccagctgatgctcctcgcgagttcatggtcttcatcgacctcgccctgccccctgatgtaggcgtgaccacctggcagagcgttttagtgccagcaggagagccaacaggtgcgggccatcgagcagacgagcaggacgaggacgagcaggacgaagatgacggagaagacgatgatgaagaagatgacgaggaagatggaggaggcgcctttacaggcgcttggcccgcactgttcgaaccagtgccagggccagttgtcgttaggcgcctggctgcctcaaccgcaatgggtcctcgcagatggccagtgcccgctgtcgactacatcgccgccctagccagcagactcgctttaaccaccggggagctgctgtggtttgcagatacccgagggttccaacgcagggacacacggagcgagcttcgccattataggttcgcttgggttgagcggccagggagggtacccagactgctggaagcaccgcgtccacgtctgcggtccatacagcgaaggattctcgacgggctcttggctcccctcccgatgcatcctgccgcacatggggtcacaggaagatctgcgataactggcgcaagggtgcatgaggatgccgccgtggtgctgacgatggacctcgagtccttttttagcgccgtgacagctggcagagtctatggagtgctgcgttccgccgggtaccccgaacctgtagcccacttgctggccggcgtatgcacactgcgcactcctgtggatgtcaggaggagaatgcctactggcgctgctgcaaccacctctgctgcctggcggcttggcagaagactagacgtgccgcacctccctcagggatcgcctacctccccagccttggccaacctggtggcttttactctggaccgacgtctgactgactatgcagcgagagcggggtggagatatacccggtacgccgatgatctcacgttcagtcttcctggtggcggcacaggtggcgctagagcaggacgagcagccttacggctggcggaagccgttacaggcatggtggcgtctgccgggtttagggtgaacgaggcaaagactaggatccgcggtgcccaccaacgtcagttagtcacggggctggtggtgaatgcctcagcagccgtcccacggaccgagtacgacaggcttcgggccgtgcttcaccggtgtggcactgacggaccagcagcccaagccgatgaccacctgaggttccgggaacacctccagggacgcatcgcctacgtcgctgcaagtcaccctggaagaggggctcgccttctagccgccttcgatgccattacttggcccgacgattga

SEQ ID NO: 12952 - RNA, 1329 nt, synthetic construct
  source 1..1329: mol_type = other RNA
atgactcatgaccccgatgaaggactcgcgagggggttggcttgggcctttctggctgccgagacgtggaccagacctgctctcgtgggcagtgccgcaaccgctctgggaagacggcctcgttggctgggtccggtagtggacgtagtgctgcagcaccatcggtctgctcccaccgacagaccatatgccttatcaaggttcctcgtgagagagactacattactggagcatgcagcaagagctcgccgaggccgtgccctacgaatcgtgaccgtcccaacagtcactgccgcaacaggcaggcggagatggcctgtgccagatgtggctgatctgccatctttggccgggttgctggaactgcctcttgaccagcttgtctggctggccgatgcccgctcccagcaaaggagagcccccgatggtccactccacgcctatcggcatcgatgggttgaacgacccggcgctgtgccgaggttgcttgaggcacctacacccctcctaagggctgtccaacgccgcgtgctagagcgcatcctagtgtgggttccgacacaccccgccgcacatggctttgtccggggtaggagcgcaatatcccacgccaggagtcatgagggagccgacgaagtcgtttgtctggatctgcgggcctttttcgcatctgtccgagtggcccgtgtcgacggcttgtttagaggcgtaggataccctgaagccgtggcctggactttggcgtgcctttgcactcaccagacgcccgtgcgggttcttcacgacatgcccgctgggggagctgatgatgcacgagcctggttacgcgcgggcctacgtgaaaggcatctcgcccagggggcacctacctcaccagctctcgcaaacctcgcttgttttgccctggaccgtcggctggcaggtttggcagctgccactggtcgcgcttacaccaggtacgcggacgacctgacattctcaggagctgctgggggcgccggcagattagtaagcgcagtgagagccattgtgggggatgaaggattcgctctgcaccctgcgaaaacccgcgtgaggtcccgggatcagagacaggtggtcaccggactggttgtgaacgaccgggtgggcgtccccagagagtaccacgagcagctgcgggccgtgcttcacgatgctggtcgtcacggacccgcggttgcaaatcgcgttggctatccagacttccgctcgtatctcaaggggagggtcgggtgggttgagtccgtaagccctcaaaggggtcgccggcttagaagccagctcgacgccattgtgtggccagcgtga

SEQ ID NO: 12953 - RNA, 1332 nt, synthetic construct
  source 1..1332: mol_type = other RNA
atgtccaggcaccaggacgaagccctcgccagaggacttgcgtgggctttcctggctgcagaagcttggacggtgccagctctggttgacgctggcgcaacagctcttggccggcgttatcggtggctccctcgagtggctgcggcagttgtggctgcacatcgctcgcctccaaccgatggcccctacgcatttaccagattcgtactccagcagacctctctggtcgagcacgcagatagagcctcccgaagagggagcgtagttcgggtggtaagggtcccgaccttaccgggagcaatgggcgtgcgcagatggccagttccggagttgccagaccttcctgccctggcagatgccttggagctgccgctcgatcagctggtgtgggtggctgacactcacggtttgcagcgaagaacgcccgacggccccttccatgtttaccgccatcgatgggtcgagaggcctggtgctgccccaaggttgctcgaggtacctactccactgctgcgtgccgtgcttcgcagggtcctcgataggatcctggtgtgggtgcctgtgcatcccgcggttcacggtttcgtccgcggaaggtctgccgtgacccatgcagccaatcacgtgggcgccgaaagtgttgtgtgcctggacctgcgggccttctttgccagtataacagtcaaccgcgtgaacgggctgttccgtggtctgggataccccgagcctgtggcgtgggctttagcctgtttgtgcacacaccctacccccagagtagccctcgcaggtatgcccggagggggttctgcaagtagcagggcttggctacgtgccggcttgcgatcccgccatctcccacaaggggctcccacttcacctgccctggccaatttagcggggtttaccctggataggaggctagccggtctagccgccgcaactggactgacctattcacggtacgccgacgacctgacattctctggccccagagtcgaccaaggccggtttgtgtccctggtcggagcagtcgtccgggacgaagggtttgccctcaatccaccaaagacacggattcgctcagcgcagcagcggcaagaggtgactggcttagttgtaaacgatagagttaacgtgccccgcgcctatcacgatcagcttcgcgctgtccttcacgacgctacacgaaatgggccagccgcagcaaatagacaagcccaccccgattttcggagccatctggagggcagggtgggatgggtcgaaagcgtgaaccctgtgcggggaaggaggctgagagcgcagctcgaagctgtggtgtggcccgcttga

SEQ ID NO: 12954 - RNA, 1332 nt, synthetic construct
  source 1..1332: mol_type = other RNA
atgtctcatcgccctgatgaagggctggcaagagggttggcctgggctttccttgcagcagaccgctggaccgctcctgccttggttgatgccgccggcactgctctcggacatcgctataggtggatgtcagccctagtgaggcaggtcctggagaaccaccggttcgcccctacagaccgcccctacgagctgtctcggtttttgctcggcaggactgctctggtcgagcatgccgagcgagcagcacaaaggggacgcgctttacgggtcgtgcgcatatccaccgtagccggcgttatgggggagcgcagatggcctgttccggaggtgccagatctccccgctcttgccgacctcctggagttgcccctggagcagctggattgggttgtggacgcgcgcggcctttccagacgaactcccgatggtccttttcatcttcaccgacacaggtgggtggaacgtccaggtgcggtgcccagactgctggaaagtccaacgccacttttacgcgccgtgctgaggcgggtactagatcgcgtgctggtgtgggtacccgtccatccagcggctcacggcttcgttagagggagaagcgcggtgacgcacgcccgaacacatgtgggcgcagcttctgtggtttgcctcgacctcagaagttttttcacttccatcaccgtgggcagagtgaatggcctgtttagaggattagggtaccccgaggctgtcgcctgggccttagcttgtctttgcactcaccagacccctgtcgccgtgctagggagaatgccccctggtggttcagaagcagcccgtgcttggctgcgatcatccttgagggctagacatctccctcaaggggctcccacatcgccggctctggcaaatctggcctgtttcacactggatcggaggctcgcaggactagcggctacagctgggctgacctactccaggtatgccgacgatttgacgtttagcggcccacgtggctcagcacacagacttgtggcaagcgtcggctctatcgtgcgggacgaaggatttgacctcaacccagccaagacacgggtccgaggtaccggagaacggcaggaggtgactggtctggtggtcaatgaacgtctgaacgtaacccgggcatatcacgaccagttgagggccgtgctgcacgacgccaccaggaatggacctagtgccgccaaccgcgccgatcatcccgacttccggagccacctcgaaggacgggtcggatgggttgagagcgtaaacccagttcggggcaggcgtctgagggcacagctcgatgcgattgtctggccggggtga

SEQ ID NO: 12955 - RNA, 1347 nt, synthetic construct
  source 1..1347: mol_type = other RNA
atggtaatgcgcatagaccccgacgagggcatcgctaggggtcttgcttgggctcttctcgcagcggccgagtgggataaagccgcactgactagcgccctcggtcatgctttgggcaggaggcacagatggatccccaaggtggtcacagaagtcctggcagcctatcctcgggcccccatcgataggccacatgagctcactgggtttctgaggaccgggacctcattagtccacagcctcgcaagagccagacgccagggaagggcagttcggttgcaacatatacccatggtcaccggtactatgggactgcggcactggcccgtgcctgagattgacgacctcggcgggctggctctgcttctcgagttaccgctcgaacaactgatctgggcagccgatacccaagggcggcagagagcaactaggtcgggacccctgcacctgtatcgacatacatggcgacctcgcccgggagctgctccaagattgctggaatctcctactcccctcctacgggcggtcctgcgaagagtgttagaccgcatccttgtgtgggtgccagttcatcccgcagcccacggattcgttccaggtcgctccgctcccagtaatgcgcgggcacatgtgggggcggatgtagtcatctgtttggacctgcgtacgttttttacgagcattacagccgcgcgagtgaacggccttttccgcgtaatggggtacccagaaccggtggcctggactctggctgcgttatgcacacatcagacgcctgcccacgtacttgcagccatgccagccggtggcgactccacagttcgtcaccggcagcgcgcagagctccgtgttagacatctgcctcagggctccccaacttcacctgccttggctaacctggctgcccacggccttgacaggagactggcagggctggctgatcgcttgggcctcacctacacaaggtatgccgatgacctgaccttctctgggtccctaggcaacggcattggagtccctaggttggtcggagtgattggcgagatcgtgcgtaacgaggggtttgtgctgaataccagcaagacccgggtgagacataccggagagaggcacgaaattaccggactggtgacaaatcagcagctgtctgtcccgcgagcttaccacgaccagttacgcgccgtactacacgatgctgtgatgcacggccccgctgttgccaatagggcaggcctcccaaatttcagagatcacctggccggacgggtgggttgggtggaaagtgtgaacccagttcgggggagacgactacgggcccagttcgacgccatagcctggcctgattga

SEQ ID NO: 12956 - RNA, 1347 nt, synthetic construct
  source 1..1347: mol_type = other RNA
atgccagtgaagcgccgcgaccctacagcgcatgtagcacgggcactggcctggtcatttctggctgcccctgactggactgaggctgctctccggcggtctgcttgggtgacactgggtcgtagacaccggtgggtgagtgccttagcaggctccgcggtcgctacctatcgaacggcacccctggggaggcctcatgagttagcagggctgttggccgggtcagccgtgcttacaactgcccttcaccgcgctgccaggagagggactcctgttagagtgcgggtactgccaacgactccggccgcaatgggaaggcgacgttggccagtccctgaagtggacgatggcccagccctggctaggttgctgcaggtcccggacgagcaacttagctggctggccgatgttcaaggccgtcagagaaggaccccagctggaccccaccacctgtacaggtatcgctgggtcgccagacccggcactgttccaaggctgctcgaggcccccacccctttgctcaggcacgtgctccgaaggctgcttgatgaagttctcgtctgggtgcctgcacatcccgccgcacatggatttgtgcgcggcaggtccgttctcagccacgctagacgccacgtgggcgcagacttggtgctaggcctcgacttacgccacttcttcgccgcagttacagcagctcgcgtggctggcctttggaccctgttaggctatccggagggggtggttactctgctcaccggtctaacaactcatagaacacccgtccatgtgctgaccgcgatgccgcctggtggagacgtgtctgggcgtcacctgctgagggcgagattgagagcggcacatctgccccagggagcagcaagcagtcctgccctggccaatctggcctgctttaccctggatcaccgacttagcggatacgctgcggccctgggagccacttattcccggtacgccgatgatttgacattcagtgggccaagagacttacccgctgccaggctcgtacgttcggtgaccaccgtcgtagcagaagagggctttgccgtgaacccaacgaaaacccgagtacagcggtcctctgctcggcagcaggtgacaggactcgttgtgaacgctgggctagggatcccccgagaagatgaggatcggctgcgcgccgtcctacacgatgctgtccggagaggtcctcaggcggccaacagagacggcgtgccagacttccgggcccatttggagggcagggtgggttgggtcacctcagtgaatcccgtcagaggagcccgacttcggcgccaactcgaagctgtagtttggccaccccgctga

SEQ ID NO: 12957 - RNA, 1341 nt, synthetic construct
  source 1..1341: mol_type = other RNA
atgcgcagagcagaccccgtagcccatgtggccagagccttggcctgggcttttttggccgccccggcatggaccgaacccgaattgcgccgttcagcgtggaccactcttggccggaggcaccgttgggtgactccactggtgcggttggcgctcgtggtccataggacagccccgaccggacagcctgcagagttagccaggctcctggcaggaacagacgaactgcccgctgccttgcatcgagcggctagaaggggagctcctgtgcgggttagagtcgtccctgcagtccccgctcggacagcttctccaaggtggcctgttcctgaggttgcgggcgctcctgacttggcacgactcctgggagtgcccctggagcaacttgattggttagcggatgcccagggtaggcagaggcgcactccagcaggaccgctacacctgtataggtacagatgggtggaaagacccggcgccgtcccaaggttgctcgaagcacccacgccactcctacgacacgtcctgcgcaggctgctcgacgaagttctggtgtgggttccagctcaccccgcagctcacgggtttgtacgcggtcggtccgcccttagtcatgcacgcctgcacgttggcgcggctcaggtagtgtccctggacctgcgacacttcttcgctgctgttacagccgccagggttcgcggcttgtggacgttagttggctacccggagggcgtgacagctcttctgaccggcctgaccactcatagaacccccgtacatgtgcttaccgcgatgccaccaggtggggatgctagcgccaggcacttactgcgagctcggctgcgtgcacctcatcttccccaaggtgccgcatcatctcctgccctggccaatctagcctgtgctcgcctcgacagacggctcgcagggtatgcagccgcactcggagccacgtactccagatatgcggacgacctgactatctcagggcctgctgatctggccgcaccacgacttgtacgggctgtgagtgccgtcgtggtggaggaggggttcgctgtcaatcccgcaaagaccagagtgcaacgcagctctgcccgtcagcaggtcactggggtcgtggtgaacgcacgcacaagcgtccctcgcgaggaggaagatcgactccgggctgtgctacacgatgccgtgcggaacggcccagatgctgccaacagagccgccgtgcctgactttagagcccacttagagggacgtgtggggtgggtgagtgccgtgaatccagtcaggggcgctagacttcggcggcagctcgatgccgtggtatggcctggtaggtga

SEQ ID NO: 12958 - RNA, 1407 nt, synthetic construct
  source 1..1407: mol_type = other RNA
atgccggtccacaccaggagggatggagacgatggcactagaagggagagccatcgccctagaggcgttccagtgacgctggcccctgacgacggtttggcaaggggaatagcctggggactactcgccgcagaagattggacggccgatgcactgcaggctgctgtgacccgtaccctgggaaggccctgtgaatgggcgggtagggtagtaggaccagtgctggccgcctatcgggagccaccaacagatcggccagacgaactggcccgatttctcctgctagcaacacccctgaccgagatagcacatgccgtgcgtcaggaacatgagcctctgcgagtgcgagttctggccccagttcctggcagaatggggcgcagacgctggccagttcccgatctccccgaccttgtcgccctggctcgactgctggaggtgcctctcgatcagttggattggcttgctgacacggcacggttacaaaggcgttcaccaccaggcccctaccaggctttcgagcataggtggagaagcaggcctcatgccgctccacggttacttgaggcgccaggccccctacttagggctgtgcagaggaggatcctcgatcgtattctcgcatgggtgccagtgcaccctgctgcacatggcttcgtcgggggtagatccgcgatcaccaacgcagctcggcatgtaggggctccgaccgtcgtagctctggacctgcggagctttttctctactattacagccgctcgcgtggggggcttgtaccgaactatggggttgcccgaggccgtagtgcgcgtcttgacaggcctttccacccacgctacccccggttgggtgttaagtggcatgcccgcaggaggggatccctctgagagacacagacttcgggcgaccttgagaagccggcacctgcctcagggcagtcccacatctcccgcccttgccaatctcgcatgcttttctctcgaccaccggctgcagcgctatgccgagacagctggtctggtctactcacgttacgctgacgacctcactttcagtggacctgttgccaggccggcagccttgttagccactgtgtccacaattatcgtggcggaaggattcgtcgtccacccgggcaaatcacgcgttcgacggaccggcgaacgccaaacagtgactggtatcgtgactaatcgccggcccggaattgccaggtccgatagagacaggctgagagccgttctgcacgacgctcgaagacacgggcctgaagcggcaaaccgcgaacgccacccgcattttcgggagcacctccacgggagaatcacctgggtggagtcggtgagccctgtccaagggagaagactgcgggcccagtatgaagccatcgtctggcctgagcgctga

SEQ ID NO: 12959 - RNA, 1347 nt, synthetic construct
  source 1..1347: mol_type = other RNA
atgagtagcaaaacagtgcaagacgatcttgccaggcgcttgggctatagaatgctggctgtggagtgggatagagatcatctgttgattggctgcaggcgggctttgggatctgccccaccctggttggggccagtgattgacgctgtgctgcagcagtaccctgtaaaaccctccggccgtcaccacgagcttacagccctgatagcaagcactgaagaattccaggatgctgtctttgtgtcccgctctgggaggcattggcagattcgctccctccctgttggtgatctggacccggatgagctgcgcatggccacctctagatggccggttccaaccctgggcacagaggctgccctggcagacttgctgcgggtcgacctgcctgtgttgctgtggctggccgaccctaagaggatgcttcggaggcgccccgatggaggacttcaaccatacaggtacaggtggcttgagcgccacgggagaaccccacggttactcgaaatccctggacccctactccgccacgtgcaaaggcggctcttggagagagttatcgacaggattccccctcaccctgcggcgtatggctttgtcagaggggggggccctcataggaatgcagcccagcatgtcggagccgactgggtgatcaactttgatctgcgaagtttcttcgcaggcgtgcgtactggacgtgtggctgggatctttacagctgcaggatatccggcatccgtggtagctctgctagccgggcttgtcagtcgacccactcccgagttcgtgctgcgagggatgcctgatggtggcgaccccagcgacagagccctactgagagcccggcttcgggctgctcatctcccacaggggtcaccatcgtctcccgccattgccaacttagtcgcgttcaacctcgattgtcggctgaatcggctggcaaagaacgccggttttggctacacgcgctatgccgacgacttaacgttttcaggctcaggacctcgtccggcggctggtttcgtcccactcgtgcgaaaaatcattatagatgaaggattcgcacccaatgacaggaagctgagaatccgcggacgaggccagcgacagctcgtaaccggcatcgtagtgaatcagcacactaatttacggcggcgggatcatgaccgtctcagagccgttctgcatgacgcaataagaaacggccccgatgctgcgaaccgcgatcaccaccccgacttcagagcccacctggaaggtagagttgggtgggcagagcagctcaatccaaccaggggtgcccgactccgcaggcaactagaactgatcagctggccaagctga

SEQ ID NO: 12960 - RNA, 1344 nt, synthetic construct
  source 1..1344: mol_type = other RNA
atgaccccagaagaggacctggctttgaggctggcctatgtcttccttagtaccagctggagaagggccgacctaaccgacgcagcaatagcctcgcttgggggagagccagcttggctgggtgggctagtgagccgactcctgggttcaatccgggagcgccccgctgataggccctatgatctggctcgcgtcatcatgggccagcaggtgtacctagatggcttggatcgggatcaccatcaggataccgtgtggagggttcgatcctttcctgtgggggggttagtcgccgaaaccgagcgtatggcagtgccggattggcccgtgccacgtcttggaactgaaagggctctggccgacctgttgcgggtggacttacctgtgctgctgtggctggcggatcctcgaggatacctaaggcgtgcagacgacggcctccagccatacaggtacaggtggataaggcgacctggtaggacacctaggctgattgaagctcctggccctttacttagatacgtgcagcggcgcttgctggaccgcgttctcgttgggattcccgtccatcccgccgcatatgggttcgctcggggaaggaacgcagttagagctgctagacggcacgtcggttctgactgggtgattaattttgacctggtaagcttcttcaacggcatcagagaaagtagagtcagaggcattgtgcgggtagccggatatcccgagccagtcgccagactgatggcagccatcatgacgacagccacccccgtgcgcactcttcaacgcatgcccgacgacggccctgacgatgacagagccgttttgcggtcagtgctcagaacggcccacttgccccaaggagccccgacatccccagcaattgctaatctggcttgctacaggctggacgtgcgtctggcgggattagccgaatccctgggcctccgctatacacggtacgcagatgatttggcgttttctggacacggaactcgccccggtcgtcgcttctttcgcctcgtaaccgaaatagtcaccgatgatggctactgtctcaacgaccacaagcagcggcttcaaactcggagagggcgacagacagtgactgggatcgtggttaatgatcgagctaatctgaggcggtctgagtatgaccgactgcgcgcagtcctccatgatgccatgatcaacggcccggagcacgccaatagaaacgggtatcctgcgttccgggaacatctcgacggccgcatcggctgggtagagcagcttaacccagcgcgaggtgccagactcagacggcagtttgagctgattacatggccagaggataggtga

SEQ ID NO: 12961 - RNA, 1332 nt, synthetic construct
  source 1..1332: mol_type = other RNA
atgaggctgtccgatagcactctcgctcgggctctcgctatggccttcctggacggggactgggagttcgatcccctcctggatcgagccgcccaggttttgggcggcagacgacgatgggtgagaaggttggtgaaggacctgctagccgcatttcccaggacccccagagatgcaccatcagcgcttgcagggtggatcggggcccatccatccctgattgaggcagctgcaagggccagggacgcagctaggccacttcgtgttgcggcgatccatcctgggcacaccgagatgggtcgccgaagatggcctgtcgccactctggacgacctggctgatctggccgagctcctggatctcgaccaggcccaccttgcttggttcgctgatcaacagcacagagctagacgtgccccggacggtcctctccaccactacaggcggcgctggatatcacgcagtggccggaccccgcggttgttagaagtccctttgcccagactgcgcgcccttcaacgcaccctcacacatgaggtgttggcccatattcccactcacccggcggcgcatggatttgtgcgagggagaggcgctgtgacaggagctcagcagcacgttggccgggatgccgtgttgtccctcgatctgagcgcatttttcgcatccgtatcagcagcacgggtgcgcgcgatttggagagctgccggataccccgaacccgttgccgatgcgttaaccggagtagtgaccacccttgcccccgtgcggatgttaaccgccatgcctcctggaggccctccagaagcaagagcccttctgagagcctggctgcgagcctctcatctaccacagggcgcccctactagtccagccctggctaatctggccgcacatcgtctcgacgcaaggctcgccgggtatgctgctgcagcaggttggtgctacacacgttatgctgacgacttgacaataagtgggggtcccgagatggttcggcgtacggatgctgtggtcgctgcccttagccgcattgtcactgaagaaggctttcgcgtgaatccaacaaaaacgcgcctacggacagcgtctcagaggcagctggtcacgggcatcgtcgtcaaccggaggccaggacctggcaggagcgagtatgaccaactgaaggctctgctgcacaacgcctctcggacaggcggacaagcccagaacagagatggtcacccagccttcgcagcacacgtaaggggaaggatcgcttgggtggctcagctgcatcccgaaagaggggcccgcttactggccacttggcacgaggtggactggtcttga

SEQ ID NO: 12962 - RNA, 1449 nt, synthetic construct
  source 1..1449: mol_type = other RNA
atgcccagatctgctccaaggtgctacgcgagagccctccatgaccgcagtcatccggacgcaaccgtcatgacttccgaccgcgtgagaactttggcccggggcttggggaatgccttcttgggggctgaagcatgggcaacccggccaatggcagaagcggctgtgtcagtcgttggggttggagggaggaggaggtggccaaggaaactggcccgggaggttctggctgcttatccaagacctcccgccgatcggcctagagagttagcccggtttattgaaaattccccggtgttgtgggcggccttaaatcgttccgcaccccccggaagggctccagttctacgtgctcggcgaatcccccccacgccagtaaggatggccgataggcgaccgtggcctgtcccagagctgcatgatcttgccgacctggccgcactgctggatctggatcccgcccatctggactggttcgccgacgtcaaagggcttcaacgtcgcgccgcaccaggtcctctacaccactaccggtatagatggactactcctggcagcggcagacctcgcctgttagaggcacctcgcccccgtctgaggtcagtccagcgaacccttctggacgaggtcctcgccttaattccggtgcaccccgcggcacatggattcgtgcctggaagaagcgcagtaacaggagcaagacgccacactggcgccgcagttgtgatctcgcttgatctggcggcctttttcgcccacctcaacggtggcagagtctacggcgtgtttagaacggccggatacgcccagcccgtagctcatgctctcacaggcctctgtgtgcatcgcacacccgtggcggtgatagcggctatgcccccagcacgaccaggtagcacaccagaagctgtctctgcgcgccctggactccggagattgcttgctggtgcccacttaccgcaaggggcccctacgagtcctgctctagccaacctgtgcgtgatggcactcgataggagactgagcggccttgccgctgctaccggcttgacctatacacgttatgctgacgatctgacattttcaggggacttagagcccagggcagcccaacgcgtaaccgaagccgtgggtcggatcgtgagatccgaggggctggctctgcagccagccaagactagggtgcgggagcgctctaggcgacaagaggttacaggcattgtcgtgaacgaacacagtaatctgcccaggaccgagtacgatcgactccgcgccatactccacaacgctgcacggtctgacccagccgtgcagaaccgcgaacagcacgctgacttcagagctcacctgctcggtcggatcgcatgggccacccaacttaatcccgcccgaggccaaaagctgcgggctcaatttgaaaggatcgtgtggcctggagagcagccttga

SEQ ID NO: 12963 - RNA, 1344 nt, synthetic construct
  source 1..1344: mol_type = other RNA
atgtcagaccctcgcaccagagtccttgcacgggctctcgggaacgcctttctgacggctccagaatgggcgttgcggcctctgacggacaatgccgccacagtacttgggggacgtcgccgatggacaagacgcctggcacgggaagtgttggatgcgtatccgcgacctcccgctgacagaccaagggagctggccgcttttattcaggcttcccctatactgttcactgcagtgctgcgttccgtggagacaggtaggcctcttagggtgatcagaatgccacctgcccccgtccaaatgaacacacgacggccgtggcctgtgcccaaaattgattccattcaggatctggctagactgctggacttggagacagcacagttggactggttcgccgatgtcaaaggccttcaaaggcgagccgctccaggccctctccatcactacaggtacgcctgggcctctaccgcgtctaagaggcccaggctcctggaggcaccattacctagactgagatctagacagcgcactctgcttgagcagatcttagctcggatccccactcatcccgccgcccatggatttgtgcctggacgcagtgccgtgacaggcgcagaaccccatgcaggagccgctgtagtcataggcctcgacctcgccgcattctttgcttcaattcaagtgggtcaggtttatggcatttttcgtgctgctggatatgccgagcccgttgctcacgtgctgaccggtctgtgcactaccaggaccccagtacgggttataagtaatatgccggccacctcagacgtagagagccgcgtgcgactacgcaggctgctagcaggaggccacttaccacagggcgcaccaaccagtccggcacttgccaacctgtgtgcgctcggcctggataggcgcctaaacggtttagccgcggccgtggggatgacttatacccggtacgctgacgacctgaccttctccgcgggggaggaagttaatgccagacggctcatcaccgccgtcgacgagatcgtgagaagcgagggcttcgccttgcagagcgcaaaaacgcggatcaggcgtgatttccagcgacaggaagtcacagggatcgtcgtgaatgcccaccccaacctgaatagacgtgaatacgatgagctcaaggcaatcctgcacaatgctttgcgccatgggcccgaaggtcaaaaccgggccggacaccgcgattttagagcacacctcctcgggcgcattgcttgggttgcccagttgaacccagaacggggcaggaagctgcgggagactttcgaagcgattacttggcccagcctttcgtga

SEQ ID NO: 12964 - RNA, 1362 nt, synthetic construct
  source 1..1362: mol_type = other RNA
atgtccaggaggactaccagggaggctggcctggctaatgccctcgccttgtcctttctggctggggcatggtcagtggacggcctggaacaaagggggacaaccgtgttgggcgaccggcctagatggctgcgacgcttggttcggctggtgaccgacgcttacccacgtcccccggtggacagacctagggagcttgccgcgtatgtgttagctgcaccccccctccgacgtgcagcttactcggctgctcgccgaggacaccgacttccagctcccagagcctggctcgccgtaccaacagccatggccccaaccaggatggctccgtctcggtggcaggtgcctgcaatcgacgatgtgggcgcactggccgacctgctggatctcgagatgggacagctggaatggctggcagatgcccggggattactgcggagagcgcctcaggggcctttgcatcactatcgctatcgctggcaaccaaaagctgggggcgcgaggcttcttgaagcgcctttacctcggctgcgtcgcctgcagcggactcttctggataccgttctcgccagagtcccagttcaccccgccgctcacggttacgttccaggtcggagcgcggttactaatgcagccgcccatgtaggtgccgccgtggtagtgtccctcgatctggaagccttttttagctctctgagtgccggaagagcttacggcgtgttgcgcactgctgggtaccccgaaccagtggcccatctcctgactgctctctgtacaaacgccgtacctgtacatgtgctaagggggctcccagactctgtgcccgtcgatgtccgcttccgtctccgtcgggccttagccactccccacttgccgcaaggagccccaacgagtcctacactggcgaacctgtgcgcgcacgctctagaccgacgccttgcagggtatgctgcagcagcgggcgtgacatacacaaggtacgccgacgatctgacgttctcaggaggccccgggttattgagagctgctcccgcccttgtgaccgcagtccgaagaattgccgcagcagagggacacagagttaacgtggccaagaccagagtcaggagctccgcccagcggcaagtcgttaccggattggtggtcaacgagcgcctgaatctcccccgcggcgagtatgaccggctaaaggccgtcgtccacgatgcagtcagacatggcccggctgccgcgaatcgacatggtcacagggatttcagagcccacctagagggcagggttgcctggctcgaggcagtgcatcccgaacggggtgcacgcctgagagctcagctggcaagggtggcatggcctgtgagctga

SEQ ID NO: 12965 - RNA, 1332 nt, synthetic construct
  source 1..1332: mol_type = other RNA
atgcgggcccgagacagactagccgcagctctggccgacggaatgttagcgggggattgggccggtgcacctatgcgagctcaaggtgcattagtcctcggcgagcggcacgcttggatcagaagactggttcgggaggtgcttgaattctaccctgaaccacctgccgatcgtccccgagaactagcacggctgataggacgcacaagaactatggaggagttggagcggagagccagaagacgcagacggcgcttgccaattccccaacatcgggtgactacacctaccacaacagtgaggaggccgttcccggttgtgagcattaatgacgctaccgcgctggcagagtgcctagggctgtcagtccctgacctcctgtggttcgctgatactaaaggccttcagcgcagggccgcatctgtagggctgcatcactataggagcacatgggtcgggacacggtcaggttcgcggttactggaagcaccaaggccacggctcaaggaagttcagcgtcagatcctgcagcaattgctcgcccccattcccgttcacgaggctgcccatgggttcgttgccggtcgctccgctgtgactggagctcgaccccatgtggatgccgccactgtgataagtctggacctggagagcttctttagctctgtatcaggcaggcgtatctacggcctgttccggatggccggctttcccgaaccagtggcgcacctcttgaccgggctgtgcacacaggcaacccctgtggacgtcctcaggcgcatgccatctgggcacccagctgcctttagactgcgtcgtaaattagcagagccgcatttgcctcagggcgctcccaccagtccccacttggcaaacctcgcagcttttggacttgaccgccgactggccgcctatgctagtcggattggagcccgctacacccgctatgccgacgatcttacgttctctggacctgacctgcgcaggagatccaggggagtagtcgccgcggtagctcgaatcgttgcggaggagggctttgccctgaacaccactaagactagagtgaggggacaggatgaccgtcaaaccgtgacaggcgtcgtggtgaatcgccaccctaccgtcagcagggcggaatacgatacgctcagagccatcctccacaactgtgtgcgattcggccccgaaagccagaataggctgctgcacacggactttcggtcccatctcagaggtagggtcgcttgggtggctgccctggatccagagagaggcaggcgccttcttgcaacctatagtcagatcgatttttccccctccgggacctga

SEQ ID NO: 12966 - RNA, 1326 nt, synthetic construct
  source 1..1326: mol_type = other RNA
atgccagacgggagggctcgacttgcgattgccctggctgatgcttttctcgcaggcgcctggacaagtgacggattaaggacacaaggccagcttgtcctgggcgctcgtcatgcctggcttcgaagactcgcaagagaagtgattaaagcttatcctgagccgccatctgatcgacctcgggagctgttcgcgtttgttctgcagacacaggcaatggcccaagtagaaagacgcgctgcacggcctggcggaggatttccactgcccctgcaccggcttaccgcacctactagcatgattaggcaccccttccccgtgactagcctcgaccatgccggtgaccttgctgcactcctcggggtcagcatggaggagttgctgtggttcggcgataccaacggactgcaaaggagggcccgaagcgaccgtctacagcactacaggtccacatgggtcccaagcgtgagtggggggcgactacttgaggcccctctcagccggctgaaggcaatccagagacagattctggcccagatcttaacccccattcctatacacgatgccgcacatggcttcgtggtaggacgatccgctagaaccggagccgccccacatgtgggtacaggcttactcatctccctagatttggaatctttctttgcctccattaccgggtcacggatctatggggtgcttagggcggcgggttatcctgaacccgtagcccacctgttgacgggcctgtgcgctaccgccactcctgtcagggtgttggctgaaatgccaggtaccgcagcgccgtcggcctttagactgagaagacggctcgctgagccccatctgccccaaggagcaccgacctcaccccagctggctaatctctgtgcattcgccatagatcgtcgcctgtctgcctacgcctctgccattggcgcagtgtatactcgctacgccgatgacctgaccttttccggcgacaccctcgttgtcagacagcgcggggttgtggctgctgttgcacggatcgtcgctgaggagggcttccgcttgcacatcgataagactcgtaccagaggtcgcgacgcccgccaacaggtgacaggagtagttgtgaatgccagtacgactgtgccccgccgggactacgatactttgagggccatcctgcacaactgcgtcacacacggcccaagtactcagaatagggtggagcacaacgattttagggctcatttaagagggcggatatcatgggtggcctcattggacgcaggacgcggtcggaaactgctggcgacgttcgaacagatcgactggacatga

SEQ ID NO: 12967 - RNA, 1326 nt, synthetic construct
  source 1..1326: mol_type = other RNA
atgagcgaagctctcgtcgccagtgctttagccgcagccctcctagatgggccttgggacgcagccgcactcacaacccgagccacagctgcactgggtggaaggaggcgcgcttgggttgctggtgttgtggcggacgttttggcagcccatccccgtcctcctttggacgctccacgaagcttcactacagagctggctcggcaccctgctttagcacgcgccgtgcacgctgcagaaaggaggggaaggcctctaagacccgcccatctggaacctgtcccctcatcaatgggcagaagaaggtggccggtgcccgtgcttgatggggttgcagatctggccgctctgctggaccttgacctcgcggagttggattggtttgcggacccccggggtttgcagcgaagagctagtgggacagccctgcaccactatacctcccgatgggtcgcaaaacggggaacccctcggctcattgaagcacccaagcccaggctccggcatctgcagagaattgtcctccacgcggtgctcgatgtggtggacgtccacgatctcgcccacggctttgtaccagggcggtcagccgtcactggagctcgaagacatactggcgccgacgtggtcgtaaggatggacctatccgccttttttgcctccgtgggtgctgcacgcgtgtacggagagttccggaggctgggctatccggaagctgtggcacacctgctgaccggcctttgcacgcatcggactccactgactgtacttcgcaccttgccagccggcggaagagccgaagatcggttccgtctgcgccaatggctgtctgccgcccacttgccacaaggggctccaactagcccggccctggctaacttagtggccggaccattagataggaggctggccggacttgccgactctatggggcttaggtgcacgagatacgctgatgacgttaccttctccggcggtcctcagcttcgttcgggtgcaggccgcctcgtgagatgtgtcacggcaatcgccgccgaggaggggttcgtagtgaatggggataagaccagagtccggggcgctgagcaacggcaagtcgtgaccgggatcgttgtgaacgagcgtacaagtgtgcccagagacgagttcgatcgcctgaaggcgctgctgcacaacgcggtgagaagcggacctgcattgcagaatcgccggggccatccagactttcgcgcccatctggcaggccgtgtttcttgggtggaggccgtatctcccgcgaaaggccgaaggctgcgcgctacatacgatagaatagcctggggctga

SEQ ID NO: 12968 - RNA, 1320 nt, synthetic construct
  source 1..1320: mol_type = other RNA
atgagtgctgctgttgctgccgccttggctgctgccttcctggatgccccttgggaggccccacaactagcggcagctggacgctgggctttgggactcaggagagccgcctggttagatcggctggccgcagacgttgtggcacagcaccctaggcccccatgtgacgccccaagagcgctgacggctctcctcgtggcacacccagaacttgcctccgcacaggcagtggcccgaagacgaggtcgtcccctcagagtacggcacctggtggcagtacccgctgcaatgggtcgggctagatggcccgtaccaccacttggtggtgcagcggatctcgcagccctgctggaagtcagccctggggagctggattggttcgccgacgttcgtgggtggcagagaagggccgagggcacagctctccaccactaccgggctagctgggtggcaaagaggggagctccacgcctgctggaagctccaaaaccacggctcagggctctgcagaggagattgctacgggaggtccttggggcagtacccgcacctcctgtggtacacggatttgttcctggcaggagcgcagtcactggggctcgagaacattgcggcgctgccgtcgtggtccgcgttgatttgaccgccttctttgcgagcgtggatgcggcgcgtacctatcgggcctttcggtctttgggttaccctgaggccgtggcccacctgctaacaggcctcaccactcatgctaccccggcacgggatttacgagggatgccccctggcggagatgctgacgagcgtttcgcccttagacacaggctggctgctgcccatttaccgcagggggcaccgacatctcccgctttagccaacctttgcgcccgctcgttagaccgcagactggcaggcctggcagcagctctcggagcaagagtgacccggtatgcggatgacgtgactttttctggcggggaagaattagccgccggagcgcaaaggctagtgaggtgcgttacacgagtcgccgccgacgagggctttacggtgaatcccgccaagactaccgtgagaggacggggggagagacagctcgtgacaggcgtcgtggtcaacgaacggcctaatcccgtgcgctccgagttcgaccgcctgaaagcggtgctgcatcgatgtgccgtccatggccccgctagtgttgaagcaccgggaggggtggacttgcgctcccatcttgccggtcgcgttggctgggtcgaggcactttcaccttccaggggccgccgtttgagggagtcattcgacgccatcgcctggtga

SEQ ID NO: 12969 - RNA, 1320 nt, synthetic construct
  source 1..1320: mol_type = other RNA
atggccgaaccagatgccgtagcagcggcactcgctgccgcttttctcgacgggccatggacggccgatgctctaactgctcgggcccgagaagctgttggcgtacccagagccagatgggtagcccggctggcaggagaggtaactggcaggttcggaaccccgccattagacgccccccgtgaactccgagctgcagttgccgggtcaccagcatatgccggagcaagagatgccgccaggagagccggacggcctttgagagtcgcacatcttgctaccgggacaacaaggatggggcgcaacaggttttccgttccccccctcgataccgtcgacgacctggctgctttttgcggcctggatccagcacagctcgactggtttgctgacgtccatcgctttcaggtgagggcgggcggatctgctctgcatcactacagggcgaggtgggttgctaaaaggggcgcccctagactgttggaggccccaaaacctcggctgaaggcagtgcagaggaaggtgttacacgaggtgcttgaccgcttccctgtccatgatgccgcccatggctttgttcccggtcgaagtccagtgacgggcgcatgggatcacgttctggcccgaacagtggtgcggtttgatctggaggggtttttcgcaagcgtgccagccgcgcgtgtacatggcacattccgcagcaccgggtatccagaacctgtcgcccaccttctgacaggcttggtgacccacgttacccccctgcgggatcttcgtgccatgcctgatgggggatcggccgaggctagacaccgtctgcgcaggaatctttcccacgcccacttgccccagggagctcctacttccccggcacttgctaatctgtgcgcgcgggggctagacgccagattggatggcctggcacgggtcctcggtgcaacattcacccgctacgctgacgacctgaccttctctagtacaactggtctggaccccgtgcgcctccatagagctgtgagggcagtggtcgccgatgagggcttcactctcaaccccgccaagaccagggtaagaggagccggtagccgtcaagtggtgacgggactcgtcgtgaacgaacgccctaatgtgccccgggaggagttcgaccggctaaaagcggtgctgcataattgtgtgcgccacggtcctactagccaagaccgagaggggcacagagacttccgagcccacttgctggctcgcgttgctcgggtcgaatctgtcaacccggcgaagggcaggcgcttaagacggtcattcgaacagatcgcatggtga

SEQ ID NO: 12970 - RNA, 1347 nt, synthetic construct
  source 1..1347: mol_type = other RNA
atgtatgacgctagagggcgcgctttcttaggccggtgccttgccgacgcttttctcgcaggcgtttggaatgagcgggcattagttgaccgtgctggccgcgcactcgacagaagaccacgctgggtaagagccgtagccagggaggtgctggctgcctatcccagaccccccagcgatcgtcccagggaactagcgaggctcatcgaactagcgttgagggaacgccccgcacctgagggagatagcgaacctcccagggttaggcgctggcttgtacctgagccggctatgggcagacgcagatggccagtcccagagatcgcttcactgggagcgctcgcggggttcctgcaagtgtcggatggcgagttagcctggctggccgatgctaggggcttggaacgcaccgtggagaacgagagactgcgacattacagatacggtgctttgccccgtcctggacgccctgtgagggtcatcgaacggccaaagcaccgactgaaatctatccagagaagggtgcttcacgagctcctcgactggatacctgttcatgaggccgctcacggattcacaaggggccgatcagtacgaacacacgcacgggctcatacagggcggtttgtggtcgtgcgctttgacctggaggattttttcgcaagtgtgcgcgccgccagggtgtatggaatattccggactgccggttacccagaatcagtggcttacgccctgaccgtgctaactaccaacgtggtcccagccaccgtctggcacgagcttccacgccctgttgcccctcgtttgctgggcgctcaccatcatcttggccgcagactggcaaccccacacttgccgcagggtgcaccaactagccctgcattggccaatctcgcagcgtttagactggacaggcggctggatggcttggcgaagagtctggaaattagttactcccggtacgccgacgatctgaccttctctggagatgcccgtctcgtgcgagctgccgctacagtgcgtagagccgtcactcaaattgcccgggaagaggggtttaccgtcaacgagtccaagagcatgctggctacgagagcagggcggcagagggtctgtggagtggtggttaatgagcatctgaatacaccccggcgagagtatgacgtgctgcgggcaattctgcacaactcctctaggtatgggccccagactcagaaccgcgcagccattcccaatttcagggcccacctgcttggtcgaatcagctggatcgaatccgtcaacccgcgacggggggataaactcagacggcatttcgcctctattacgtggcaggaagactcctga

SEQ ID NO: 12971 - RNA, 1347 nt, synthetic construct
  source 1..1347: mol_type = other RNA
atgtacgacgtacgcgcaagggcctacctagcccggtgtttggcggacgcctttctcgccggagtctggactgagcgagcaatggttgatagagctggacgggcactagacccgaggcctcgatgggtgagggcagttgcccgtgaggtgctggctgtctaccatagacctcctgccgatcgtccccgcgagctagcaagattcatcgggcttgtgctggcagacaggtctgcccctgaagacgcgcccaaccctccacaggtcagacgttggttgataccggaaccagctatgggacgacgccgatggccagtgcccgaaattgcctctgtgggagatctggcctcctttctgggggtgagtgatggagagctcgcctggctcgctgatgctcggggattagagagaatggtgaaggatgaacgactgaggcactatcggtatgcgaccttaccacgtgctggccgccctgtacgcgtaatcgagcgacccaaacaccggctcaaggctatccagcggcggctgctgcacgaggtccttgattggattcccgcacatgaggcttcccacggcttcacaagaggccgcagcgtaagaacccatgcggggggtcacacagggcggtttgttgtggtgcgacttgatctcgccgacttcttcgcctctattaccgccgggagagtctacggtatctttagaacagccggctatccggaatcagttgctcatgccctcactgcactgatgacgaacgttatccccgccgtgttgtggcacacacttccccgcccagctatcccaaggcagatcgctgcccatcaccacttgggcagacagcttgcgacgcctcacctgcctcagggtgcaccaaccagccctgcattagccaacttggctgcatttcgcctggacagaaggctgaccggcttggcaggctccctggagattagttactcgagatacgcggacgacctcactttcagcggacccacccaactggttcgcagggctggcaccttaaggcgtgctgtggcccagattgcccgggaagagggtttcactgtgaacgatgacaagtccatgcttgccacacgggctgggagacaaagggtttgcggagtggtggtgaatcaacatctgaatgtgccacggagggaatatgatctgctcaaggccgtcctgcacaactcagccattcatgggccacagacccagaatcgcgagggcgtggtcaattttgaagctcatctgctgggcaggataacttgggtcgagagcctcaatcccacacggggtgacaaactgaggcgccagttcgcaaaaatagtctggcacgacgatccctga

SEQ ID NO: 12972 - RNA, 1350 nt, synthetic construct
  source 1..1350: mol_type = other RNA
atgctctctgcacccatgtacgaccacctgactcgcgcttccctctccaggtgcttggccgacgccttcctggctggtgcgtggaatgagaatcggttagccgggcgagcagggcaagccttagctcctcggagggggtggataggccctcttgtccgggaggttctggccgtataccacagacctcccgccgatcgcccaagagagctgaccagatttatagcacttcagctggaacagatgccgcctagtgaccttgacccgccacgtgtcaggcggtggtttgttgccgaactggcaatgggcagaaggcgatggcccgtgcctgatcttgcatctgccggtgctttagccggctggctggaggttgcaccaggacatctcgattggttggcggatgcccgcggattggagcgcacaaccgcaacagagaggctgcgaaactatcgctatagttggttaccacgcgctgcaggcccacctcgtctaattgaaaggccaaaggctcggttgaaagccatccaacgcagactgctgcacgagattctcgattggatccccgctcatgagagcgctcacgggttcactcggggcaggtctgtgaggtcccatgcagcggctcatacaggacggtacgtcgtggtcggcctcgatctaaaggactttttcgctagcgtggtcgccgggagagttttcggcatcttccgcacagccggttaccccgaaccagtagcccatgtgttgaccgctttgaccacaaacgccgtccctgtcgaggagtgggcatcagtgcccagaccgagagatcccgggcttgtaggtgcccatcaccgcctcggtagacgcctggcaacacctcacctgccacagggagcaccaactagccccgcgcttgccaacctagtggcatttgccctcgaccgtcgactggctgctctcgctagggccactggcgtgacctatacccggtatgctgacgacctgacgtttagtgggcccgcttcattactcagaggcgccgatcgcttccgaagctccgttgcggacattgcccgagaagagggattcagggtgaatgaaagaaaatcgaccctgatgactagagcgggacgtcagagggtgtgtggcgtggtggtgaaccagcgactgaatgttgcccggacggaatacgatgagctgaaggcaatcctgcacaatgcggcccggtccggtccttcttcacagaaccggcacgccgtggcagactttcgtgcccatctgctcggacggattgcctgggtagaaagcctgcaccccgggaggggagaaagattgagggctaggttcgaggtgatcgattgggacagatga

SEQ ID NO: 12973 - RNA, 1353 nt, synthetic construct
  source 1..1353: mol_type = other RNA
atggatagacgcactagagcctatcggtccctctctccttgcctcgctgacgcctttttagccggcccctgggacccagctgcattagctacgcgggcaggtttagtgctcgagcctcggccaccctggatcggattgttggtccgcaacgtccttgccgcttacgaacggaggccggctgatcggccacgtgagctagctaggtacattgccttgcagctggagagggtggacgcagataccgcagggcccagacctagagtgcgccgatggctgctcgcagaactggccatggttagaaggccatggcctgtgcccgaactggcaagcgtcggagctgttgccaatcacctggaagtctctgatcggcatctggcgtggctggccgacgttcgaggccttgaaagaacagggtccgatgagaagctgcgccactacaggtacggatggttacctcggcatggtgggccccctagagtgattgagaggcctaaggcgaggctcaaaagtatccagcggagagttctgcacgagatcttggactggataccagcccacgacgccgctcacggttttacacgcggcaggagtgctcgctccaatgcagcagcccatacccgccgtccagtggtcatggcgttggacctggaggattttttcgccagcgttagagcccccagggtgtacggaattttccgcaccgcaggttatccagaacccgtggctcacactctgacgggcctatgcactaatgctgtgcccatcgaggagtgggcagctgtgccacatcctactgcgtcgccgctagcccaggcccatcacagactgggccgtcgtcttgccacacctcacctgccccaaggagcacctactagcccggcacttgcgaacctggccgccttcactctggatcgcagactcaccgggctggcactcgctttggacgccacctatacgcgctacgccgatgatctcaccttctctggctcaagccgccttctggacaggggtgggcagatccgggcaacaatagccaccatagcccgggaggaagggttcgccgtcaacacccgtaagtccgtagtcacaacaagggccgcgcgacaacaggtgtgtggcattgtagtgaatgacagacttaatgtgaccaggcacgagtatgacgaactgaaagcgatcattcacaacgcagcccgacggggcccatcaggagaaaaccgggctggactgtctgattttcgggctcatctcctgggcaggatcgcctggattgagagtctccatcccgctcgcggggctcgacttcgatcacagtttacaagaatcgtatgggaccgacagggcgctgcctga

SEQ ID NO: 12974 - RNA, 1431 nt, synthetic construct
  source 1..1431: mol_type = other RNA
atgaggagaggacctgcaccattgggtacccccccaggcgacttagcacaagccgctgctgcagcattgctcgcaggtgcctggaccgaacgggctatgctacggcggctgcaacaggctgtacggcctctgggtcctagattgcccgcacgcctggttgcgagtgttctggccctccatcggacacctcctgccgatgctcctagggcactcgctcaggagatcgatgacctggtccgcggacatgcaccaagaggaggctggccaccgaacgcacgtgtcagacggaggtacgcccctcctaccgccatgagaggtgctaggtggccggtagcccctcttcccactgttgccgctctgggtcgactggtcggggaaagggatccaggggctctggcctggttggctgacgttcgcggcctggaaagagaggttccagatgagcgcctcagggcatatcggtatactcatcacccccggacaggtggaccaccgcgtgtactggaacgccccaaggcacgcttgaaggaagtccagaggaccctgctgcgggaggtccttgctccaattcccccccatgacgccgcctgtgggtttgtcgcagggagatccgtgcttgaccacgccgccaggcacgtaggcagaacggtggtggtgcagctcgacctggaggacttctttgcccaggtgactgccggccgagtgttcggaatcctgcgagccgccggatatcctgaacccgtggcgcacgccatagtgggcctaacgacaaacgtggtgccatacggcttctgggctcgaattccccgccccgatggtccacgggagatagagagacaccaccggttagggagaaggctcgccactccccatttaccccagggcgctccgacttcaccagctttagccaatttggcggcctttaggctggacaggagactggatggcctcgcgcgctcactcggactcacctattcccgctacgcagacgatctggccctaagcggaggccgacatctagctcggcgcgcttacgaacttgagcgcacaatcgcggctattgccgcggatgaggggtttagagtgaacccgcagaaaacaagggtgagggcccgggaaggacggcaaacagtctgcgggatcgtcgtgaatgagcgcccagctgtagcaagacgggacgtggaccgtctgcgagcccttctccatgaggccgaagtggccggaccaagagccgctgatcgtggagggatgggacctgccttcgaggctcacgtccgaggtcgtgtggcctgggtggcacaggttcaccctgcaagaggggcgcgtctgcgagagcagctgaggagagttgactggtcggcacttcgcgataccggggatgctggcgtgcacaggtcttctccccctggcgacaggcccttcaccagctga

SEQ ID NO: 12975 - RNA, 1371 nt, synthetic construct
  source 1..1371: mol_type = other RNA
atgcccccacctccagaccaaccgcaaccccttcgttctgacgcagctgctgcactggccgacgcgtttctggcaggagcgtggacgaggcccggtatgattcagagagggcacgacgccctcggcgttgaagcagtgccaggcctgcgatggttaaggcgtgaggtcgatcgcgttctggcagcctacgctcaccccccacgagacaggcctagagagttggccgcattcgtagcggccacaatcgatgcacgaagagccgctccgtttccccccaaacatcggctggtagctccgggagccatggcaggtagacggccttggcctgcaattcccgagctggataccgccggcgatttagccgactggctcgctctcagccacggagagctggcttggttcgccgacgttcaatcacgcgagaggcgcgctgacgaccgaagactgcgccactacacttacgcttggagtgctagacccggtgccccagtccgcttcttggagcagcctaaagctcgccttaaggcaatccagagacgcattctccacaagctgcttgtccatgtccccgcgcatgatgccgcgtacgggtttgtgccggggcgagatgtactgcaacatgctcgacgccacgctggagctgccgcagttctgagattcgacgtgcgggacttctttgtgagcttgcccgcaggcagagtctacgggatctttaggctggcagggtatcccgaagctgtggcacacgcattaaccggcctaaccacgaatgccgtcccacctggcgcttgggctgacgttccagcccctgctgaccctgctctgcatcgccagcatgtgctgcttggaagacggctcgccgctcctcacctcccacaaggagctccaacttctccactactggccaacttgtgcgcctttactttagatcgccggatggccgcacttgccgtgaagctgggtgccacatataccaggtatgccgatgacttggtgctgtccggggatagggcacttgccagacatgcccagcggactactcagaccgtacgggccatcgttaggggccagggtctaaggctgaacgaaaccaagacaacaatcatggtggcggcacagaggcagagggtgacaggcattgtcgtgaacgatcaccccaatatagcccgagatgagtatgatcggctccgtgccatcctccacaatgcagccagggccgcggatccccatgctgaaaatcgggcgcacgtgcctgacttccgtgctcatctccggggccgtatagcctgggtggagcacgtgaacccacaacggggagcgaaattgcgcgcccggttcgaacagattgcctggccagcctcccctagatga

SEQ ID NO: 12976 - RNA, 1335 nt, synthetic construct
  source 1..1335: mol_type = other RNA
atgacttcagacctacagaccgttgcaggcgctctggcctccgctttcctgcgtggagtgtggaacgaacggcgattagtagcccggggggaaagaatgattggccagaggccggtgtggctgactccattggtgcgccgagtgctcgagggctatcacagaccccccgccgacagaccaagagagctgcaagcctttattcgcgtgagtctccgcgacattacaggaagggctcgcttggccaaaagagtcgagatgcgccactggagcccgacacccaccgtcatggtggatcgcaggtggcgggtcccaatcctgcacaccgtgggagacttgggggcccttttaggtctggaccccggtgcgctgatgtggttagcagacgccaggggcctcgagaggtttgcacctgaggagcggctgaggaactatcgctacacctgggtacctcggacaacgggagcgccgaggttgctcgaagcgccaaaagcgcgtctgaaggtggctcagagagacgttctgagacgaattctgtgctgggtgccacctcatgatgcagcttacggcttcataaggggtcgatccgctcgggaccatgctgcacggcataccggacgggaggtggtgctctcatttgatctgatggacttcttcgcaggcgtaccagccagaagggtgtacggcatataccggctggcaggttaccccgaacctgtcgctcactgtcttacagctctctgcactaaccagattcctcgaaccgtttctaatgatatcctgggccgtcctgacccagcttacgccctgctgaggagaagactcggcacccctcatttgccccaaggcgcacccaccagtccagcattggccaacctggtcgcccacgcccttgacaggaggcttacgggcctagccgccgcacttggtggaacgtatacaagatatgctgacgacctcgtcattagcggggatgcccagttagcgcgcagaatcggggttgcccagcgagcagtagccgagatagcagctgatgaagggtttgttatccgccccgccaagacaagacgcatgagccgcgccgatcgtcaagctgtgtgtggaatcgtggttaatgcccggactaatatcccaaggagggattatgatcgtctaaaggccatcctgcacgatgccgtgcggcatggacccgatgcagctaatcgggacgggattgcggatttccgcgcccaccttgcagggagagtggcttgggtcacttctctgaaccctgatcgtggggccaaactccgaactacctttgacgctatcgtctgggaccctcggccccagacatga

SEQ ID NO: 12977 - RNA, 1260 nt, synthetic construct
  source 1..1260: mol_type = other RNA
atgctcacccggcgcgaagtttccgaggttctcgccgtggcattcctgagtggagaatggcactttgaggagcttcagcgcagggctcggagggcacttggtagacgcgcctggctaaggccactggcaattgaggttgtagatgcgtaccggcgacctcctctcgacagaagacgggaactggttgcgtatattgaacacgctatccctagacgcgtgaggcttcccccgcgaatcctgaggcagcccacattccaccccgccatgggatttgcgagatggcccgtgcccaggatcgacacagtaggggatctggctgcctttctggggctggaagtgggggagctggaatggtttgccgacgtaaggggcctggagcgtgtggtcgacgatgagcgcctcaggcattatcggtatacgagattacctcgcgcctcaggacctccccgagtgttggaagcacccaagcctcgtctcaaagcgctgcagcgccgtctactgcgggaggttctcgcctttgtccctgtccatccggctgcacatggcttcgtcggcggcagatctgcacggacacacgctgcaacccatgtgggccgtagggtagttgtgagagtggacctggaggatttcttcgctggcgtgactgccgctagggtgttcggcatcttccgcgcctgcggttacccagaaggagtggcccacgtgctgaccgggctctgtaccaatgcggtgccagctggtgaaagcgtcgccggtcactggcgattgagtcgcagactcgcggctcctcatctaccacagggagccccaactagcccggctttggccaatctggcagcctttgccctggaccgacgtctttcagggctagcagcagctgtcggcgcaaggtactcccggtatgctgacgatctggtattttcttccgacacccacctgagaaccccagtcgctgccatagggggcattgcccgggatgagggcttccaagtgaacgccggcaagactagagtcatgggacgcggtcggcggcaaactgttacgggagttgtggtcaatgcacatcccaacgtccctcgagtggaatacgagagattaaaggcaactttacatcgggctgcccacgatgggccagctggacttgacccaacagtgctgctcggcaggatagcctgggtggagagcttgaaccccgcccgaggagccaaattgcgcacagctttcgggcacatcgcctggaccccccttgagaacgggtga

SEQ ID NO: 12978 - RNA, 1212 nt, synthetic construct
  source 1..1212: mol_type = other RNA
atggcaagcagcctgtctcggcgcgagacagccagagtccttgcagggagttttctgggcggagagtgggaacttgaggccatggccaagcgagccggaagagcactaggtcggcgcgtatggcacaggagagtcgccgaacgaactctgagggcatatcgccacccacccagagatcgccccagagagctggcagacttcgtcttcacgctgctcgatgacgtgaggctcccacccaggctcttacgggaacctgtttttcacacggaaatggccccaggcaggtggcctgtaccgagaatcgacacacttggggacctggccgaccggcttgagctggaacctgggcagttgggatggctggctgatgtgcgaggactggagaggacatccactggaaagctgaggaactatacctatgtgcgtgtgcctaggagaagcggaccaccgcgggtgcttgagaggcctaaagcccgcctcaaagagattcagcgatggatactgagagaactcctggcttggattcccactcacgacgcggcccacggatttgtaaagggcagatcggcacatacccatgccgccctgcacgtggggcgaaaagttgtggtcaggctcgacctggaggactttttcgccgccgttagtgcagcacgcgtttacggggtatttagaactgctggctatccagaagcggtggctcatactctcacgggcctgtgcaccaacgtggtgcctgcagacgaaagcgtgccaggccacttcaggttggcccgtcgtttagcaactccccatcttcctcagggtgcccccacctctcctgctctcgctaacctggccgcccacgcattggataggcggctgaccggcctggctagagagattggtgctacatactcacggtacgccgacgatttggtcttgtcagctgatcaccatctccgaacaccacatgcagctgtgacagagttggcgcgggatgaaggcttcaccgtgaatcgggggaagaccagaaccatggggcggggttcccgccaagttgtcacaggcatcgttgtgaatgcccatccgaatgtcccccgcgctgagtacgatcggctaaaggcgatcatccaccggggcgactacgatcgcgagcatgtgttaggtcgcattgcctggatagcggccatcaaccccgctcgtgctgctaaactacgttcctctatgtga

SEQ ID NO: 12979 - RNA, 1386 nt, synthetic construct
  source 1..1386: mol_type = other RNA
atgaatcgggatgcggctggccatagggcaaccgctgcagacgtaagggctctgataccggtcctgcgtccatcccttagatcagtcgccggctccctcgccgatgctttacttgacggtgagtgggaagccgacgctatggtttctcgcgtgacagctgccctcgatcggcctggaagatgggtcagacagctggtgcggatcacccgtctgtcatttcccgtggcgccccatgacagtcccgaaagtcttcggcgagtgatcctggcaggccctccacttccccaggttgctgctgccgatgcccttgcaggcaggccactccctaccctggctagacgccccttaccagccagggtagtcgccctgcaagccggattgccacgatgggacggcgtaggggacttggcggcatacctgggcttgactgtgggagaactggcatggtttgcggatacgaggggctatgaggctcgagtgcgagcggagacactgcggcactaccgctaccgcctgctccagaagaggattggggggtgccgcctgattgagagccctaaatggcagctgagagagattcagcggagaatcctgcacgaggttctggaccagctgccggtgcacgatgctgcccatgggttcaggcctggcaggtcggttattgggtatgtggaaccgcatgccggccgcagagtggtcatccatctcgacctccgggactttttcgccagagttggagccggtcgagtgtggagcgtgtttcggtgggctggctatcctgatgcggtggcacacgtcctcacaggactgtgtaccaatgtttctccaactgccgttaggtctgacgtccgacgcactggggccttgagactagcagccgcatgtgggacagtgcacttgcctgctggtgcacctaccagccccgccttagcgaacctatgcgcctacgctctcgatcgccgccttgctggattagctcgtcgggtgagcatgcggtacacgaggtatgctgacgatcttgctttttccggaggacggtccttactgtggggcaccgacgccctcatcgaccgtattgcagcaatagccgcagccgagggattcccagtgaactcccaaaaaactgctgtgttgacagcatcaagacgtcagcgcctcgccggcgtagtggtcaacgatcaccccaacctggatcggcgcgagttcgacgccctaagggcaaccttgcacaattgtgtacacagcgggcccagttcacaaaacagggggagccaccaggatttcagagcccatctgactggtagagtctcttgggcctgcctgctcaatcccgccaagggtgccagattggaacgactactggaacagatcgactgggcaaggtga

SEQ ID NO: 12980 - RNA, 1365 nt, synthetic construct
  source 1..1365: mol_type = other RNA
atgaccagagaatctgcagcggtaactgtggctagggggctcgctcatgcgttcttggccggagactgggatccaccagccatggcctccaggggtcgtgaagccgtcgaaacaagacgggtgtgggtaagacacctcgccgatgcagctcggcacgcctatcctgacgctcccagagatcgaccccgagagctggctaccttcctgtctgtgtgcccacctctgacaaaagcaatagccgctgcaagaaggcgtagtgaggagccgccaacgatacgcaactggctggttgcagagacagccatgggacccgcaccttggccagtcgctaatctccacacgctgcgtgacctgcaggatctaatcggcatgagcaccgcaactctgaactggttcgccgacacgagaggtctggaacgcacagtggctgatgagcggctccggcactacagataccactgggctcctaagaggaacggcggcgccagactgatcgaagcgcctaagcctgtgctgaaacacttgcagcgggtgctcctgcgagaaattctggagccagttccggtacaccccgctgctcacgggtttaggcgcgatcgctcagccctgagccacgcaaatggccatatccagcgcaatgtggttatccgcgtcgatctggaggacttctttgcctctgtccgagccggtagggtgtacggcatttttaggggctgtggatatcctgagcccgtcgcccacgtgttgactgcgctgacaaccaatgctgtccccagggcagttagcgcccagacaggagctccatctgtggtggagagtaccgccgctttccgtcggttagccgggcatttagctcacccccatcttccgcagggcgctcctacaagtcccgctttggcgaacctcgcagcgttcgggcttgaccgcagacttgcaggcttggcatcggccgctgggcttacctacacccgctatgccgacgaccttgcattttcctcaattgacccccgtagcgaaggacagaatcggcgcctcgtggaatggatcactgggattgccgaggatgagggatttcgggttaacgtggccaaaacttccgtcagacacgcaggccagcggcaacgactagccggagtggtggtcaacgaacgagcaaatgtagagcgcagacaatatgacctgcttaaggccaccctccataacgccgctaggcatggtcctgcaggccagaataggactggacatccagccttcagggaccatctacgggggcggatctcatgggttaatcaactcaacccagcgcggggtgagagattactggccacctttgcccagattgactgggattccgccgataggtga

SEQ ID NO: 12981 - RNA, 975 nt, synthetic construct
  source 1..975: mol_type = other RNA
atgcctgcatggaacgtcgccgctatcgacagcttgcccgagctcgccgagcgattagagctgagtctggaacagcttcagtggctagccgatgtacggggtctggaacggtccgttaacagtgagcgactgcgtaatgatagatataggctgctgcctagagcttctggggtgccgcgggtgctcgagataccaaaggggcgcctcaaagaagtgcagcgctgggtccttcgggagatccttaaccaaattcctactcaccctgccgcgcatggcttcgttaggggctccagcgtcagaacgcatgcagaggtccacagcggccaggccatggtgttgggcctcgacttaaaagatttctttgctagcgtcaggcgcgcccaggtgaaggcaattttcagggctgctggtttcgagacagaggttgcacggaccctcgctggactctgcacaaacaccacacccagacacgtgggagcatcgcgcttgcttgccactcctcatctgccccaaggcgccccatcttcacccgctctggccaatttagcggccttcgcactcgatagacgcctgtccggtctagcatacgcccacgatctgctgtattctcggtatgcagacgaccttacctttagtggacccatgccaggtagagggaggcgacgatttctggtggccctggccaccgaaatcgcgagagatgaagggtttgcgattaatgaaaggaagactgctatgcatcctgccggaggccgccagcaggtttgtggagtggtggtgaatgcacgtccaaacgtgcccaggagagactacgaccggctcaaagcaacactgcacaatctggctgccgccgggccagtagacaggtcagaagctgccgcattagccgggcgtatcgcgtgggtagcttcattgaacccggcccggggcgctaaattgcgcgagaagtacgctaagatagagtggtccgaatga

SEQ ID NO: 12982 - RNA, 1323 nt, synthetic construct
  source 1..1323: mol_type = other RNA
atgcgcatcattgtggccgccttcctggacggatcttgggagccaactgcaatggctgcacgggcgcatcacgatctggggctcctgaccgtgaggcgggaaatcgactttggcgggaccgagccttacgtgtggctacatagagccgctgatctggttgccgatacctttgtagccccaccccggagtgagttgcgggcaatgcgggttctggtagctgagcacgctgccccagctattttacctctactcgaccaccctattgcggggccccatacagggactgcccttgtctcctccgctatgtcagaaccccggtggccggttgtgcatctggatacggttggagacgtcgccgctgcactggggttactgccgacacagctgtcgtggtttgccgacgttgcgagcctggagcagtcagtcacggacgaaagactgcgacactacaggtatcggtgggtagccaaaagcggatcaggccagcgcttagtcgaggcccccaagcagacacttcgcagagtccagcgatgggtcctccgccgtgtactgcacaacatccccgtgcaccctgcaacccatggcttcgtgcctgggagatctgtgcacacttatgtgggcccccatgtgggccggagagtcgtagtgagcttggatctccgaaacttctttaccagcgtggccgctggacgcgtcttcggtatatttcgggtcgccggatacgcagactctgtggcgcatactctcaccggattgatgacaaacgccgtgcccgcagacattcttcggggtcatccagatgcccccagggcgttgcgtttcccacaccttcctcaaggagcgccaaccagtccggccctcgcaaacctggccgctttttctctcgacaggagactgagcggtctagccacagcgatggatttgaggtatactcgctatgccgatgacctggctttctccagtgctggcggcttgagtcgaagggcaaggcgcagacttgtggtgacagttgaggaaatcgccagggctgaaggttttgacgtgaatcgtgctaagactagagcagctaccgccgggcgacagcaaaggctggcaggtagggttgtgaacgccgtggataatgctcctcgccgcgactacgacagactcagagccgttctgcacgacgcaagcatcaatggcccagtggcagccaatagggaaggccaccctgccttcgaggcacaccttcggggacgtatccactgggtcgcttccgattcacccgctcgccaaagacgactctggcagctgttcgatcagatagattggtccgagggctga

SEQ ID NO: 12983 - RNA, 1311 nt, synthetic construct
  source 1..1311: mol_type = other RNA
atgcggccggaattagcacgcgcccttgcagccggctttcttgctggcgagtggacaagagctggtctgaccgcctctggcgcagtggtgctcggaagacggcctagatggcttgcgccactcgtgcggcagactttggacctgtacccaagacctccaggcgatcggcccagggaactggctacaaacctggcgaggctcccagctgcagagaaagctgctctggccggtccacaggttcatcccgtggctgaaactcacatgattgccaatcgctggcggcttcccgagttagaccggctcgcagatctggcttcctatctgagagtgacagacggggagctcgattggttcgccgatcctcggcacctcgctaggctaacggtgcagccgcctctgcagcactatcgtgtgagtcacagggttgccgcctccggcggaatacgcgtcttggaggccccaaagccccgcttgagggccatccagagacgcctgctggatgagcttgcttcccgcattccccctcatgacgcagccagagggttcagacccggagggtctgtaagggcgtacgctgcacctcacgctggaaggtcagttgttctccgcatggacctcgaagctttctttgcgagcgtcaccgtgtcacgcgtttacgggatctggagaacagcaggctaccctgaacccgtagcccacgccctagctggcctggtaaccagcgtgctgccactagcctcctggcgagccatacccactcctgtcgacgaaggcttgctggatgctcactggcgcctcggcagacgattagccaggcctcatttaccccagggagcacctacatcacccgcaatggcaaacctggctgcctaccacctggacgtcagactttctgctttggcccgtagctggggcgggaggtatactcggtatgccgatgacctggccttttcgggtgcgacgggatggggaaccggtaccagtcggctgctcgacgcggtagagcgtatcgtcgtggatgaggggttccgcttgaacccgcgtaagaccggcgtgatgccacgagccggtagacaatccctggggggactggtggttaatgaaaggccacgagtgagccgagcagacgtcgatcggctgaaagccattctgcataactgccgagtgcatggaccgtctagtcagaatcgggatgatcatcccgcctttgaggaacacctcagggggagagtcgcatgggtggcccaacatgaccggcttcgtggcgccaggctattggcgatgcacgcagagatcgactggagccgctga

SEQ ID NO: 12984 - RNA, 1311 nt, synthetic construct
  source 1..1311: mol_type = other RNA
atgaggcctgagctcgctcgcgctttagcagccgggtttgttgcaggcgaatggacgaggccaggccttgaagcctcaggtgccgtggtcttaggtagacgtccgcggtggttggcaccccttgttcggcaggtgctggaactctatcctcgcgctcccgtagataggccccgagagctggccaccaacatcgcctctagaccagccgccgcaaaagcactgagggcacgggctgtggtactgccaatagctgagactcggatgctggctaacaggtggaggttgcccgtcctggatgatctcggcgacttagccgcattcctcggtaccagccccgctgaattggattggttcgcggatccccggcgtctggcacgtttgacaaagcaggcccccctacagcactaccgcgtaagccacttggtcgccgccagtggaggaatccgcgtgcttgaagccccgaaaccacgtctcaaggccatacagagacgtctactgcacgaagtcgcgtcactggtgccgccacatgatgccgcacgagggttcagaccagggggttcagtccggtcttacgccgcccctcatgcagggaggtctgtcgttctacatctggacctggaggctttctttgcctccgtgacagtaagcagagtctatggaatttggagatcggccggttacccagagcctgtggctcacgctctggcaggcctggtgactgcagtgttaccgctggccgcttggagagcaatccctgcacctgctgacgatggcctcctggacgctcactggagacttggccgacgactcgcggctccacatctgcctcaaggagcccccacttcccccgctatggccaatcttgccgcttttggactcgacgtccgcctgacagcccttgcaaggtcatggggggggcggtacactcgctatgcagacgaccttgccttttctggagagaggggatggggcaccgggaccagtagactgatcgacgcggttgaacggattgtggtggacgaggggttcagactgaacccccggaagacaggcgtcatgccaagggctggtaggcaagctctcgccggcctagtggtgaacgagcgacctcgggtgtccaggcgcgatgtggatctgctgcgggcgatcctgcacaattgcctggtgcatggacctagttcccagaatcgcgacgatctccctgcttttgaggaacatcttcgcggccgcattgcgtgggttgcgcaacacgacaccttgagaggcgcccggctcttggccgttcacagagagattgactggagccgatga

SEQ ID NO: 12985 - RNA, 1050 nt, synthetic construct
  source 1..1050: mol_type = other RNA
atgcttaccaatcgctggagactccctgaactgcatgaccccgctgatctggcggaactggtcggcatcacaacaagcgagctggattggtttgcggatcctcgccgcttagcccggagtgctggcgatgtgccactgcagcactaccgagtcgggcatcgtaccgcagcaagcggtggcattcgggtactcgaggctcccaaaccccggcttcggcgaatccagcggcagatcctcgatgaggtggcctctctgatacctccacatgacgcggcaagaggatttcggcccggcggatcagttcgctcctatgcagctccgcatgctgggaggcctgttgtaatcaggctggaccttgaggccttcttcgcttccgttaccgtggctagggtttatgggatttggcgctctgctgggtacccagagcccgttgcccacctgttagccggactcgtcacctccgtgctacctaggagtgcctggaggggggtaccaagacccgcagacgaacgtctgctcgatgcccactggcgacttgggaggcgcttagcagccagccatctgccacagggtgcacccacatctccggctatggccaaccttgctgccttcggtctagatgtgagactgacagcacttgcccgttcctgggggggtagatacacgagatatgccgacgacctcgccttttctggcgcagcgggatggggatcaggcacttccagattgttggacgccgtggaaacgatcgtgcgcgacgagggcttcactttgaacgctcgcaagactggcgtcatgccacgaggaggtaggcaaaccctggggggactggtcgtgaatgaacgacctagagtgagtaggcacgacgtggacttgttgagggccattctgcataattgccaccggcatggaccttcgtcacagaaccggcacgacgtccccgcctttgaggaacacctgcggggcagaatagcttgggtggcccaacacgatccagtcaggggcgcacgtctcttggcggtgcacgagagcgtggattggagcagatga

SEQ ID NO: 12986 - RNA, 1311 nt, synthetic construct
  source 1..1311: mol_type = other RNA
atgagagctgacttagccagggcccttgcagcgggatttctcgctggggaatggacacgccccggccttgtggagtcaggttccgttgttcttgggcggcggcccaggtggttagcacctttggctaggcagacaattgatctgtaccctcgtcctccacatgataggccccgcgagctcgcagcgtcaattagtgctcgtccggctgccgccaaagcagcaggtgtacggcccctcgtccaacccgttagcccgacacggatgatgactaatcgctggaggctgccagtgcttgatggcctgggagacttggccgacctgttagggctgacttcctctgaactcgactggtttgccgatccaaggcatctggccagaaccgctgcagacggccgactacagcactatcttgtgagccatagagtggccgcctccggcggaatccgcgttttagaggcgccgaagcgccgccttaagggcatccagcgggtgctactggatgaagtcgcttccctaattcctccacatgacgccgctagaggcttccgtcccggaggtagtgtacggtcctatgccgcacctcatgccggaaggcccgtggtagtgagactggacctggaggctttcttcgcctcagtgactgtgagccggatctatggcctgtggagatctgcagggtaccctgagccggtggctcactgtctggcagggctgaccacgaccgtgctgccacacgcagcttggcgagcagttcccaggccagcagacgatgatctgttagacgcccactggcggttggggaggcgtttagctgctcctcacttgccacagggtgctcccacttcgccagctatggcgaacctggcagccttcggactggacgttcggttaaccgccctcgctgaaagttggggcggtcgctacacacgatacgcggacgatctggccttttctggagccaggtcttggggcaccgggacaagcaggttgctcgaggtgatcgaagagattgtccgagatgaggggtttcggctcaacacacgaaaaactggtgtcatgccccgggccggaagacaagccttaggaggcctggtggtgaatgaacaacctagagtcgcccgaagggaggtcgacttactccgcgcgatcctccacaactgccgcagacacgggcctagcacccagaatcgcgacggagtccctgcctatgaacagcacctgagaggccgtatagcgtgggtggcccagcacgatccagtaagaggcgcccggctgctgaccgaacatgaggcaatagattggacgagatga

SEQ ID NO: 12987 - RNA, 1311 nt, synthetic construct
  source 1..1311: mol_type = other RNA
atgcgcagtgatctagcacgcgcactcgccgctgcttttcttgccggggagtggacccaaccaggactggtcgcctccggcactactgtgcttggtagacgggccagatggctccctcccctggtaagacagaccctggctctgtatccacgggctcccgttgatcgtccccgggaattagcagctaatctggcttctcgccctgctgcagccaaagctttgagggccgttcccttggtacgccctgtggtcgcgacccagatgcttaccaaccgatggaggctcccggtgttagacgatttggccgacgtggccagcttcctgcatctgtctgcctccgacctagactggttcgccgacccacgtcaccttgcaaggagtgcgtcagatgtgcccctacagcattaccgggtcagtcatagggtggcttcttcaggggcgattcgcgtccttgaagccccaaagccacgcctgaaagccgtgcagcgcagactgctgcacgagctcgcagccctgattcccccacacgatgcggcacggggctttcgtccaggaggttctgtgagatcgtacgccgcacctcacgctgatcgatccgtggtgttgagactggatctggaggccttcttcgcatccgtgactgtcagcagggtgtatggcatttggcgaacggcaggataccccgagcctgtcgctcactgtctggctgggctggtgacaagcgtgctacccctttctgcatggagagctgttccgacgccggcggatgacggtatgcttgacgctcactggcgcttaggcagaaggctcgcagctcctcatctcccgcaaggtgccccaacttcacctgcgatggccaatctcgccgcctttaggctggacgtgaggctcactgcactcgccagatcatgggggggacgatacacacgatatgctgatgacctcgccttcagtggggaacggggatggggaaccggaacaagccggttgatagacgccataggctccatcgtcgccgacgagggctttaggctgaacgcacggaagaccggcgttatgcctagagccgggcgccaaacattagggggcctggtcgtgaacgaaagaccaaaggttgcgcgtcatcaggtagacctgttgcgggctatcctgcacaattgccataggcacggccccagcacacagaaccacgacgatgtccctgcctttgaggaacacctgaggggccggatcgcttgggtggcacagcatgatcccgtacgcggacgacggttgcaggccgttcatgataccatcgactggagcagatga

SEQ ID NO: 12988 - RNA, 1311 nt, synthetic construct
  source 1..1311: mol_type = other RNA
atgagggtggacttggctcgcgcgttggcagcaggctttctggacggagagtggacacagcaaggcctgctagccagcgggaccgctgtcttaggtagacgcccccaatggctggctcctctagcccgacagacccttgccctgtatcctcgtgcacctgtcgaccgccctagggagcttgcgaccaacataagtagtaggcccgcagcagcaagagcaagatcggcagccccccaggtgcaacctgtggtagctaccaggatgctggggaacaggtggcggctgccagtacttgacggactgggcgacgtggccgattttttgggtgtcagcgcatcagagttagactggttcgccgatcctcggcacttagcacgtgggactgctggggtgccgttgcagcattaccgcgtgagccatagagtggccgctagcggcgcgattcgagtgctcgaggctccaaaggccaggctgaaagtaatccagcgacggcttctgcgggagattgcgagtatgatcccaccacacgacgctgcatgtgggttcagacccggcggttctgtacgagcttacgccgcaccccacgccgataggtccgttgttctgcgcctcgacctggaagccttttttgcctccgtcaccgtctcccgggtgtatggcatttggagaacagcgggatacccagaacccgtggcccattgtctggccggattggttacctccgtgcttccgcggtcaacatggcgcgctgtcccacaacccagggacgatcggctcctcgacgcccattggcgcttgggaaggcgacttgccgcaccacacctccctcaaggagcaccgacgtctcccgctatggccaatctggccgctttccggctggatgtccgtctcactgctctcgccaggagctggggaggcaggtatacacgctacgccgatgacctcgcattctctggcgctgctgggtggggaagtggaacgtcccggctgatcgatgccgtcgagacagtggtgcgggatgaaggttttcggctgaatcccagaaagactggcgtgatgcctagagccggccgtcagtcacttggcggtctagtggttaacgactctccaagagttgcccgccaccaggtggaccttctgagagccatcctgcacaattgccaccggttcgggcctagcactcagaacagagacgatgttcccgccttcgaagatcacctgcgaggccgcatagcctgggttgctcagcatgacccagtgagaggggcgaggctccaggctgtccatgatgcgatcgattggtcacgttga

SEQ ID NO: 12989 - RNA, 1311 nt, synthetic construct
  source 1..1311: mol_type = other RNA
atgcgcgatgatctcgcccgtgccctcgctagcggcttcttagcaggagaatggacccaggacgcactggttgcctcaggcaccgtcgtgctagggagacggcacccttggcttcctcctctggtccggcgcgtgctgacagcttatccgcgaccccctgccgatcgaccaagagagttggccgcagtgatagctgcactgccagcagcagcaagagccaggaatgccgccccagtggtgcacccagttgctgagacgcggatgctgaccaatcgttggcgtctgcccgtattagatgggctggacgacgtggccgcttttctacgcctggagcctagcgaactcgactggttcgccgacccacggaggttggcaagatccgcctccgacgtgcccctgcagcactatagggttagtcatcgggtaactccttctggcgccattcgcgtcctggaggctcccaagccaaggctgaaggctctgcagcgccgggtgctaacagaagtcgccagccttattccccctcacgatgccgctacaggatttcggccaggtggctcaatcagacgttacaccgccccccacgcaggcaggtctattgtgctccgcttggatttggaggctttctttgcaaccgtttctgtgtcccgagtctacgggatctggcggactgccggctaccctgaacccgtagcgcactgtctggcgggactcgtgacttgcgtcctacccaggtctgcttggagggccgtaccaagaccggctgatgagagattgctcgacgctcattggcgacttggtcgcaggcttgctgcaccccatttaccccaaggcgcccccacaagccctgcaatggcgaaccttgccgctttccgactggatgtgagactgtcagcgctggcaagaagctggggtggcgggtacacccggtatgctgacgacctggcgttttccggtgacgccggttggggcactgggactagtcggctgctggatgcagttgaagccatcgtcagggacgagggatttcggttgaatcagagaaaaacgggagtcatgccgcgcgctggaagacaggtactcggaggccttgtggtgaacgagcaccctagggtggcacgccatcaggtggatctcttacgggccatactccataactgcaggcgcttcgggccaagttcccagaaccgtgatgatgtgccggcgttcgaagaccacctgagggggagaatcgcctgggttgcgcaacacgacccagttcgaggagcccgcctccaagccgtgcatgacgctgtcgactggtcgaggtga

SEQ ID NO: 12990 - RNA, 1311 nt, synthetic construct
  source 1..1311: mol_type = other RNA
atgagtccagatctggccagagcccttgccgctgcattcctagggggcgaatggaccgaaccagggttggtggcctcaggggcaggtcttctgggtagacgtccggcatggttgcgcccactggctaggcagaccttagccctgtaccctcgacctccccttgataggccccgcgaactggcgacgaacgtggctagtcgccctgctgcagctagagccggagctgctgctcccttagcccagcctgtcgctcagacacgcatggtggcgaaccggtggagactcccagaactggacactctcgccgaccttgccggattcctggggctcaccgcgactgagctcgactggttctctgatccccggcggttagcacgagacgcttccgcagtccccctgcagcactaccggattagccacaggccagccccatccggagccataagagtcctggaggcccccaagcccaggcttaaagcgttgcaacggcggttactgcgagaactcgctgggcgcattcccccccatgatgctgcacgtggctttcgacccggcggttccgttcgcagttacgcagcccctcatgccggcagatccgtggtgctacggctggacctcgaagctttcttcgcctcggtcacggtgtctagagtctatggcatctggaggtcagccggctacccggaaccggtagcacacgcactggctgggttggtcacaacagtgttgcctagagctgcttggcgctctgtgccacgtccagccgatgacagcctgctcgacgcgcattggaggctgggcagacgactggcagcacctcacttgccgcaaggagcccctaccagccctgccatggccaatcttgccgcattcgggctggacgtgcggcttaccgctctagccaggtcatggggaggccggtatacacggtatgcggatgacctcgcatttagcggcgagaggggctggggaacagggacttcccgcttgctcgacgccgtggaggtcgttgtgcgggatgagggctttcgcctgaaccccagaaagactggagtgatgccaagagctggcagacagcgtctagcgggtctggttgttaatgatgccccaagggtagctcgggaggaggtggatctgctgagggcgatcctgcacaactgcgccaggtttggaccttctacccagaatcgcgcaggggttgtagcctttgaggaccatctgcgcggtaggatcgtgtgggtggcccagcacgatcccgttcgaggagccaggctcctcgaggcacatcgtgccgtagactggagcagatga

SEQ ID NO: 12991 - RNA, 1311 nt, synthetic construct
  source 1..1311: mol_type = other RNA
atgaggcccgaccttgcgcgtgccttgagcagtgccttcctcgctggcgagtggacacgagccggcatggtggaatctggcgctgttgttgtcggccgaagggcccgttggcttggtccacttgccaggcaggtcctggaactatatcctagagcccctttggatcgcccccgggagttagccactaatctggctcggtgtcccgcagcaacaagggccctggcatcaggcccaatggtccacccagtggccgtgactcggatgatgaccaaccgctggaggttgcctgtgctccacgatctagatgatctggctaccctgctggacttggaccaagctgccctggcctggtttgccgatccacgccatctggcacgaggggcaacagaagcacccctgcagcattaccgtgtgtcacaccgaccagccccatccggagccattcgagtcctggaagctccgaagccgcggctgaagagaatccagcgccgtttgcttgacgagctggcaggtagaatacctccccacgaggctgcccggggatttaggcctggagggtccgtagccagctatgcggctcctcacgccggacgaccagtagtgctccgcctggatctcgaggcattctttgcctccgtgactgtgagccgcgtctacggcacctggagatctgccggctacccggaacccgtagctcatgccctggcagggttggtgactactgtgttacccgcttccgcctggcgggcagttccaacaccctctgcggaccatctcctggatgctcactggcgcctcggacggagactcgctcttccacatcttcctcagggggcacctacatctcccgctgttgccaacctcgccgctttcggcctggacgtcagactgaccgcattagctgctagctgggggggcaggtacacgaggtatgcggacgacctcgccttttccggggataggggttggggacggggaaccagtcggctgatcgatgctattgagacggtagtgcgggatgagggcttccgcctaaatgcgagaaaaaccggggtgatgcccagagcaggcaggcagagattggcaggacttgtggtgaatgaccgaccgcgcgtcgcaaggagcgaggttgatctgctcagggctattctgcataactgcaggcggcacggtcctagttcacagaacagagatgacttacaggcatgggaagcgcacctacgcgggagaatcgcctgggtggcccaacatgaccctgctagaggtgcgcggctgcaagaggttcacgacgccatcgactggtcgcgttga

SEQ ID NO: 12992 - RNA, 1311 nt, synthetic construct
  source 1..1311: mol_type = other RNA
atgcgcgccgatcttgcccgggcattagcctccggcttcttggccgatgagtggacacagcccgccttagtggcttctggccgtactgttttggggaggcgtcccgcctggttaacccccttggtcagacaggtgctcgaactgtaccccagagctccagctgacaggccaagagagctggccgctaatatcgcggcttgtccagcagcaactcgcgctgggcaggcaggtcctgtagtgcatccggtggcacggacacagatggtagcgaacagatggcgcctgccggtgctagaccgcttggatgatgtggccacgtttctggacgtcagccacaccgacctggactggtttgccgatccgcgacgccttgcaaggtctgcttcagacgctcctctgcagcattaccgggtttcacaccgtcccgctccttctggcgccgtacgagtgctggaagctcctaaaccccggctgaaggtgatccaacggcggctgctcgatgaggtggcaggccttatcccacctcatgaagccgctagggggttccgcagcggaggtagtgtgagatcgtatgcagccccacacgccggtcgacctcttgtgctccggctggacctggaggccttttttgctagcgtcacagtgagcagagtgtacggaatatggcgcacagcaggctatcccgagcctgtcgcacattgtctcgccggcctggtcacatgcgtgctccctaggagtgcatggagggcagttcctgccccaactgacgacgggctacttgatgcccactggcggctgggaagaagactcgctgcaccacacttaccccaaggagctcccacctccccagccatggcaaatctggccgctttccggctcgacgtccgtttgactgcccttgcgcaaagctggggggggaggtataccaggtacgccgacgacctggccttcagtggtgatgccgggtggggaagaggcacgtccagactcattgatgctataggactgattgtgcgagacgaagggttcggcctgaacgccagaaagaccggagtaatgccaagggccggtcgccagaggttagctggcctagttgtcaacgatgagccccgcgtcgcgagaggagaggttgatctcctgcgcgcgatcttgcacaattgccggacccatggaccttcctcacagaaccgagatgacgtgcccgcatgggaagagcatctgcggggcaggattgcgtgggtggctcagcacgacccagtccgaggtgctcgtctacgggccgttcacgacgcggttgattggtctaggtga

SEQ ID NO: 12993 - RNA, 1311 nt, synthetic construct
  source 1..1311: mol_type = other RNA
atgcgagccgacctggccagagctttggctgctgggtttctcgctggcgaatggactaggaatgggctcgtggcctctggggcagttgttctcgggcgacggactgcctggctgaggacattggccacccaggccttggagctttacccacggccccctcatgatagaccgcgagaactcgccgtcatcctgaggagccttcctgccgccgagaaggccgttgctgtgggtccagtgacccaacccgtcgctcctacccgcatggtcaccaacagatgggctctgccccagctcgacgaccttgccagcgtagctgcattcttggatgtgacggcggccgaactggactggtttgcagacccaagaaggtgggccagagctgccgaagaaccccggttgcagcattatcgggtaagccaccgcacagcaccatccggcgcaatcagagtgctggaggcacccaaaccacgcctacgggcaattcagaggttactgctggatcaggtcgtctcaagaatccctccacacgatgcagcacgtggatttaggccaggcggcagtgtgcggtcatatgctgtgccccacgccggacggcctatagtgttacggctcgacctggaagcgttctttgcctcggtttccgtctcccgcgtctatggcatctggaggaccgccggctatcctgagccagtggcacactgcttagctggcctaacaacctgtgtcctgccgcgtagtgcgtggagagctgtaccaaggccgggtgaggatgaactcctggacgcccactggcgattgggaaggcgcttggcggctcctcatcttccccaaggagcgcctacttctcctgcactggctaacctcactgcctacgggttagatgtgcggctcacagctctggcaagaagctggggcggacgttacaccaggtacgccgatgacctggccttctctggagaggcaggttgggggcatgggacatctcgcctgctggatgcaattgaggagattgtgcgtgacgagggcttccgcctgaatccaaggaagacgggcgtgatgcccagaggtggtaggcaacgccttgccggactggtggtaaatgagcggccccgagttccgcgcgaagaggttgacctcctgagagcgatactgcacaactgcagacggcacgggccctccactcagaaccgagatcaggtgcccgctttcgaggagcacctgcgtggacgcgtgtcatgggtggctcagcatgatcctgtcaggggcgcccggcttctagcggaacttgacgccatcgactggagtcgctga

SEQ ID NO: 12994 - RNA, 1311 nt, synthetic construct
  source 1..1311: mol_type = other RNA
atgagagacgaccttgctcgtgcactagcggccggctttctggccggagattggactgctaccgggctacgagcatcaggtgctggtgttctcggcagacgccctcgctggttagcccctctcgtgcagcagacactcgacttgtatccccgccctccacacgatcgtcctagggaactcgccaccaatttggcagggcttcccgcggcggctaaagccttgagaaccaggcccgtggcacaacccgtggcacctacacggatgttagccaaccggtggcggctcccagttctggatgacctcggcgacctggccgatctcttgggagtcaccgctacggagcttgattggttcgcagatccgcgacatcttgctcggagcgctgcagacgtaccgctgcagcactaccgggtgagccatcgcattgcacccagcggagccgtaagggtgcttgaagcgccgaagccacgcctcaaggcggttcagagactcttgctggatgaggtcttgtccagggtgccaccacacgatgctgccaggggctttaggcccggagggtcagttgcttcttatgccgctccccatgcaggccggccagtagtagtgaggctggatctggaggccttctttgcgtctgttaccgtctcccgagtgtacgggatttggcggacagcaggctatccagagccggtcgcccataggttggccggtctggtgacagccgtgctgccaagaagcgcctggagggctgtccctagacctgctggtgacgggctgctggatgcccactggcgtttaggtcggcgactggcggcacctcatctgcctcaaggcgctcccacaagtcccgctgtcgcaaatcttgcagccttccggctggatgtgcgcctcagtgccttagcccgctcttgggggggaaggtacacccgttacgccgacgatctggcattctcgggtgctaccggttggggcactggcacttctagactgctggacgccatcgaggagatagtccgcgacgagggctttcggctcaacgccagaaaaacgggagtgatgcccagagccgggcggcaaactctaggagggctggtggtcaacgaccggcctagagtcgcccgagcagaagttgaccgccttcgtgccatccttcacaactgcaggcgaagtggagcttcctcccagaatagagacggcgttcccgcttgggaacagcatctgcgcggtcgaatcgcctgggtggcacagcacgacccagtgaggggagccagactgctggctgaacacgacgctgtggattggtcacgctga

SEQ ID NO: 12995 - RNA, 1305 nt, synthetic construct
  source 1..1305: mol_type = other RNA
atgcgagatgacctcgcccacgcactcgctgcaggattactcgcaggcagctggactcaacgcggcctcgtggcttccggtgctgaggttcttggaagccgccgccggtggttagacaggctcgctaggcacactctggaactgtaccccaggccccccttggaccgtccaagagagctggccagaatcgtcgcggcttttgttgacgcagatgcagccgcacggcctgctaccagacctgtagtgggtacaaggatgctgacaaaccggtggggcctgccaactctgcacgacctgaatgatctcgccgggtggctcggactgacctcttccgaactagaatggtacgctgatccccgtaggctagctcgcaccacaagccaggggagactgcagcactatcgcgtgtctcacagggtcgcctccagcggagcgattcgggtgttagaggcccctaagctggaactgaagggcattcagcgacgactgctggatgaggttctcagtagcgtgccaccccatgaggcagctagggggttcaggccaggtggcagtgtgcgcacttacgccttgcctcacgcgggacgtcccgttgtgcttcggctcgatcttgagtcattctttgcctcagtgaccgtagcccgagtgtatgggatatggaggtccgccggatacccagagccagtcgcacatagactgtctgggctggtgacctctgtcctgcctctctcattgtggcggagcgtaccaaggcccgccgatgatgccctgcttgacgcacattggagactgggacgaaggttggcggctccacatttgcctcagggtgccccgacaagccccgcattagccaatctagccgcctttcgactagacgtcaggctttccgctcttgctgcctcatggggagggcggtatacccgctatgctgacgacctggcctttagtgggggccggagttgggggacaggaacttcgcgcctgcttgatgccatcgaaggcgtcgttcgggacgagggcttccggttaaatcagagaaaaacaggagtgatgccacggggcggcagacaggtattaggcggcctggttgtgaacgaacgtccgcgtgtgtcccgggcagaagtggatagactgcgcgccatcctccataactgcctgacgcatggtccttcaacccaaaacagagagaggcaccctgccttcgcccagcacttgcgaggtcgcattacgtgggtggctcagcatgaccctgtcagaggggcacgcttgctcgcgcaacacgatgcggtcgactggtctagatga

SEQ ID NO: 12996 - RNA, 1311 nt, synthetic construct
  source 1..1311: mol_type = other RNA
atgagagcggatttagccagagccctcgcggccgcatttttggccggagaatggacacagagcgccatggtacagggcggggcagttgtcctaggcagccgaagaagatggcttacgcccttggcccgccaagtcctggacctgtatccgcggcctcctcttgacagaccccgagaactggcaacactgattagtactcgccctgcagtggctcggaccggtaatgccaggcccgttgtgcagccagttgtagcgacacgcatggtgagaaacccatggcgtcttcccgcactcgacgatcttggcgatctggctcaccacctgggtgtcgaaggctccgagctcgcctggtttgctgacccccgtcgatgggcgagaggaacatccgaagggagactccagcattaccgtgtgagccatagggttgcaccttccggagcaatccgcgtgttggaggccccaaagcccagggtccgcaggatacagagaagcctgctggacgacctagtgtcgcgggttcccctccatgatgctgcgaggggctttaggaccggcggcagtgtgcggagttatgctgctccacacgcgggtcgaccagtcgtgctgcgacttgatctggaggctttcttcgcatcagtgactgtcgccagggtgtatggcatttggcgttctgctggctacccggagcctgtcgctcactgcttagccggtctgaccacctctgttctcccgcgcagcgtatggcaagctgtgcctggacccgccgacgatggactgagagaagcacactggagactagggcgcaggttagccgcccctcatttacctcagggggcacccacttctccagccctcgctaatctcgcagcctaccggctcgacgtgagacttgccgctttagctcggtcttgggggggacgttatacccggtacgccgatgacctggctttctcaggggagcgggattggggagatggtacggcccgcctgatcgctgccattgatgtcgtagcaagggatgagggcttccgcctgaatccacggaaaacagccgtgatgcggaggggagatcgccaacggcttggagggttggtcgtgaaccgacggccccatgtagggcgaactgaggtggacctgttgcgcgctatcctgcacaactgtcggcgccacggcccatcatcccagaacagagagggccacccagcgtttgaagagcacctaagggggagggtggcatgggtggcccatcatgaccctgccagaggtgccaggttgagggctgccctggacgcagttgactggacccgttga

SEQ ID NO: 12997 - RNA, 1050 nt, synthetic construct
  source 1..1050: mol_type = other RNA
atgctgactaaccgctggaggctgcccgttctgcacgacttagccgatctggccgctttgctggagctagacgccggggagctcgattggtttgcggatcccaagcattgggccaggactgctggcgaagcacccttgcagcactatcgagtctctcacagggtggccgccagtggtggcatacgcgttctggaagcaccaaaaccgcgtctgcgccgcttgcaaaggcggttgttggacgaggccctcggtctggtgccacctcacgatgctgcaagggggtttcgagctgggggcagcgttggaagccatgccgctccacacgctggacgacctgttgtgctgcgcctggacctcgagtctttttttgcctccgtgacagtaggccgggtgcatgggatctggagaaccgcgggctaccctgaacctgttgcccatgccctggccggcttaactaccgccgtacttccccttgccgcttggcgtggagtaccccgacctgcagacccaggcctcctcgatgcccattggcggttagggagacgactagctgccccgcacttacctcagggcgcaccaaccagtccagccacagcaaacctggctgcgttcgggctggatgtccgccttacagcgcttgctgcggcatggggtggacgttacacacggtatgccgacgacctggccttctccggagatgctggttggggcagaggaacgagcagactgctcgacgcagtggaagagattgtgcgcgacgagggcttcagactcaacccccgcaagacggcagtcatgccaagagctggacggcagtcactggccgggctagtggtcaatgacaggcccagggtggctaggcatgaggtggacctgctcagagctattctccacaattgccggcggcacggaccctcaacccagaatagagatcaggtccctgccttcgcagagcacctacggggtcggatcgcatgggtggcgcaacatgatccggcacgtggggccaggcttctggcagaacacggtgctatcgattggaccagatga

SEQ ID NO: 12998 - RNA, 1311 nt, synthetic construct
  source 1..1311: mol_type = other RNA
atgagagaggatctggctagagccctggcagcgggattcctcgcaggtgcatgggaccgggatgggttactggcatcaggacggggggttctgggtagaaggcctgcctggcttcgccctcttgttcgcgatgtgctcctgcactacccacgccccccacacgatcgtccaagagaactggccaccgtgatcggcgcctttctggctgccgatcggagctacgctgacgcacccgctcatcgaccgttggcccctaccagaatgctcgctaaccggtggggtgtacccgcccttcacgaccttgccgacctcgcagacttgcttgatctcgacaccggcgagctggattggttcgccgatcctaaaagatgggcccggcggaccagtgaaccaaggctacagcactacagggtgtctcaccgtgtggtggcgacaggagccgtgcgagtccttgaagcccccaaacaccggctcaaggtgttgcagcgcagactcctggacgaagtcctcgctgtcgtaccgccgcatgacgctgctcgcggatttcgcccaggtggctcagttaggaggcacgccgccccacatgcggatcgatctgtggtcgtcaggttggacctggagagcttctttgcgagtgtgactgtgggcagggtgttcgggacttggaggacagtcgggtaccccgaacccgttgctcacgcattggccggccttactactacggttctgcctcatgctgcatggagggccgtgcccagacctgctcctgaacacttgctggacgcacactggcgattaggtcgccggttagccgcgccacatttgccccaaggagcaccaacatcccccgccctcgccaatctggccgcatatagactggacgtacgcctgtccgctctagctcgtgcttggggaggccgatatacgcgctatgcggacgatctggccttttccggggatagaggctggggccgcggaacaagcagactgctggacgccattgaggaggtggtcgtggacgagggattccgggttcaccctaggaagaccgcagttatgcctagggcaggtaggcaggtcttaggggggctcgtagtgaacgaccgtcccagagtgccaagggcagaggtagatcgtttacgggccatactgcacaattgccgcctgcatggcccggcctctcaagacagggacgggcatcccgcgtttgccgctcatctgcgaggccgaatcgcatgggtcgctcagcatgatcctgctcggggcgagagactcctagccgcatgggagtcggtggattggacccggtga

SEQ ID NO: 12999 - RNA, 1311 nt, synthetic construct
  source 1..1311: mol_type = other RNA
atgaggccagaagttgcagcggcgttaggcgctggcttcctcggaggagagtggaccgaggacgggctcctagcaagcggagctagggtgattgggcgcagacctcagtggcttagacagctggcagcccaggtcgttgctgcctacccagacgcaccccgagataggcctcgggagcttgccgctgcagtagcctcactaccagccgctgcaaaagcccggcgtacaagggcccttcgctggactccaacacccacagccatgggtcgtaaccgctgggcactccccgttttggacgggctagatgacctggctgccctgctggacgtgacccaagcggagctggattggttcgccgatcctaaacgatgggctcgagaggctgccgtagcccctttgcagcactacagggtggcacatcgggtggcgagttccggagccataagagtcctcgaagcccccaagcctcggctgaagcggatccagaggctgctgttggacgaggtcctcgatcggatcccccctcacgacgctgctagaggctttcgccccggtggctctgtagccagatatgcagccccacacgcaggtagggctaccgtgttgcacctggacctggaggcatttttcgcctctgtgacggtgggccgtgtttatggggtctggcggactgcaggctacccggaacctgtcgcccatctgctcgctgggctaactaccaccgtgctcccacgtgcggcctggagaacactgcctcgcccagcagaccccggattacacgacgcccactggcggcttggtagaaggctggctgcaccccatcttccacagggagccccaacttcccccgccttagccaacctggccgcctatcgtctggatctgcgcctgacagcgttggccgaagcttggggcggtcgctatactagatacgctgacgacctcgctcttagtagcgatcgaggctggggagctgggacctcacggttggtcaccgccgtgaccgaagtagtccgggatgagggctttagattgaatccgctgaagacagctgttatgcgacgaggagagcgccagcaccttgctggcctggtggtgaatgaacacccccgcgttgctagagccgaggtggatcggctcagggcaattctccacaattgcagggtgcatgggccgagcacgcaaaaccgagccgcagtgccggccttcgcagaacatctgaggggccgcgtggcttgggtggctcaacatgatcctgcgcggggggagaggctgttagaagcgtggagagccgtcgattgggagagatga

SEQ ID NO: 13000 - RNA, 1311 nt, synthetic construct
  source 1..1311: mol_type = other RNA
atgcgtccagatctggctagggccctagccgcaggactactcgcaggagaatggactcctgccggcttagtcgagtcgggctcaacagttcttgggagaaggagacgatggcttacccccctggcccgtcaagcgttagagctgtatcctagacccccccatgatcggcctcgagaactggccgcagtgctggctggtcttcctgcagcaggtcgtgccgctgccgatcgacctgtttcacgacctttgagtgggacccggatgttggccaatccctggaggctccccgcgttagatggcctcgacgacctggctcgccatctcgacttgactccaggggagctcgactggttcgctgacccgagacggctggcacgcagaacctctgaaccccgactgcagcactaccgggtcagccatagggtcgctccatccggggccattcgggtgttagaggcccccaagccaagaacgaaggctctgcagcgcctgctgctcgatgacgtagtgagcagaattgccccgcatgacgccgccagaggatttcgcagggggggaagcgttggcagttacgccgctcctcatgctggcaggccagtggtgttgcgcctcgatttggaatccttctttgccagcgtgactgtggcacgggtttacggcatctggcgctctgctggttaccctgagcccgtcgcgcatgcactagcaggccttaccactactgtgctcccacacgcagcttggagagccattcccaggcccgcatccccaaggctgcttgatgcccactggaggttgggtaggcgtctcgctgctccccacttacctcaaggggccccaaccagtccggctcttgcgaacctggcagcctatcggttggatgtgcgcttaacggctctagcacggacctggggaggacggtatacacggtatgcagacgacctcgcgttgtctggagatcggggctggggcacaggcacatcaaggctgctggacgcggtggagacagtagttagagacgaaggctttcgcctgaatccaagaaaaacagctgtgatgcctcgaggggggcgacagaccttaggagggctggtcgtcaaccagcagcctcgggtgagcagagcggaggtggatactctccgcgccgtcgtacacaactgcagacgccacggcccgtctacgcagaatagagaagagaggcccgctttcgccgagcacctaaggggtcgcatcgcctgggtagcccaacatgacccagcccgtggagcacggcttcttgccgactacgataccatagattggtcccgctga

SEQ ID NO: 13001 - RNA, 1311 nt, synthetic construct
  source 1..1311: mol_type = other RNA
atgaggaaggacctggctacagctttagccggcgcttttctatccggggaatggaccagcagcgggctgtttgacagtgccgtgcccgttgtgcagggcccaacaccatggctgcctgccctgattcggcagatcctggccgtttatccagcagcgccgcttgatcgaagccgggaacttgcagtggtaattggctctaggcctgccgctgggggtgccaaaagtgcaagaccaatagcatggcctgccgcgaccacacagatgacctccaacccctggcacttgccagcattgcatggactgggggacttagccgaaatgctcgatctgggcgccacagaactcgcctggtttactgacccccgccattgggcccgtagcactacggaccggcgtctgagacactacagagtgaccaccaaagtcgccgcttcaggggctgtcagagtcctggaggctccaaagtatagactcaagagtcaccagagacgcttcctgactgagatccttgatcgcatccccgctcatgatgctgcccacggtttcagagcgggccgctcagtcgcatcctatgcagcccctcacggaggccagccagtagtcgtgcgtatggacctcgaaggattcttcgcctcgatcacggcaggacgggtctacggcattttgcggtccgctggctaccctgagcctgttgcccacgctctgactggtcttgccacaaccgtgctaccgcgggcagagtggaatgccatatctcctcccgcgaaccccgacttgagagaggcccattggaggctcggtcggaggcttgctggtcctcatctgccgcagggagcacccacaagtcctgctctcgctaatttggcggcgcaccgtttggacgtgcgccttagcgcactggcatcatcctggggtggccgctataccaggtacgcagatgatctggctctctctgggggaattggctggcggggggacgtttcaaggttggtggccctagtgggggacattgtaagggatgagggctttcggctgaacgaccgcaaaactgctgtgctgccagctcactcccgccaggttctcggaggcttagtggtgaatgagcgaccccacgtgtctcgggccgaagtagatctgcttcgagccgtgctgcataactgccgacgcgatggcccatctacccaaaatagggccggagtccccgacttcgagggacatctcaggggaagaatcgcctgggttgcacaacacgaccccgcaaggggggccagattacgagcgctgttcgatgccatcgattggagcttttga

SEQ ID NO: 13002 - RNA, 1311 nt, synthetic construct
  source 1..1311: mol_type = other RNA
atgagggctgatttggcgagggctctagccggggggtttctagctgcggaatggactcgaccaggcttggttgatggcggtgccgtagttcttgggaggcgggtccgatggatgcctgctctcacccgacaagtcctggccctctaccccagaccgccattagacagaccacgcgagctcgccgccatcatctccacaagaccagccgctgcccaagccggaagagcaaggccaatggcacatcctcttgcccccgtccgcatggtcagcaacccatggagacttgtggttctacatgatctggctgaggtcggctccctccttggactgagccagcccgagttagcatggttctctgaccctcgccattggtcacggacagctcagcaggtgcctctgcagcactaccggatatcctctcgcaccgccccttcaggagctataagggtgctcgaagcccccaaacgccacttgaaggctatccagcggcagctgctgcaggagattgttggcagaattcccccccacgaagctactcacggcttccgcgtggggagatcggtgggaagttacgcagcccctcacgctgggcgtgctgttgtcatcaggagtgacctggagggcttcttcgcatcagttaccgtggggagggtgtatggtgtgcttagaaccgcagggtaccctgagccggtggctcactgtctggctggcctcatgactaccgtgctcccactcagcgcatggaggaagatcccccgaccgacagaccccgtattgctggatgcccattggcgtctgggtcgcagattggcagcgccacatctcccacaaggtgcgcccacatctcctgcactggcaaatctggccgcttatcgtatggacattcggttagacgcactggccctttcttggggaggtcagtacacacggtatgcagacgacatcgcgatgagtggggacaggggatggggacctgcagcagaccggatactgggcatcgtagcggaaattgcccgcacagagggctttcgcttaaatgcccgcaaaactggagtcctgccgcaggctggacgtcaagtgctgggtggcctggtagtgaacgacagaccccatgtgtcccgggccgaggtggatgtcttgagggccacgctgcacaactgcattcggcacggccctagcacgcagaacagacagaataggaccgcctttgaacagtatcttcaaggccgaatcgcctgggtggcccagcacgatagggatcgaggggccagactgcggacccagtttgatgccattgattggactcggtga

SEQ ID NO: 13003 - RNA, 1317 nt, synthetic construct
  source 1..1317: mol_type = other RNA
atgcggtccgagttggccagcgcctttgcaggtgcttttctcagcggtgagtggaccgagtccggactgtggggtagcggagccagggtactgggcagagatgccgtgtggcttcctgccctggtgcgagaggtccttgggctgtatgcttgcgcaccacatgaccgcccccgagaactcgctgccgtgattgcaatgcaggaagccgcacaggggcgtgatgccgagcatgcagtgccgtgtagatggcccgtgtctcctacaaggatgttgcggaatccttggcacctgcccgtcctccactcactggaagaccttgcgggcctgttagggctgaccaccgccgaactagcctggttcagcgaccctaagcgcttagcgaggacagctgccgacccacgcttacgccactatcgggtgaccactagacgagcgccgtcaggcgctatacgcgtcctggaggcgcccaaataccagcttaaggctcttcagcgtcgcctgttggctgacctcctaggggcaattcccccccatgccgctgcacatggctttcgggcaggcagatctgtcgcaacattcgccgggccccacgctggtaaagcactggtgctgcggtgcgacttggaggggttctttgccagtgtgacggttgggcgtgtatacgggctgtttcgcactgccggctatcctgaacctgtggcccacgctttggcaggcctgactacgacagttctgccagcgtctgtgtggaggaaagtgccccggcctgccgatccaggactgcttgacgctcactggcgtttgggcaggagactggctcaagcccatttaccgcagggcgcgccaactagccctatgttggctaatctggtcgctcacaggctagacgcaaggtgtgcaggcctcgcggaagcttggggatggaattacacccgctacgccgatgatctggctttcagttgcgctggcggaagaagagcaggtgcggctgctctgctgcggatggtggagagaatcgtcggtgaagaagggttccggctcaacgcacgaaagaccgccgttcagggctcatccgccaggcaatctctcggaggactcgtcgttaatgagcatgtacgcgtaccaagagtggagctcgataggctcagagccatccttcacaactgtgcccgatatggaccctccacacagaaccgaagtggacacgcagatttcgccgcccatctctccggaaggattgcctgggtggccaaccacgacccagttaggggggccagacttcgggcaggctttgaggccctggattggtcgcggtga

SEQ ID NO: 13004 - RNA, 1353 nt, synthetic construct
  source 1..1353: mol_type = other RNA
atgaccactccaaggcaagcagcggcgaccgcttcaggtatagccactgcgttgttagccggaccctggcggaggcgagaagctgtacgacgagtggcagtggctcttggtcatgccagggcccccagatgggttggcgctttggtgggcgaggtgctggatgcctatcgagacgcacccgctgatcgcccacgtgagctagcggcatttctggcctcaacaagggggtgggcgcaagggcaagctggagatgtggccccacgtgtggtgaggagagagcccgtccctactcgggtggttcgtcctcgccccgaccttaccgaagtaccagacctcgcggcgcttgcccggcttttggatgtggatcagggcgaactggcatggttcgctgatacacgcggccttgagagaacggcacccgaggaagctctccggcactatcgatggagagtggtagagcgacccgggggagttcgccttttagccgccccaaagccccgcctcagggagattcaacgccggctgttgcgccatttagttgccccagtgccgcctcaccctgctgcacatggctgcgtgccaggccactccgtcagaactgcagctgctccccacgctggagctgacacagtcctggccctggacctggagtcgttttttgcctctgtgccagcaggacgggtttggggggtcctacagggcgtcgctggtctgactgagcctgtcgcccatgccgtgacaggcctcgtcaccaccgtagtccctctggctgtctggcggagagtgccggttcctgaggacggagcggctcgtgataggcacgccagattagggagacgcctggctgtccctcacttgccacaaggggctcccacttcccctgccctcgcaaacttggtgtgcgccagactggacaggcgccttgctggtctagccgcaagtgccggggccgtttacacacggtacgtggacgacttgttcctcagcggccccccagcattaagacgaccggccttcgcagcaagggtagcagcgatcgccgccgatgaaggattccgcgtgcaccccgggaaaacgaggtctgctgggagaggtcggcgtcagaccgttctcggcgctgtggtgaatgtgcggcctaccttgccgagggcagaacgcgatgccctcagagctctgctccataactgtgccgtcagtggctgggcctcccaggtaagggacagggatcccgccacatttcgggaacacgtgctaggacgcgttgcctgggccagcagcatggaccctgtcctgggagccagactgcgggtgctggcagaacggatcgattgggacgcaccaggcaccgcctga

SEQ ID NO: 13005 - RNA, 1347 nt, synthetic construct
  source 1..1347: mol_type = other RNA
atgactgccagcagacgcacagcagcgaccgcttccggagtagccactgcccttctggccggtccttggcgaagacgcgatgccgtgaggagagtggcggtggcattagggtacgctcgggctccgagatgggtaggcaccttggtcggcgaagtgctgctgacataccgcgaagcccctgcagataggcccagggagctggcagcgttccttacaacgacggctgggtgggagaggggttggtctgcaggcgaagtacggcctagggtacaccggcgggaaccagtacctacacgcgttgtcaggcgccgccctggagttcgtgaagtgtccgatctggccgcccttgcccgactgttggacgtggaccaaggggagctggcttggtttgccgacgtgaggggcttagagaggaccgccccagacgaggccctcagacactaccgttggcgggttcttgagcgacctgggggagtgcgtcttgttgccgctcccaaaccccggctcagagaggctcagcgacgcctattgagacacctcctggctccgctgccagttcacgacgcagcccacggatgtgtgccaggtcgctctgtgaggactgctgcagcaccacatgctggcgctgccgtggtcctcagcatggatctggagtcattctttgcgggtgtaccagctgggcgtgtgtggggagtcctgcaaggagtggcgggactcaccgaacccgtggctcatgccgtaactggcctagccactacagtcgtcccagctgccgtatggcggagggtacccgtgggtacagatcctgaccgccatgctcggttgggacgacggttggcagctccccatctcccagttggcgctcccaccagtccagcactcgccaatctcgtgtgcgcccgattagatcgccggttggccggattggccgcttcagcaggggcagtgtatacccgctatgtggacgatctgaccttctctggggggcctgggctaagacgcgacaggtttgcagccagagtggcagccgttgcggctgacgagggtctacgtgtgaatcccgctaagactcggactatgggcaccggacatagacagcaggtcctgggcgccgtggtcaacgtcagaccgacccttccccgacccgaaagggatgcccttcgggcactgctgcacaactgcgccgtccacggctggagaagtcaggtcagggacagagatccggccacattccgggatcacgtgctgggcagggttgcatgggccgcaagcgttgaccctgtcctgggagcgcgattaagagagctcgcggctcggatcgactgggatgtcccaggcacggcctga

SEQ ID NO: 13006 - RNA, 1350 nt, synthetic construct
  source 1..1350: mol_type = other RNA
atgactcggcctcgccaagctgccgctacagccagtgggatcgcgaccgcactacttgccggtccctggagacgccgtgacgcagttcggcgagtggctgttgccctgggtcaagctagggctgcgcgatgggtggggacattggtcgccgaggtcttagccgcctatcgggatgcacctgccgacagacctcgcgagttggccgcattcgtgcggacaactgaaggctgggcacggggacaagccgctgatgtgcgaccgagggtggttcgccgtcagccagtcccaaccagaacggtacgggttagggcccccgttgcggatctccctgatctggcagcactggccaggctcctggatgtggaccagggcgagctcgcctggcttactgacgtccggtcatgggagaggaccgctgatgcaccacttcgccattacaggtggagaaccgttccgcgacccgctggaggagttaggctcctggccgctccaaaaccccgattgcgggaggcccagagaagggtgctgaggcacgtgttagccccactgcccgtgcaccctgcagcacatggctgcgtcaggggacggagtgtcagaacagccgcattgccacacgccggcgcagatgttgtgctcgggatggacctcgagggcttctttgcaggaattcccgccggcagagtgtgggggttactgcagggcgtcgccggtctgactgaacctgtggcgcacgcgctgactggcttggctaccacagtagtgcccgtcgctgtgtggagaagggtgccagttcctgctgaccctgcaggcagagataggcaccacagattgggacgccggcttgccgtgccacacttacctcaaggggcccccacatctcccgcgcttgctaacttggtgtgcgcccggctagaccgacggttagcagggttggctgccgcttccggtgctgtctacacgcgctatgtggatgacctgaccttctccggcggagccgcacttaggcgtgacaggtttgccgacagagtaaccgcggtggccgccgatgaaggattccgtgtccatccagggaagacgcgtactgcaggtagcggtcgccgtcagcaagttctgggggctgtggtcaatgtcagaccaacacttccgcgacccgaacgcgacgcattacgcgctctgctgcacaactgtgctgtgcatggctgggctagccaggtgcgcgatgcagaccctgccacctttagagacgcggtgttgggaagagtcgcctgggcctccagcgtagatcccgtactcggcgctcggctgcatgccctagctgaacgcgtagactggtcagcggccccgtcttga

SEQ ID NO: 13007 - RNA, 1335 nt, synthetic construct
  source 1..1335: mol_type = other RNA
atgacaacacatcgccaggacgcagtaactgcggcaggcgtggctacggcattgctcgctggacgatggcgccgaagggagatggtccggcgagttgctgtcgccctggatagagctcgggcgcctaggtgggtgggtacactggtgggagaggtgctggtggcctatcgggaagcgcctgcagatcgccctagggagctggcagccttcgtgccaaccaccgagggctggtctaggggaagaaccgccctgccgcgacctagagtcgccagatggcagcctgttgccgtgagcgttctgaggcgcccgtttccagtggccgaacttccggacgctgcagccttagctcggctcctcgatctggacctgggggagctgctgtggttcgccgatcccagaggactggagagaacgtcaggcgagcccctgcgccactatagatggcacgctgtcccacacggctccggtatgcggctccttgctgcacccaagcctcgcttgagggagatccagaggaggctgctgcggcatgtgttagcccccgtccctctccacgctgctgctcatgggtgcgttcccggacggagtgtcagaactgcggctgcccctcatgctggtgccgatgtggtcttagggatggacctggaagccttctttccctcagtagctgcagcacgggtgtggggccttctgcaagggacagtcgggctcacagaaccggttgcccacctagttactggacttgtgaccactgtgcttccagcggcagtctggaggagggtgccagttccaccaggtgccggctctgccgataggcaccgacgactcggccgaagactcgctgtgccccatctgccacaaggcgcacccacatctcccgccttggccaacttggtctgttttcgcttggaccggcgtttggcaggtcttgctgcagccgcaggagggaggtacactagatacgtcgacgacctgacctttggaggggggcgtgctttagcggccgatcgtttcgccgctagagtggccgcgattgccgcagacgagggctttcgggtgaatgacgcgaaaacccgtgcagtaggcgccgctcgtagacaggaagtgctaggagcagtagtgaacgcacgtcctactctgccacggcccgaacgggacgctttgagagccctcctccacaattgcacgaccaggggctggcggacccaagtgagagatcgcgatcctgccacattccgcgatcacgttctgggccgcgtagcgtgggcctcttccgtagaccccgccctaggtgctcgccttcaagccatggccgccagggtggactggagttga

SEQ ID NO: 13008 - RNA, 1302 nt, synthetic construct
  source 1..1302: mol_type = other RNA
atgactgcctcgggaattgcaaccgctttgctggccgggccatggtcccgaagaacaatggtgcgcagagttagcgttgccctcggctttgccagggctcctaggtgggtcggcgcgttagtagacgaggtcctagctgcctacgtctcagcccccgctgatcgcccaagggagttggcagcctttgttaccactacccaggcatggcagagaatgggggcactgcgaagagtggtgcatagacgaccagtcgcgacctctgtcgttcgccaccgcttcggagtgccccctttgcctgacgcagcagctctggcaaggctgctcgatctggaccagggggagttggcctggttcgctgacgtgcggggccttgaacgaacagccggtgagcccctcagacattacagatggcacgccgttgaaaggcggggaggcttaagactgctcgcagagcctaagccgcgtctgaaggagatccagcggaggcttctccgtcacgtcctggtgcccgtacccgtacacgatgccgcccatggatgtgtgcccggacggtcagtgagaaccgctgctgccccacatgctggaagtgccgtcgtgctcgggatggacctggaagccttttttgcctccgtgacggcacctcgaatctgggggctgttgcagggcacggtgggcttaactgagcctgtggcacatctggtcaccgggctggtcacgacctctgtgcccacctctgtttggcgggccttgccgcttcccgatggtacagatgccagggagagacaccgacggttgggtcaacgattggcggcgccgcatcttccacaaggagcacccacctcccccgctctagccaacctggtgtgctatcgccttgaccgtcggttagccggcctggctagtgcatttggcgccaggtacacacgttatgtagatgacctgacattcagcggggacagacgcattgagacaggccgcctggctgcactggtgactgggatcgcagctgaggaaggcttccgcataaacccagctaaaactcgcgtggccggtgctggtagcaggcaaagggtgctcggcgcggttgtcaatactcgtccaactctgccacggcctgaacgggatgcccttagggctctcctccataattgcgccagacacggttgggcgagccagacacgggaacacgaccctgccaccttccgggaacacgtgctaggacgcgttgcctgggccgcttccttggaccctgtattcggagctcgcttgcacgcgttggcacggagggtggattggtcatga

SEQ ID NO: 13009 - RNA, 1044 nt, synthetic construct
  source 1..1044: mol_type = other RNA
atggtggctgccgatgacggtcctcctggtaggggacgcccaaggttaagaactcgccccgcattggcccgattgctggacctggaccaggccgacctggcatggttcgccgatgtgcgggtcctcgagaggacggtggatgagcccctgcgacactatcgctggcacgccgttgaacggagaggtcggctccgtctgctggcagagccaaagcccagattgaaagaggcacagcgccgactactcaggcacgtgctcgctcccattccagtccacgacgccgctcacggatgcgtgcttggtcgcagcgttaggacagccgctgccccacaagcaggacgagcactggtgttaggcatggacctggaagccttttttgcgtcggtaagcgctcctcgtgtctggggcctactgcagggcacagcaggcctcacggagcctgttgcccacctggttaccgcccttggcactaccacagcgcctgtgtctgtctggcgcgcacttcctctccctggaggcgtagaggccagagaacggcatcggaggctcgcagctccccatttaccacaaggggcccccacctcccctgctttggcaaacctggtatgtttcagactcgaccgtcgacttgctgggctggctgcttcctgcggagctaggtacaccagatacgtggatgacctgaccttctctggcgatagacgtattagaggggaccggctggctgccttggtgacagaggtcgcggccgaggaagggttcagagtcgatccggccaagactagggtcgcaggtgccggatcacggcaaagggttctcggggccgtggtgaacgctaggccaactctgccgaggcccgaaagagatgcgttacgcgcgctgctgcataattgtgcgcggcatgggtgggccacacaaactcgaggccacgaccccgcaacctttcgggagcacgtactaggacgcgtggcttgggccgctgccttggatccagtgcttggagaacgccttcatgccctggccgcacggatcgattggagttga

SEQ ID NO: 13010 - RNA, 1173 nt, synthetic construct
  source 1..1173: mol_type = other RNA
atgctcgcggcctatgcagcagcacccgttgaccgcccacgggaactgacactgttcgtgcagaggacccaggggtgggaaagaatgggcagtccccctcgggtagtgcacaggcagcctcgtgctacagctgtggctcgcgaccgtttcggggttgccccactcgctgatgctgctgcccttgcgcgccttctggacctggaccatggagaacttgcctggttcgctgatgttcgcggcctggagaggacagtgggtgagcctctgcggcactaccggtggcacgcagttgagagacggggaggggtgcgactcctggcagaaccaaaagcccgtttagaggaggtccagcggcctctgctaaggcacgtgcttgcccgcgtccccgttcatgacgctgcacacgggtgtgtccccggtagaagcgtacgaaccgccgcagcgccgcatacatcaagagcagtggtgctggggatggatttagaggccttttttgcgtctgtgacggctccccgggtttggggacttttgcaggggaccgtcgggttgaccgaaccggttgcccacttgctgaccggcctagtcacgactactgctcccgctggagtatggcgtgcccttccagtaccttcaggcgccggtgcccgagaacgccatagaaggttgggtgagagactgacgactctccacctcccacaaggcgcgcctacaagtcctgccctggccaacctggtgtgctttcggctggataggagactcgctggactcgcagcaactgtaggggcgcggtacacaaggtatgtggatgacctgaccttcagcggcgacaggagactgagagccgatcagtgtgccagcttggtgacagaggtcgctgccgaggaaggctttcgggtgaatcctgccaagacccgagtggcaggagccgattccaggcagcaagtgctgggcgccgtcgtgaatactcgccccaccctaccaaggccagaacgagacgcactccgcgccctcttacataactgcgccaggcacggatggactggccaaacccgcggtcatgatcccgctactttctccgagcatgtcctgggcagagtggcttgggccggatccttggacccggtctttggcgagagattacacgcactggctgcccgaatcgactggtcttga

SEQ ID NO: 13011 - RNA, 1422 nt, synthetic construct
  source 1..1422: mol_type = other RNA
atgacagccccctccgaaaggagggcagctgggactgctgcaggcatcgccactgcacttttggccggtagatggcggcgccccgaaatggtcaggaggactgccgtagccctaggccgcgatagagccccacgatgggtagggacgttggtcggtgaggtgctggacgcctaccgagatcctccagtggatcgtccacgcgaactggccggctttgtgagaaccacagccggatgggcaaggggttggaccgtcgttccgcagccgaggataacccggtggcagccagcacggaccgatgtagtccaccgtccttatggtgtcgcagccctgcctgacctgactgccttagctcggctgctggacgtggatgctggcgaactggcttggtttgccgacacacacaggctggagaggaccgtcgccgagcctctcaggcactaccggtggaccacagatggcgatagattgctggccgctcccaagagccggctgaaagagattcagcgaagattgctgagatatgtgataggccccctccgagttcatggggcagcgcatggctgtgttcctggacggagtgtgcggaccgctgttacaccccataccggcgcagcccaagtcctgcagatggacctcgagtctttctttgctagtattgccgctgagcgcgtccacgggctacttcgatctgtgggcgggctgccagaaccagtggcacttgcggtgaccggcctcgtgacaactgtggtccccagatccacatggagacgcgtgcctgttccagacgacgtggaccgccatcatcgcttagggcggcgattggcggggcctcatttaccccaaggagcccccacttctcccgcactcgcgaatctggtgtgcttccgcctcgatcggcgattaggcggactcgccgccagctttggagctgcttatacgcggtacgtcgacgatctgacattttcgggtgggcgcggaatcgaccagggaccattcgaacgtctcgcgggcgagatcgtggtggaagaggggttccgtttgaacagatccaagactcggtccacgtcatcagctggacggcagtctgtgttgggaactgtagttaacgtgaggcccactctaccccgcaccgagagggatgcccttagagcccttctgcacaattgcgctacacgcggctgggccagccaggttagagacagggaccctgcaacgttccgggaccatgtactcgggcgcgtggcttgggctagcagtatcgatccagctttcggcgcgagactgagagctagggcagccctgattgactggagccgaccagacgagggtgcatgtgggaggacccctgccgatcgtccgtcagatggaacccttccgcctcccgacgatgacggaggtgcacgttgcggcgaaagatga

SEQ ID NO: 13012 - RNA, 1356 nt, synthetic construct
  source 1..1356: mol_type = other RNA
atgactgccccaggaggcagaagagctgctggaaccgctgccggtattgcaacagccctcctggctgggagatggcagcgaagagagatggtgcggcgtacagcagtcgcccttggactgccaagggccccacgatgggtaggaaccctcgtcggcgaagtgctggctgcgtatcgcgaccctcccgttgaccggccaagagaactcgccggctttgtcagagcaacagctggttgggctcgaggttgggcagccgttccccaacctaggatcgtacgctggcagccagtccccacagctttggtcaggaggcgccatggcgtcgcgggtttacctgacctggctgcccttgccagactgctggatgtggacgcaggggagttggcctggttcgccgacactcaccgactggaaaggaccgtgggcgaacggttgcgccactaccgctggaccacagctggagatcggctgctggctgtgcctaagcccagactgaaggaggtgcagcgccgcctcctcagacatgttgtcggcccccttggggttcatgacgcagcgcacggatgcgttcccggcagatcagtgaggaccgctgtatcgcctcatgcgggcgcagatcagctcctgcagttggatctggagtcattctttgccggtattgccgcagagcgggttcacggccttctgcgaagcgttggagggttaccggagcccgtagccaggacagtgactggcctcgtgaccacagtggtaccgcgatccgtgtggcggcaactacccgtgcctgatgatgctggcaggcatgagagattggggaggaggctagccgtgccccacttaccacagggagcgcctacctctcccgccttagccaatctcgtgtgcttcaggcttgaccggcgtctggatggccttgcagcctcctttggggctgtgtacactcgctatgtcgatgacctgactttcagcggtgaccgcgggattgaccgaggacggtttgagcaactggccggggaaatcgtccgggaggagggattccggcccaatcgtgccaaaacgcgcagcacgacgtccgcaggtcgtcagtctgtgctggggaccgtggtaaacgttcggccgaccctcccacgcccagaaagggatgccctgagagccttgctgcataactgtgccacacacgggtggagaacccaggtgagagatcacgacccggccacttttcgtgaccacgttctgggccgggtcgcttgggcaagtagcatagaccctgtgctcggtgcgaggctaagggcgcaggctgaacggatcgattggagttctggccctgatggaactgcagccccagcacctgcatga

SEQ ID NO: 13013 - RNA, 1371 nt, synthetic construct
  source 1..1371: mol_type = other RNA
atgacagcaccaagtggtaggcgcgccgcaactacagcggctggtatcgctgtggccttattggggagcagatggcggcggagagaaatggtacgagcgaccgctgtcgctctggggtacgcaagagcgcctcggtgggttggcacccttgtaggggaggttctcgtggcctatcgagatgccccagtggacaggccccgggaactagctgccttcgtgagaacgactgctggctggcaacggggatggacacgcgtaccccagcctagagtggcacggtggcagccaacggtgacggaggtggcattccggcgacacggggtcactgaattgcctgatctggccgcgcttgccaggctgcttgatctggacaccggggagctcgcttggtttgcagacgcccacaggctggagcgcactgtacgggaacccttacgccactaccgttggcggactgtgggaagcagactggtggccgcacccaaaccccgtctcaaagaggcccagcggcgcctactgcgtcacgtagtcggtcccttgcctgttcatggcgccgcgcatggctgtgttcctggaaggtccgtccgaaccgcagtagctccacatgccggagccgcagtcgtgctccagctggatctggaggccttctttccctcaatagcagcggagagagtgcaggccctgctgcagacagttgggggattgcctgaacccgtcgcgcacgctgtgacaggcttagtgacaaccgtcgtgccacgttctgtgtgggctgcagttcccgttccagcaggccctgatagggacagggacaggcaccatagagtgggtaggcgcctcgccgttccacatctcccgcaaggcgcacctacttctccggccctggctaacctcgttgcctttcgcttggataggaggctcgccggactggcagcctctttcggagcccagtacacacggtatgtggatgacctaaccttttccggcgacagagcactcgacaggggtcgctttgcctccttggtcggggctgtggtcgctgaggagggattccgtctgaacgctgccaagactagaagtaccacctcagcagggaggcaaagcgtcctgggagccgtggtgaatgtgcaccccactctgccaagaaccgatagggacgcccttcgcgcccttctgcataattgcgctgtgcatggctggcggtcccaagtccgcgatcatgacccagccaccttcagggatcacgtccttggcagagtggcctgggcggcttcgattgacccggcttttggcgtgagagctcgacgcctggccgatcgaatcgactggacagctcacccggtacgaagcccagaaggccctgggcacgactga

SEQ ID NO: 13014 - RNA, 1350 nt, synthetic construct
  source 1..1350: mol_type = other RNA
atgactgccgagagacaagccgcagccacagctgccgctattgcaaccgcattgctggctggtccatggcggcgtcgcgaaatggtgaggagggttgcagtggccctggggcaagcaagggctaggacgtgggtgggtacattggtcggcgaggtccagaccgtgtatcctactgctcctgtcgaccgacctcgcgagcttgccagagtcgtgcgcacgactcaaggctgggagcgtggccaaagccatcgaccgctcgccagggctgtacgttgggaacccgtgcccactgcgcttgcatggcgcagatggccagtggccgatctcccagaccaagctgccgtcgctaggcttctggacgtcgatgccggagaactcgcctggttcgccgacgctagaagactggagcggacagccggcgaagcccttagacactatcggtggcgtgttgttcaacgcccggcaggagtgcggcttttggcagcacccaagcctcggctaaaggaggcacagcgccgcctcctgaggcatgttctggacagagtacctgctcacgacgccgcccatggatgtgttcccggcagaagtgtacggacagcagtggccccacatgccggtagcgcagtggtgctgaggatggatctggaggcttttttcgccagtgtcgcggctgggagagtgcatggcttgttgttgggggttgcgggtctgcctgaacccgttgctcacgtcctgacaggactgatgaccaccgtactcccaacggaggtatggaggcgcataccccccccagatggcatcgaagcacgcgagagacacagacggctggaacagcggctgaccgtgccacatttaccgcagggggcgcctacatcacccgcgttagcaaacctggtgtgccacaggctggaccgcaggttagccggactagctgcggcatccgggggaacttacacccgatacgtggacgatctgacgttctccggcgacagacgtattgcccgcgaccggtttgccgacctcgtaaccgatgtggtcaccgatgaaggatttcgagtgaatgccgccaaaaccagcgctacatctgcagccaggcggcaagcggtgctgggaacagttgtgaatgatcacccaactcttccccgacccgagagggatgcgttacgcgctctcctgcacaactgcgctgtccacggctggactactcagacccggggcagagatcctgggacattccgggatcatgtgctcggtcgagtggcctgggccgcttctgtcgacccagcatttggggcccggctacacaggctcgctgatcgaatcgactggaccgctcctgcccactcatga

SEQ ID NO: 13015 - RNA, 1335 nt, synthetic construct
  source 1..1335: mol_type = other RNA
atggctgccgtcacagcgtcaggcctcgctactgcattactggctggcccctggcggagacgggatatggttcgccgggtggcagtggctctaggtcaagcccgcgcagccacatgggttggcacaatggtcggggaggtccagactggatatccacaggctcccgtagatcggccgcgtgagttggcacgctttctcaggacaaccaggggctgggcgaggggacaagacaccactcctccaccccccgtgctaaggtgggaacctcagccaactcggctggcatggagccgagcacctgtcgcagatcttccagaccaagccgccgtggcgagactgctggatgtggacccaggcgagcttgcttggttcgctgacgcacgagggctcgagcgtaccgtaggcgaaccactcaggcactaccgctggcaagttgttccacggccccacggggttcgcctattagcggcacctaaacctaggttgaaggaagcccagcgcaggctgctgcgacatgtgctggcacgggtgcctgtacatgacgccgctcacgggtgcgttcctggacgatctgtgcggacagcagttgctccccatgcgggtagccccgtggttctgagaatggacctggaggccttcttcgctagcatcgccgcagagcgagtgcacgggttactgttaggaccggcaggtttgccggagccagtggcacacgtactcgcctctctggttacgaccgtagcccccgcacaagtatggcgccaggtgtctcttcccaccggcattgaggcccgtgaacgccatcggcgtcttggtagacagctggccgtaccccatcttccacaaggcgcccctacatccccagcgttggccaatctcgtctgctttaggctggacagaagactggcagggttggccgcctcatgtggagctcgctacacgcggtatgtcgacgatctgaccttctcggggggaacggctttaggccgggacaggtttgctgatcttgtgactagagtggtcgccgacgaaggcttcagagtgaatgccgcaaagactgcagccacctccgccgcaagacggcagtcagtcctaggggcggtcgtgaacactagaccgaccttgcccagaagggagagggatgccctcagggctctgctccacaactgtgctaccagtggatggcctggacagacacgaggccgcgaacctgctaccagcagagatcacgtcttgggacgcgtagcctgggctgcgagtctcgatcccgcctttggcgcccgtcttcacgctctggccgaaagaatagactggtccgctgagcctgctggttga

SEQ ID NO: 13016 - RNA, 1203 nt, synthetic construct
  source 1..1203: mol_type = other RNA
atggtgggagaggtgcagactgttcacccaagaccgccggtcgacagacccagggaactcagccgggtagtgagggccacacaggggttcgcaagaggccacgcttcattaccactgccacgagtggtccgaaggaacccagtgcccactgcacttgcgtgggaacgctatcccgtgaccgatctgcctgaccaggcagccgtcgctcgtctcctggatctcgatgccggcgagcttgcctggttcgcggacactagagggctggaacgcaccgcaggggaagctctccgccactaccgctggcatgccgttgacaggccacacggggtaaggctgctggcagctccaaagcctcggctgaaggaggcccaaagacggttgctgcgacatgtgttggcgcccgtgcctgtccatgaagcggcacatggttgtgtgcctggcagaagcgttcgcacggctgtagctccgcacaccggatctgccgtggttctgaggatggaccttgaggccttctttgcaggaatccccgcaggcagggtgcatggcttgcttctaggtcccgccggcctgccagaacctgtagctcatgtcgtgacagggctcgtcacaaccgttgtgccggcccaagtgtggagagccctacccgtgcctcccgacgtagatgctcgggaccggcaccatcgcttgggacgaaggttagccgtagctcacctgccacagggcgctcctacctcaccagctctcgccaacctggtgtgctttagactggatcgcaggcttagcgcactcgccgcctctagtggtgcccgttacacacggtatgttgatgacctcaccttttccggaggacgtagtgtcggaggcgatcgcttcgctgcactggtggctgaggtggtcgctgacgagggcttccgagtgaacgccgccaaaacatccgctgttggggccggtagaaggcagtccgtgttgggcgcggtggtcaatgtgcatcctgcgctgcctcgcagggagagagatgcactgcgggccttgctccacaattgcgcaactcacggctgggctggacagacgcgtggtagagatcccgacacctttcgggaccacgtcttagggcgagttgcctgggccggttctctggaccccgtctttggggcacggcttactgcactagccgagcggattgattgggccgccgcggattga

SEQ ID NO: 13017 - RNA, 1353 nt, synthetic construct
  source 1..1353: mol_type = other RNA
atgacagcggggagaagagcggaggtgaccgctaacggcattgcgactgctctgttagccggtgcgtggcggaggccacaaatggttcggcgcgttgccgtggccctcggatatgctagagcaccccgatgggtgggcacccttgtgactgaggtgctggcagcctactggcacccacctgccgacaggccaagagaactagccctgtttgtaagaacgactgctagctgggctaggggaacagcatccggtcccccacctggagtcgttagatgggagccggtccccactagtgttgtgaggccgcggttaccaggcgtcgaactctctgatctcggggcgctggctaggctcttggatctggaccagggggagctggcatggtttgccgacgcacgaagactggaacgcaccgcccccgagccacttcgacactaccgctggaggatcgtggatagacctaccggggtccgccttctagccgcacctaaaccccgcctgaaggaaatccagcgccgtctgcttcgacacgtgctggacccagtacccgtgcacggagcagcgcatggctgtgtgagaggccgatctgtgcggacggcagccacaccacatgcaggagctgccgtcgtcctgcgcatggatcttgaacatttcttcgcctcagtgcctgcccctagggtccatggcctcctactgggtcaagccgggttgcccgaacccgtagctcatgccgtgacaggcttggtgacgacagttctgcccgctgctgtgtggcggagaatcccgctgcctgacgatgtcagggcgagggagcggcataggcgattaggggcaagactggcagtcccacacttgccccaaggcgctccgtctagccctgccatggccaatctggtctgctttcggcttgaccgcaggctcgccgctttggctgacgcattcggcgcaacatatactcggtacgtggacgacctgacctttagtggtggagctcgcgttggacgtggacgcttggctgggttggtcggtgagattgcccgggacgaggggtttcgcgtgaacaccgccaagacccgtgccatatcctcagcccggcggcaagatgtactcggcgtggtggttaatgatcacccagccctccctcgtagagagcgcgatgctctccgggcactcctgcacaactgcgccacccacggttgggcaactcagctgcgtggcagggctcctgcttcgttccgagatcatgttcttgggagggtggcatgggcggctgccgtagatcctggcttcggagccagactgcacgccttagccgaccggattgactggagcagacccctgggctccgcttga

SEQ ID NO: 13018 - RNA, 1329 nt, synthetic construct
  source 1..1329: mol_type = other RNA
atgaatccgagggaacaagtggccaacggactggcaacagccatgctgggcggtgcttggtccagggaaccaatgcgggcccgcattgcacgagcactaggacgcccgagagctcctaggtgggcaggtgcactggtaggccaggtgctgggtgcttatcgggatgcccccgccgatcgaccacgtgaattggccgcctacgtgcaaactacacccgcttggcagcttgcttgggagcataggcggccccctcgaatcgtaaggtgggctcccactcccactgtcatggttgcacggccctggccggtgatagaactggacgacctcggcgcgcttgcgagactactggccattgatcaaggcgagctcgcctggttcgccgatgtcagatctatagagcgtcgttctgggcagcccctccggcattatcggtggagggcgcttccaaaacgcggaggggttcgcttggtggctgcaccaaagccacgcctgaaggagattcagcgacgcctcctccggcacgtgctgacacagattccagtgcacccagctgcccacgggtgtgttcctggacgctcagtgaggacagcagttgacccccacgcgggagctgccatagtgatcagagctgacgtcgaggggtttttcagcagcatttccgccggcagaatctggggcctgttacgcatggccggactgcctgagcctgttgcacacactatcaccggactggtcaccaccgtcgtccctacccaggtgtggagagccgtacctagaccgaccggcgcactgctgctagacgcacatctcagaatgggtgagcgactggccactccacaccttcctcagggggctccaaccagccccgtcttagctaatctggccgcattctcgctcgacaggcgcctgacaggtcttgccggagcttttgggggccagtacaccagatacgtggacgacttgactttctccggcgggccttcacttagaaacgcacgcagcagatttgtggaattggtggatgacatcgtgcggagtgataggctgcgactgaacgaaaggaaaacggttgtactcggcgctgctggacggcagcagctcttaggagccgtgatcaacgatcaccctacggtggcccggcatgaaagagatgcgttgcgggctctgttgcataattgcgccacacggggctggcaaacacagacgcgcggcttagaggccgacgagtttagggcgaccctcctggggcgtatctcctggattggcgggctagatcccagtttcggtgccaggttgcgtcgatcttttgacgccgtcgattggtcatga

SEQ ID NO: 13019 - RNA, 1278 nt, synthetic construct
  source 1..1278: mol_type = other RNA
atgaccacacgtagcgaccaacagcgccaggtggcagacggtttggctacggctcttctcgcgggtccctggaccgttccactcatgacccgtcgcgtgagaacagcacttggcctcagggggaggcagccttgggtggtaggtctggtcgccgaggtagcggacgcctaccgagatccacctgtggatcgccccagggaattggccgcctatctacgagctaccggatcatggcgactggctccagtgccccgtgtcgttgcctggactccggttccgacttcaatgggccccatgccttggccagtgactgccctaccggatctgggggcactggctagactgctcgatatcgaccagggggaactggcctggtttgccgatgtgcggggattagagcgcagatgcgcccctcccctgaggcattatcgctggcgagagattcccggcaggtctggccccagattagtggcggcgccaaagcctcggctcaaagaaattcaaagacggctgctgaggcatgtcctggagcctatccctgtccacgacgctgcacacggagccgtggctacacggagcgtcagaaccgccgtcgcacctcacgcaggtgctacagtcgtgcttcgggccgacctggtagcgtttttcccttccatacccgcagaacgcgcctggggactccttaggactgctgggctgcccgaagctgttgcccatactgtgactggtttgttgacaaccgtggcacccattgaggtgagcaccgatccaaggctccggcacccacatgtaccacagggagctccctccagtccacgcctggcaaatgtggttgcatttagcctggataggcggctagccgggcttgcagctcgtttcggcgccagatacacgcggtacgtcgacgacctcacattctctgggggcgcctcgctgagaacagccaggagtcgcttcgtcgcccttgtggaggaaatcgtgcgggatgagggcttcgaggtgaacgagcgaaagaccgtcgtgctgggggagtctggacgtcagcaggtccttggcgccgtggtaaatgctcatcctgcgttacccaggccggaacgggacgctttgcgagcaacgctgcacaactgtgttgttcatggatgggcctcccaagctcgcggcagaccaagagacgagtttagggcccacctgctcggaagagttgcatgggtggggagtttgcaccctggccacggcagacggttacgcgaactagccgatcggatcgactggaactga

SEQ ID NO: 13020 - RNA, 1278 nt, synthetic construct
  source 1..1278: mol_type = other RNA
atgactggagcagggcctgctgggccacttgcagacggtctggctaccgcactgctagcagggccttggacacggcccgcaatgcgaactaggggtcgggacgcactaggagccgccagaacaccagtgtggttaggccggaccgtggatgccgtcctaacagcgtacccccaaccgcccgctgatagaccccgtgagttggccgccttcctgttagcaaccgcagagtttgccaaactggctaggcgccgccctcctccacgagtagttagttggtcgcctgtcccaacggacgtgatggttcgcccatggccagtggagctgctcccagaccatgctgctttggcgggcctgctggatgtggatcagggtgagctggcgtggttcgccgacgtgaggggtctggaacgctcatccccagaaccccttaggcattatcgctggaggaccgtggctaaaccgggaggcgtaagagttcttgcggccccaaagcctagactcaaggagatacagcgccgcctgctgaggcacgtgtttgatgctgttcccgtgcatcccgctgcacatggcggggtacgacgtaggagcgtgctcaccgcctctgcaccacacgcagcccaacctgtcgtggttcgggtcgacctggtcagtttcttcgctagcgtaagagccggtcgggtgtggcgattactccggacagccggagttccggaaggtgtcgcgcacacggtcactggcctcgtgaccactgtcgctccactgcccttccgggctcttgaccctagactccgcacacctcaccttccccaaggagcccctacttcccccgcccttgccaatctcatcgcctttagcctcgatcggcggctgaccggattggcagctcgcttcgacgcctcctacacccggtacgcagatgacctggtgttttctgggggtaggggcttgggagcggctagatttttggatcgggtcggcgagattgtgagagacgaaggcttccgtgtccatgatggcaagacggccgtactgggaaggtcaggccgacagcaggtgctgggggttgtgttaaaccaccaccctgccgtgccccgaagagaaagggatgccctcagagccctcctgcacaactgcgctactacaggatggagggcccaagcccgcgatcgtgatgactttcccgcccacgttttgggcagaatcgcgtgggtccaaagcctggacccggtgcatggtaggagactgcgtgccgcttatgacgcagtggactggtcttga

SEQ ID NO: 13021 - RNA, 1335 nt, synthetic construct
  source 1..1335: mol_type = other RNA
atgactacaacagctcatagacgaagggcagcagccctaagggccggaaggagacgtcacgatcgggatagctctggccatgcagccgctggcactgtcgctgatgccctgctcacaacggactggcagaccggtaagatgcaaattgcagtccgccgagtaacggcagggcgaaaagggtgggccagacagttcgtccaatttgtcagacgcgcttatcctcgggccccctatgacaggcctcgggaacttcgactcttcctgcaggcgaggggaggaatcccacgggacgtggtagccaggcaccggttagttagtgctactcgggtggtacgaatgcgctggaataccccgggcttgggagatcttgctgacctcgcagccttcctggatctggatggagatgccctggactggtttgccgataggagggaaataaatcgacacgctcgcgacgagcgtctgcgccattaccgctacgtctggctccctcatcgtctcatcgaggcccctaagccaagattaagggatctgcagagactggtgcttgatcgcattctagcgcgggtgccagtacacgacggtgtgcacggcttcgttcccggtcgaggggtgcacacttttgctcggacccacacaggaagagacgtgttggtgagcatggacttacgggctttctttacctcagtcaccgccgctcggatctacgggttgttccggggtattggctatcctgagcccgtggctcatacactgaccgccctgaccaccacacgaacacccgttgccgtgctgagatctgcaccggaccctcatctcgcagccttgcttcgcagaccccacctaccacaaggagccccaacctcccctgccctggcaaacctgtgcgcataccgcttagacagacgcctctccgggcttgctggcaggtttggagtgacatacgggcgttacgccgatgacctggctttttccgggactttgagcgctccacatgtgacccggctcactgcgcttacagggagaatagcggacgaagaaggcttcaggctgcacccccacaaaacgcgcgtgagaaccaggagtcagaggcaggcgctgactggtctggttgtgaacactcgccccgcggttccacgggaggactatgaccgtctgagggccatcctgcacaatgccgctacgcacggccttgcagaggccaaccgtgatggccatgccgacttcgctgcacacttggccggcagagtcgcgtggatgtcacatcaccatcctgcccgggctgcaaagctgcaccatctcttggcccaggcactcagagatcagcccaggtga

SEQ ID NO: 13022 - RNA, 1230 nt, synthetic construct
  source 1..1230: mol_type = other RNA
atggtcgctggggccgtggctgacgcgcttttgaccaccacatggcacaaggaccagatgctggcagccgtcaggactgttactgctgcccgacctccgtgggctagacgactggtggctgttgtcctgcacgcatatcctcagcccccagccgataggcctcgggaactgagaaggttcctgctccatctgaccagaagggcccatgtccgtcggcggttagtcacgcctgcgaggaccgtgcacatgaggtggggcgcaccagctattgactccctcgcagacttcctgggactcgatggagatgaacttgattggttcgccgatcgcagagagatcaacagacacgcccgagatgaacggctgcgccattacagatatgcctggttgacacaccggctcattgaggcacctaagccccgcctccgagacttgcagcggagagtgctagacgatattcttagcgcagtgcccgtgcatgagggcgtacacgggttcgtacgtggacgcggagtgcactccttcgctcgtgcccatgccggatgcgacgttcttatcagtctggacttgcgggcgttttttagctctataactgcagcccggatctacgggctatttaggggcataggctaccctgagccagtggcacatacactgaccgcgttgacaactacgcgcacccccgcacatgttctacgtgccgcacccgatccacacttagccgctctcctgcgccagccacatctgccacaaggtgctccgacaagtccggcgttagccaacctttgtgcttataggctcgacaggagattggctgcactggccacccggtttggcgtgacatacgggagatatgccgacgatcttgccttttcaggccgcctcggtcgtactgaaactgaccaccttatcgccctggtggatggtatcgcagccgaagaggggttcagagtccacccaggtaaaacagaggttagacgccgctctcaaaggcaggctctgacgggcctggtcgtgaatgagaggcccgctgtgccccgagaggattacgacagactgcgagcaattctgcacaatgccgccactcacggcatggccgaagctaaccgggacgggcatgcggattttgccgctcatctcaccggaagggtagcctggatgtcacatcaccaccctagccgcgctgccaagctcaaaaccttactggaccgggcactggcgaccccctga

SEQ ID NO: 13023 - RNA, 1332 nt, synthetic construct
  source 1..1332: mol_type = other RNA
atgtctacggcggcccatcgacgcagggatgcagctttgagggcagcgctgcggcggcatgacagagagtcctcaggacatgctgcgccgccacaggtggcaggagcactagctgatgctctgttgaccactgattggcggcccgctcagatgcaggctgtcgttcgggcagttgtggccggtagagcaccatgggctaggcggctcgtggttgccgtatggagggcctatccccgggctcctgtagacagacctcgtgagttgcggcagtttctgatcaaccgagcactggccaggcgcgctgttatacgtcggcggatagtggctcccactagggtcgtgaggatgcgctggggtgctcctgccctaggagacttggcggagcttgctgcctttttgggactggatggcgatgcccttgactggttcgcggatcgcagagaactcaaccgccacgcaagggatgagcgactgcgccactatcgctacgtctggaggcctcatcggctcatcgaggcacccaaaccaaggatgcgtgacctccagcgcagattactggacagaattctcagcgtggtgccagtgcacgacagtgctcacggcttcgttcccggcagggggactcacacgtttgctcgcgcccacactggcgccgatgtactggtgcgcttagacctgagagcgttctttccatccatcacggccgcccgaatttacggcctgttccgcggacttggatatccggagcccgtggcccatactctgacagccctgaccacaacccggactccagctcacgtcctgagagaggcccccgatcctcatctggccgccttattgagacaaccccaccttccacaaggggccccaacaagccctgctctagctaacctctgcgccttccgacttgacaggaggctcagtgctctagccgggagatttggggtcacctacggtcgatacgccgatgacctcgccttcagcgggaccttaacaaacgcccgtgccgaccgtttggtggaactgaccggccgcattgccgctgaagagggctttagggtgcacccgggcaagacacgaatcaggagacggtcacagagacaggaactgaccggactggtcgtcaatgaaagacctgcagtgcccagaaaagaatatgatcgacttcgggcagtgctccataatgcagcaaggcacgggctggccgaggctaatcgtgacggccacgcagacttcgcagcacacctcgcaggtagagtagcctggatgtctcatcggcatcctacacgcgcggccaagctgcacgaacttctggcccgggcgctgacctga

SEQ ID NO: 13024 - RNA, 1413 nt, synthetic construct
  source 1..1413: mol_type = other RNA
atgactactgcagctcatagacgccgggcatctgctttacgcgctgccaggaggcgccatgatcgcgaatcatccggccatgctgctgcccggacacctaagggagcacataggcagtcaccttggcaggtggctggtgcactggccgatgctctgctgacaaccagctggcgccctgaagatatggttgctacagtcgggagtgtcgttgcaggcagacctgcctgggccaggagactggtcggagcagtgctcctggcatatccccgggctcctgccgatcgtcctagagagctgcggcatttccttgccggcctcgagggtagaccccgagttgctgtgagacgagccgtggtaagacacaggcccgtcgtgcccgtaagagtggttcgtatgcggtggggagccccaggagtggacggattggcaggactggcggcgttcctggaccttgatggcgacgcccttgactggtttgctgaccggagggaaatcaaccgccatgccagagacgaacggctgcgccactacagatacacctggctgacgcaccggctgatagaggcgccaaaaccacgcatgcgggcactccaacggcagcttttggaccagatcttgtcacgtgtgcctgtccatccctccgtccacgggttcgttccagggcgagacgcccacacctttgctcgtgcccacgctggggccagtgtattggtgtcaatggatctccgagccttctttagctcgatcacggccgcaagaatccatggcctcttcctggggataggttatccggagcccgttgcccacgcacttacagccttgactacaacccggactcccgcacggattctcagggcagcctctgatccatacctggctgcgttactgcggcaaccccacttgcctcagggagcacccacatccccggcactggctaacctctgcgccttccgcctggaccgaagacttagcgggttagccggccgcttcggtctgacctatggccgttatgcggacgacttagctttttctggaactctcgccgacggtagagtggctaggctagtggcgttggccggccagattgccagggaggagggctttcgcgctcacccaggcaaaacccgagtcaggaggaggtcccagcgccaagagctaaccggccttgtggtcaacgataggcccgccgtgccaagggaggattacgaccgcctgagagccattctgcataatgctgccacccaggggctagctgccgccaatcgagatggacatcctgactttgcggcacacctggcaggcagagttgcgtggatgagccaccaccacccaagtcgagccgctaagctcaaggatctcctggatcgggtaaggtccagcgggccggaagtgagcgtggaaaggcgttcttga

SEQ ID NO: 13025 - RNA, 1257 nt, synthetic construct
  source 1..1257: mol_type = other RNA
atgctgaccgtcgactggcagccagagcgcatgaccgctgtggtcagaacggttgttcgggggagggctaggtgggctcgaaggttggtcgatgctgtcctccgcgcatatccaagagcgcccgctgatcgacctcgtgaactgtgccgcttcctcaccaaccgtggcggtattccccggacacgggtaaggcggagacttatgactcctaccagggtggtgagaatgcgttggggcgcacctcctatcaatgacttagcggagctagctgccttcctgggggtagacggcgatgccttagactggtttgctgataggagggagattaaccggcaggcgagggatgagaagctcagacactttcggtacgcctggttgccgcaccggctgatcgaagccccaaaaccgcggttgagaactatgcagaggaggctcttagatcgaattttgtctcgggtgccagtgcacgactccgtgcacggttttgttcccggccgcggtacacacactttcgcccgagctcacgcaggtcaagccgtgttgataagcctggacctgcgcgcattcttttcgagcatcactgccgcacgaatctacggactcttccggggcattggatatcccgaacccgtcgcgcacgcattaacagcgctgacaaccactcgaacgccagcgcgcgtgcttagagcagctcctgacccccatctggcagccctgctgcgtcaacctcatctcccgcagggagccccaacatctcccgctttggccaatctctgtgcctttaggcttgaccgcagactaagcggactggccggcaggttcggcctaacatacgggagatatgccgatgatctggcattcagtgggaccctggacagtaccggaattgccagacttgtgaccctggccggccagataaccggtgaagaggggtttcgcatccaccctggaaaaacaagagtgcgccggcagtcacagcgccaatcactgacgggcctggtggtcaatgcccatccagcagcttcccgcaaggactacgacactcttagggccatcctccataacgccgccgttcacggccttgccgctgcaaatcgtgataaccatcccgatttcgccgcacacctggccggaagagtagcctggatgagtcatcaccatccctccagagctgcaaagctgcatcagctgctcgctaggactgctggggaccagccaagagggccttcctcagtgagcaacagccggtcttcttga

SEQ ID NO: 13026 - RNA, 1386 nt, synthetic construct
  source 1..1386: mol_type = other RNA
atgactacagctgcgcataggagaagagccagtgcattgcgagccgccagaagacgccacgatcgcgatagctcgggacacgccgcgacttctacatggtacgggccccatagacagcggccatttagggtggcaggcgcactggctgacgcattacttaccaccgattggaggcccgaacagatgacagctgcagtacggtctgtagcagcaggacgggccgtgtgggctgttcgtctggtaaaagccgtgttactcgcatatccccgactgccagccgacaggcctagagagctccggcagttcctcgctaatctgcctcctaccccacgcactacggtgcggcaagccgtgatccgccatcgacttgcggtgccaacccgtgtggtccgcatgaggtggggtgcacctggcataggggacctcgctgaactcgccgcattcctggggttggatgatgatgccctggattggttcgctgacagacgagagattaacagacacgctcgggacgaaaagctcaggcattaccgatacgcgtggaggccacaccggctcatcgaagcccccaaacccaggctgcgcgccttgcaacgtcagttactggaccagattctgtccgccgttcccgttcatgaccatgtccatggctttgtgcctggtcggggaccgcacacatttgcaagagcccacgcaggcaatgccgtcctagtgtcaatggatctcagagcttttttctcatccattacagctgcccgcatatacggcctctttcgtggaattggttatcctgagcccgtcgctcatgcactaaccgcgcttactacgacccggacaccagcccccgtgttaagagacgcgccagatccgtatcttgcagccctgctcaggcaaccccacttgcctcagggagcccctacaagccccgcactggctaatctgtgcgcgtttcgactggaccggaggctgagcggacttgcaggaaggtttgggcttaactatgctcggtacgccgacgacctggctttctccggcaccctgaatacgtccggggtggacaagttcagcactctggccggcaggatcgtccacgaggagggtttcagaatccacccacgtaagacccggatccgcaggcgatcacaacgccaggcactgactggcctggttgtcaacaccctacctgccgcccctcgcgaagactacgatcgcttgagggctatcctgcacgatgccgccactcacgggctagctgaggccaacagagatgggcacccggagttcgccgctcatttggcgggcagagttgcttggatgtctcaccgtcatccgagtcgcgctgccaaactgcaccggctcttggaccaggctcttgccaagccatga

SEQ ID NO: 13027 - RNA, 1377 nt, synthetic construct
  source 1..1377: mol_type = other RNA
atgacaaccgctccccatcgccgtagaacaagtgccctgcgtgcagcaagaagaaggcatgatcgggagtccagcggccatgctgctcctgctgcacaagtcgccggcgctttggctgacgccctactgactaccagctggcagcccgacgatatggtggctgtggtgcgttctgtcgcaggaggacgccctatcagagctcggcgcctggtagaagccgtgcttcaggcgtatccacgagcccctgctgatcggcccagagaactccgcagattccttgccgctctgcctactaaaccccggaccacggtgaggagagctgtcatacgtcacagactggcagtcccaacccaagtcgtccatcttcggtggaacgccccggcattgtccgatctggccgatctggccgatttctttggacttgacggcgacgcactcgattggttcgccgataggcgggaaattaatcgcaaagctaatgaccagaaactgaggcactatcgatacggctggctgcctcatcgactgattgaggcgccaaagccgaggctgcgagcgcttcagagacgattgctggacaggatattgagcgccgttccggttcatgatcgggtacacggctttgttccgggacgggggacccacacttttgcccaactccacgccggagcccccgtattggtgtctatggacctccgggcattctttagctcgatcaccgcagccaggatctatggtctgtttcggggtatcggttaccccgagccagcagcccacgctttaacggcgctgacaaccaccagaacccccgctagagtgcttcgtgcagcacccgatccttacttggcggccctcctacgccgccctcatttaccacagggggctcccacttcccctgctctggcaaacctctgcgccttcagacttgacaggcggctgacagggctggcagataggttcgggctgacatacgcaaggtacgccgatgacctggctttctcaggcactctctcccgaacacggattgaccgcctcgtgacactggccacccagatcgtgcacgaagagggttttaggacccaccctggcaagacgagagtgcgcacttcaagtcagcgccagagtctcacagggctcgttgtgaatgccaacccagccgttccccgggaagactatgaccggctgcgagccattctgcacaacgcggccactcacggcttagccgacgccaatagggacggacaccccgacttcgccgctcatctagcgggcagggtcgcatggatgtctcaggcacacccttcaagggcggccaagttaaacgccctcttggagcgcgctctagggccagaggtgccaagaccaggacgacgctga

SEQ ID NO: 13028 - RNA, 1395 nt, synthetic construct
  source 1..1395: mol_type = other RNA
atgagtactgcggcccacagaagaagggcctctgccctgcgggcagtgagaaggagacacgatagagaatcaagcgggcatgcagccatcagaacttggaaccgtaagagactagctccggccaggagatggtattctcccaggaggcagccatcctcttccgtcgccagcgccttggcagacgcattgctcactacaaactggaggcggccccatatgttgtcagcagttcgggttgtagctcctgcaagagcgcgccgccttgtggacgcagtgctacaagcgtatccacgcgctcctgttgatcgtcctcgcgaattgagcaggttcctggccggatttggcgtccctcgtgctgtgatccgacgtaggctagtggcccccgctagggtcgtgagaatgcgatggaaggctccaaggatagatgatctggctgggcttgctgcatttctcgagctggacggtggcgcgctggattggttcgccgacagacgagagcttaatcgtcaggcgcgagacgagcggttacggcactaccgctacgcatggctgagccatcgcctgatcgaggcccccaaaccacggctcagggccttacagcgacgagtgctggatgagatcctggccactatcccagtgcacgacgctgtacacggctttgttcccggccggggcactcatactttcgctgaacgacatgccggacaagacgtgctgctcaccatggaccttagggcctttttctccagtattacggccgcacgcatttatggtctttttttgggcgctgggtaccctgaaacggttgcacacgcactgaccgccctcacaaccaccagaaccccggctcgcgtcttaagaagcgccccagatccggacttggctgctgtgctccgaaggcctcatttaccccagggagcgcccacatctccagcactcgccaatttgtgcgcctttcggctggaccgccgcttaacagggctggctgaaaggttcggcctgacctatgctcggtacgccgacgacctcgctttcagtgggacagggcctgtggatcggctgacacctctggtggcccacattgcaacagaggagggcttcagagttcgcccagacaaaaccaaggtgcggcatcggagccaacgccagtccctgaccggtctggtcgtaaacgagaggcctgccgtcgctagagccgattacgaccggctccgcgcgattcttcacgatgccgcaacccacggactggatgccgctaaccgtgatggacaccccgacttccttgcccatctcactggtcgcgtagcctgggcttcgcatgatcacccctcacgggcaacgaaactgaggcggctgctcaatcaggtgcagtcctcacacatagtcggaagatga

SEQ ID NO: 13029 - RNA, 1233 nt, synthetic construct
  source 1..1233: mol_type = other RNA
atggttgccggcgctcttgccgatgcattgctgaccaccacctggcagcctgaggaaatggaagccgcagtcaggagtgtggcagctgtgcccgaagcatgggctcgtaggctggtccgcactgtcttaagcgcctatcctcgaaaccccgccgatagacctagggaactgcgccggttcctcacggctcggagagcttacatcaggcaccgactcgtgactccaacccacgctgttcggatgcgctggaatgctccacccatcaatgatttggctgagctggccgcattcctagaactggacggagatgctcttgattggtatgctgacagaagggagattaaccgtcacgctcgagacgagaggctcaggcattaccgctacgcttggcttccccatcgcctgattgaagcgcctaaaccactgctgcgggacttgcagcggcgtttgctcgatgacgtgctggccaccgctccagttcacgaacacgcccacgggtttgtgcccggaaggggtacacacactttcgcccgagttcatgccggccgtgacgtgctggtgtcaatggacttgcgcgcctttttttcctctattacggcggcgcggatatatgggctgtttcgcggtatcggctatcctgagccggtggcccacgccttaactgcccttaccactacacggacgcccgcacacgtcttgagagccgcaccagaccctcacctcgcagctctgcttagaaggccccatctccctcaaggcgccccaacatccccagccttagcaaacctgtgcgcttacagactggatcggaggttaacaggcctcgcagaccgattcggtctaacttatgccagatacgccgacgatctggccttttccggaacccttacacacgcccaagtggagcgcctggttgcgctgactaccagcatagcagccgaggaggggttcagggtgcatccccataagacacgctttagaacccaggcccagagacagagtgtaaccggcctggtcgtaaacgatcgccccgctgtaccgcgggaggagtacgataggctccgggcaatcctgcacaatgcggctacacatgggctcgcagaagcgaatagagacgggcatgctgatttcgccgcacacctaacaggaagagtcgcgtggatgtctcatcatcacccgagccgggccgctaagttgcaggacctccttgtgcgagcactgtcagccccttga

SEQ ID NO: 13030 - RNA, 1281 nt, synthetic construct
  source 1..1281: mol_type = other RNA
atggccaccgccctggcagatgcccttctgacaacgtcttggaggagaaaggctatgatcggtgcgggaagggcattattgggcaggccgactagatgggttccccgcgttgtcgacgccgttgctgcagcttatagagatgcccctgcagaccgacctcgcgagttggctcgctttgtggccgagattattcgcacaactcccggtgcgaggaggcagtccagacggacagtaatcagacatcgccttgttgcccctacccggactgtccggatgcgatggaaaaccccccgcatcgacgacctagctgctctcgccgacttcctggctgtcgacggcgatctcctcgattggttcgctgaccgaagagaaattaaccggcatgcccgggacgaaccactcaggcactatcgctatcagtggctgccacaccggctcatcgaggctccaaaaccgcgcctccgggcaattcagcgacgtctactggaccacgtgctggcggcaattccagtgcatgagcgagcccatggtttcgtggccgggagaggcgtccacacgtttgctggatcacacgccggacgtgcggtgctggtgagcatggatctccgcgccttctttagctcaatcactgctccccgggtgtacgcgatgtttaggcaagccggataccctgaacccgtggcacacgctctgaccgctcttaccaccacccgcaccccagccagggtattacgaggggctcccgacacaacaagggctgccatgttgagacagccccacctgcctcaaggagcacctaccagcccagcactggccaatctttgcgccttccgcctggatagacgactgactggactcgcggaccggttcggtctgcactacagtaggtacgcggatgatctcgctttctccggaacactaggcgaacggaggactctggacttgataagttatgtgaggggcatagcagcagaggaggggtttcgggcccatcctgataagaccagagtacggcggagagccgaccgtcagcttttggccgggctggtggtcaactctagacccgccgtgcctagggaagagtacgatggcctgcgtgctatcctgcataatgccgggagacatggcttggccgcggcaaacagggatgggcacccagattttgccgctcacttagccggccgtgttgcatggatggcccaccagcatcccgctagagcagcaaagctgcacaatctgcttcgcgccgcattaacagccccgacgactgcaggctcctga

SEQ ID NO: 13031 - RNA, 1182 nt, synthetic construct
  source 1..1182: mol_type = other RNA
atggtgttcggacgcagggcaagatgggtccgtcctgctgttgacgcggtgctcagggcttatcgcgaagcaccaggtgatcgacctagagagctggccggctttctggctgcatccgggagactgggggctcacaggactgtggtgcgacaccgtcttgttgccccgacgcgcaccacaagaatgcggtggccagcaccggcaatcgatgacctgggcgcactggccgatttccttagcctggatggggacatgatggactggttcgcagaccgacgcgaaatcaacagatacgcaagggacgaacggctccgccattataggtacacatggctgccccatcgacttatcgaggcccccaagcctatgctgcgcgatctgcagaggcgcctgttagccgaggtactcgctggaatgcccgttcacgagcgggtgcacggctttgtgcctggacgaggcgtacatacatttgcagcgtcccacaccggccaggaagtcctggtatctctcgacttgcgggccttcttcagtagtattacagcagctcgtgtgtacgccgtgtttaggcaagccggatatccagagcccgtggcccataccttgacagcactgaccaccactcgcactccagcccatgtccttagagacgccccagacgctactcgtgccgccttgctaagacggccgcaccttcctcaaggcgcccctacatctccagccctcgctaatttgtgcgccttccgccttgatagaagactcaccgggctggccgacaggtttgggctacactacagcagatacgcagacgatctcgcgttctcaggtacggtaggagatcggcgcgtcggcgacctgatatcatacgtgcgggcgattgtgaccgaggaaggtttccggacccaccccggaaagactcgtgttcgacggcagggggatcggcagctgttagctggcctagtcgtcaacgcgaggcccgctgtggctagggaggattatgatcggctccgagccgttctgcacaacgccggaagacacgggttggctgcagcaaatcgcgagggccatcctgactttgctgcgcatctcgctggtagggtcgcctggatggcccacaggcatcccactagagccgccaaattacacagcttgctgcggtccgctgtggctgccgataggcagtga

SEQ ID NO: 13032 - RNA, 1329 nt, synthetic construct
  source 1..1329: mol_type = other RNA
atgactactgcggcccacaggcggaggttagctgctctcagagctcggacccggcgccatgaccgagttagctccggtcatgccgctgccgctgcaccaagagtggcaacagcactggccgatgcctttctgtcgacgcggtggcggcgaaaagccatggtgaaagccggagctgcagtactagggagagagagaaggtgggtggatcgagcagttgtaaaggtcctgagagcttatcggatcgccccagccgataggccaagggagctagcgggctttctggaaggcattacccggccggccgtgatacgtagaagacgcgttactcctgtgcaggtggtaaggatgcggtggcacgcaccccctattaatgatttaggagaactggctgccttccttgatgtcgatggggaccttctcgattggttcgccgatcgcagggagatcaatcgccatgcccgggatgaacgtctgagacactacagataccgctggcttccccaccgcctcattgaggccccaaagccccacttgctggccctccagcgacgtctgctggacgaagttcttgcccgtgtacccgtgcacgagcgagcccatggcttcgtgcctggcagaggcgtgcatacattcgctgcttcccatgcagggcaagcggtggtcgttcgcctggacctgagggctttttttagtaccgtcacagccgccaggatctatggtatctttcggagcgcaggatatcccgagcctgtcgcccatgccctgactgctttgacaacaacccgcacccccgcaagggtgctgagagatgcgccagaccctcgcctcgctgctttgttgcggcgacctcacttaccacaaggcgcaccaacctccccggcattggccaacctctgcgctttccgcttggacaggcgacttacgggcctcgctgggaggttcggcctgcattattctagatacgccgacgacttagccttctctggaccggaccatccccataacctgatcccctacgtgcactcaattgctgtcgacgaaggtttcgagataaaccctgccaagacacgagtgcgcgggcaagctgatcggcagctcctagccggtctggttgtcaattctagtcccgcagtccctcgcgaggactacgatcggcttcgggcgaccctgcacaatgcggctactcacggactcgcagaggccaacagggacgggcacgcagactttgcagcacagctggccggaagagtggcttgggtgagccacagacacccagcacgtgccaggaaactccaggaactgctttcagcggccctggcgaagccttga

SEQ ID NO: 13033 - RNA, 1284 nt, synthetic construct
  source 1..1284: mol_type = other RNA
atgtccgccgcactggcagatgccctgttaacgtctcgctggaggcctgggccccttcaacggactggaaccgccgttcttggaggcagacccccctggttgcgtattgcagtcgtcgctgttctgcgggcttacagacacgcaccggctgataggccccgggaattagcggcgttcctctcttgcctggagcggtcaggtagaccattggtgcgccggcatcccatcaggctaagacgagcgacgcctgtgagaatcgtccggatgaggtgggacactccacgcatcgacgatctagccgccctggccgatttcctgggtgtggatggggatcatctggactggtatgctgatcggcgacatctgaatagacacgcgcgggacgaacggcttcgccactacagatacgcatggctgccacataggttgatagaagccccgaagccacggttgagagccttgcagcgtcgtctcctcgacgacctcttaggccgcctacctgtgcaccctcacgctcacggctttgtgcctgggcgcggagtgcatacatttgccgcaccacacgctggccagaaacttgtgattggtctggacctcacagcattcttcagtagcattactgctgcacgcatccatggcctctttcgcaccgccggctatcccgaaccagttgcgcataccctgaccgccctgacaacaactgccactccagcagccgtactgagaggacgtaccgacccacatcgcgctgccctgctgagacgtccacatcttccccagggtgctccgaccagtcctgctctcgcaaacctggtggcgtaccgacttgaccgaaggctaaccgggctcgccgataggttcgggcttcactatacccgctacgctgacgacttggctttcagcggaactctgggcagaggagagcctgcccacctgatcgccgctgtgcacacaatagccgccgatgagggctttcgagtgcacccccgaaagaccagggtccgcggtagaggcgatagacagcggctggccgggttagttgtcaacgagaggcccgccgcctcacgtgaggactacgatcggctccgggccgtactccatgatgccgcaaggaggggacctctggtggcaaatcgagagggccacgacgactttcccgcttatctgagggggagggtagcgtgggtttcccatcgccaccctgccagagcagcaaaactgcacaggatgctcgcagtcgccttggctggacctgctgctccacccacggtgacaacaccgtga

SEQ ID NO: 13034 - RNA, 1344 nt, synthetic construct
  source 1..1344: mol_type = other RNA
atgttttgccctcctggaacaggaggcagcctcgatagatcactcacatttgccgggcatgccaacttgggcgcggtgagacaggcagtgaacagtgccctagctgaggcgtttcttgcctgtggctggcgtgatgggcccgcaagacctgctctggacagactgacccgcgccggtgctgaggttcttggaggtcggccatggtggctgaggccgttggctgcagaggttcttcgggcccacaggaacccaccattagatcggccccgcgagctggccgcttttttaggccggagggtggctggttcccgtccaattatggtcaggcgcgcagtcccagttcgcactgtccggatgcggtggccgactcctaggatcgatgacctggctgcgttggccgacttcctggggctcaccggtgaagaactggattggttcgccgaccgccgagaaattaatcgccacgcgagagcagagcagctgaggcattaccgctacagatggctgccacaccggcttatcgaagcccccaaacccagactgcgcgcccttcacaggcggcttctcgacgatctgctgggacggttgcctgtgcatgacgccgcccatgggtttgtgcccgggagatctgtgcatacgttcgcagcacctcatgccggccgggctttggtgatcagggctgatctcgccaccttcttctcttcaataactgcaccccgtatctttggcctgttccgcacagccggctatccggagcctgttgcccacgctcttacgggactcacaactacgaggacccccgctgcagtattaagggggcacgggtacgataccgctcgtatgctccggcagccacatctacctcaaggagcccctacatcccccgcactggctaacctcgtagcattcagattagatcgcagactggcaggcctggctgcacgattcgacttgacttatactcgatacgcggacgatctagcgttttcgggcccccggaccgatccaaggaggtttctcgacgctctcagaacagtggtcgccgacgagggcttccgactgcatccagccaagaccagggttcgaggacgcgccgatcgacaaagcctggccggactggtcgtgaatgaacaccccgctgtgccaagaactgactatgaccgcctccgtgctatattacacgacgctgccagacacggtttggccaccgccaatagagacggccaccccgacttcgcggcctatctgaccgggagggtagcgtggattgcacaccatcacccgacacgagcagccaagctacaccggatgctggcagccgctctgaatcctcccccaccttga

SEQ ID NO: 13035 - RNA, 1182 nt, synthetic construct
  source 1..1182: mol_type = other RNA
atggttgtggcaggtttggtgcgggctggcgccgaagtacttggtgcacgaccatggtggctaagaccggtcgtggcgcgggtattgcgcgcttatccccatccgcccctcgatcgtcctagggaactagcggcctttctggacagacgcgtgcagccccacccagttgttgttcggagggccgctcctgctagggtagtgcgaatgcgttgggatacccctcagctgaacgatttgggggccctcgcagattttctcgaggtgtctggcgacgagttggactggttcgctgaccgcaaagaaataaataggcatgcccgcgacgagagactgagacactaccgctacgtctggctgccacaccggcttatcgaggcaccaaagccaaggctacgggcgctgcaacgtagactgctcgatgagctgctggggaggatccctgttcatcccgcagctcacggattcgtcccaggaagatctgtgcatacctacgccgccccccatgcaggacagcgaatggtcgtgcgtgccgatttggctgcctttttctccagcattacagcacagcgcagctacggactgtttcgcctggccggctatccagagcctgtcgcacacgcccttaccgcacttactaccactagaaccccgattgatgtgttgcggggcagacccggctcaactaggacactcctgagagagggacatctcccacaaggcgcaccctgcagtcctgctctggcgaatctggtcgccttccgactggacaggcggcttacaggtttagctgcccgcttcgggctgacgtatacgcggtacgccgacgacctcgctttttccggccctagggccctcaatttagacgcgctcgctgctgtggtgaaggatgaagggtttagactccaccctgccaaaacaaggatcagaggtcggggggatcagcagcgccttgcaggactggtggtgaacgaacatcccgccgttccccgcggggaatatgaccacctgcgagctattttgcacgacgccgccaggagaggcttagaggctgctaacagagagggcaaagcggacttccgggcctaccttatgggacgggtcgcctgggtaagtcaccgtcaccctggccgagccgcaaagctggataggttactgaaggacgcactgaggcggggggattga

SEQ ID NO: 13036 - RNA, 1182 nt, synthetic construct
  source 1..1182: mol_type = other RNA
atgctcggcagactggtgcgggctggaggtgaagtcctaggaggacgaccttggtggctccggcctgtagtagcaggggtgctgagagcctatcgggacgctcccgctgacaggccaagggaactggctggctttctgagtggccgcgtgcagtcacaccccgttgtggtacggcgcgcagttcctgtgcgcgtagttaggatgcggtgggatacacctagaattgacgacttgggcgtgctggccggattcctaggtttagcgggggatgagttggattggttcgccgacagaaaggagatcaaccgccacgcacgcgatcagcggcttagacactatcgttaccgctggctgcctcatcgtctgattgaagcccctaagccgagactgcgagccgttcagcgcagactcctggatggcgtgctcggaaggatccccgtgcaccctgcagcccatgggttcgttccaggccgtggtgtccatacctttgctgtgccacactccgggcagcccatggtggttagggtggacctcgcaagcttcttttccagcgtcacagccccccggatatacggactctttaggaccgctggatatccagagcccgtggcccatgcattaacagctctgaccacaacgaggacccctgcggatatcttgggaggcaaataccttcccctgctccgacacgcccaccttccacaaggcgctccgtcgagtcccgcgcttgctaacctggtcgcctatagattggatcggcgcctgtctggcttagcagcccgttttgggatgacttatactcgatacgctgatgatctcgccttctcagggcccagggtatctgcgccaaggctcctggccgctttagaggcagtggtcaaggatgaagggttccagctccgacacgcaaaaacccgggtcagaggccagggtgacaggcaagttttggcggggttggtggtgaatgagcgcccagcagtggcccgtgtcgaatacgacagactgcgcgccgtccttcatgacgctgccagacgaggactggacgaggccaatagggacggccacgccgattttagcgcttacctgaaggggtgggtcgcctgggtgtcccatagacatccgggcagggctgcaaaacttgaccggctgctagcagccactctgggtgaggaccgggcttga

SEQ ID NO: 13037 - RNA, 1383 nt, synthetic construct
  source 1..1383: mol_type = other RNA
atgtccacagctgcccaccgtaggcgggcttcagctctcagggctggtcggagacgtcacgacggtgccagttctggccacgctgctactcgccggcaagctccaaggagagtggcctctgccctggccgacgcattcctgactgtggcgtggcgacgggctgagctcttagccgtgggacgcaccgtccttgctgctcgaccgagatggctgggcccagtagtgactgccgtcctgcgagcttatcgcgacccgcctgtcgatcgtcccagggaactagcggcctttgtggccggagccactggaccagcaggccaaagggttggagcggcggttgtgagggaacggaggatggttcccacccgcacacagcggatgaggtggggtacgccagctatagacgacctggccgccttggccgattttctcgacctggatggggatcatcttgactggtttgccgacagaagggagctgaaccgccacgcccgtgacgaaagactccgccattatcgctatacctggctcccccacagactgatcgaggcaccgaagcctagattgcgagccgtccagcggcacctcttggataccgtggtaggcctgcttcctgtgcacggaagcgttcatggctttgtccctggcagaggcgtgcacacttttgccgccgcccatgccggaaaacccacggttgtgcggctagacctccgggcattcttcaccactgtgacagcagggcgggtgtacggcgtctttcgaaccgctgggtaccctgagcctgtggcacacaccctgacagccctgactacgaccaggaccccagccgcagtgctgagaacagcccctgatagagccgcagcaggtgcacgagctgctctgctgagacagccacaccttcctcaaggtgcacccacatcccccgcgctggctaatctgtgcgcctacaggcttgatagacgattagccggtctagccgttcggttcggggtgggatacactcggtacgcggacgatctggcattcagcggagacttgactgccagacaggctggccatctggtgacacacgtgacagcggtagccacagctgaggggttcgggaccaatccagctaaaaccagagtcaggggccgcgcagataggcagcagttagccgggttagtcgtaaacgcagcaccagccgttcctcgcgcggaatatgacctgctccgcgccattttgcatgatgctgcccgtaacggccttgcagccgccaatcgcgatgggcatcccgacttcgcagctcacctcgcgggtagggtggcttgggtcggacataggcatcccgctcgggcagcaaagttgcgccgactcctggctgatgtaggcgcaccccggacctga

SEQ ID NO: 13038 - RNA, 1224 nt, synthetic construct
  source 1..1224: mol_type = other RNA
atgttgtggcagaggagcgagcttttggctgtaggacacaccgtgttgggtgcaagaccacggtggctcggacccgttgttaccgccgttctccgggcttaccgtcaaccgccagctgatcgaccacgggagcttgcggcctttgtagccgctgtgactgggcccgccggaacaagagtccaggcagcagtgatccgcgaaaggcgttttgtggccaccagagttggcaggatgcgctgggcaactcccgccgtagatgatctaggcgctctggccgattttctcgacgtggatggggataggctggattggttcgcggatcggcgcgagctgaataggcatgcccgggatcaacagcttcgacactatcggtatctatggcggcctcataggctgatcgaagcacctaaaccccgcttgcgagcattacagcggcacctcctggacacgatcgtggggctgctgcccgtgcacgaatctgttcacggcttcgtggctggcaggggggtgcatacatttgccgctgcccatgccgggaaacctaccgtgctccgcctggacttgagagcattcttcacaagtgtgactgccgcacgtgtgtatggcctcctgaggaccgctgggtatccagagccagtggctcatgccttgacggcattaaccacaactagaacaccagtggacattctgcgcgacgctccgaatagggctcatgctgccctcctgcgacaacctcaccttccccagggagcgcctacatctcctgcgcttgccaatctctgcacgtttcgtttagatcgcaggttagcaggactggccggcagattcggtgccgactacaccagatacgccgacgacctagcgttctccggggatctcggtggcagacaggctcagcacctgatcacacaggtcactgccatagccaccgccgagggctttggcgtcaacactgccaagaccagagtccgcggacaagcggatcagcagcggcttgctggactggtcgtcaacgctgctccggctgtccccagagccgaatacgacaggctgcgagcaatactgcacgacgctgcacagcacggaattgacgccgccaacagagacggccatcctgacttcgccgctcatctggccggtcggattgcatgggtagcccaccgacaccctactcgcgcaagcaagctgcagcggttgctgtcagcagcggttcccgcaccatga

SEQ ID NO: 13039 - RNA, 987 nt, synthetic construct
  source 1..987: mol_type = other RNA
atgagatgggataccccgcggatagacgacctagccgcccttgccggctttctggggttcgacgcagacgaactggactggtacgccgaccgaaaggaattaaaccggcacgcgcgtgatgagaggttgcgccattatcgatatacctggttggggcgccgcctgatagaggcaccaaaaccaagattacgggcagttcagaggcgtcttctggatgatgtgttgggaaggctacccgtgcacccagccgctcacggattcgtgccaggacgcggacctcacacatttgctgctgctcatgcagggcagcctgtcgtggttcggctcgatctggctgccttctttagcaccattacagccggccgagtctacggcctgttgcgaacagcaggctatccggagcctgtggctcatacactgacagccctggtcaccacgaggactcctgcagccgtgctcaggaacgccccagattggcgtactgccgccctccttagacacccccacttacctcaaggagcccccacgtcaccagctctcgcgaacctgctcgcttacaggctggatagacggctcagcggcctggcagcgagatttgacgctacctacacaaggtacgcagacgacctcgcgttctctggccccctcactggtggcgtagctggtaggctggttgccgcagccactaccgtagtcgccgccgaaggtttcagggtccatcctgggaaaacccgcattagaggccgcgcagacaggcagcttctgactgggctggtggtgaatgatcgccccgcggtaccccgagctgagtatgatcacttgcgggccgtgttgcatgacgcagcgcggaatggacttgcagccgccgatcgcgatggtagagccgactttgctgcttacctgcgggggagagtggcttgggttgcacacgcccatccctccagagctgctaagctgcaccggctgctagccgcagccttgagttga

SEQ ID NO: 13040 - RNA, 1317 nt, synthetic construct
  source 1..1317: mol_type = other RNA
atgagcactgctgctcataggcgtcgcgcatccgcgctgagggcaacattacgtcgccacgatcgagactccagcggccatgctgctcgggctgtagctggagccctggctgatgcttttctgaccgtggattgggcacgcggaccccttttggaggtgggcagggaggtactgggacgcagaccacggtggttggggcctgttgttaccgctgtgctgagggcctatagagaggcccctgcggacagaccacgggaacttgccgaactgataagcgcgcctggtcggcagccaattcgggtgaggcgtgcaacggccactcgcactgttcggcaacggtgggactctccgagagtggacgacttggccgcccttgccgagtttctcgcagtgacgcctgatgaactggactggtttgccgaccggaggggactcaataggagacatcccgatcctcgcgtaagacactatgcctacacgtggattggggatcggctcattgaagcccccaagtctcgcctgaaggctctccagaggagagtgctggacgaactcctaggaccccttcccgtccacccgttcgcccatggattcgttccggggagatctgtccatacattcgctgcgccacacgccggacaggtcactgtggtcaggatcgacctgcgcggctacttttccagtgtgaccgccgggagagtgtacggcttatggcgaaccgccggatatcctgagcctgtcgcgcacgccctaaccgcactctgcacaaccgctacaccacacgccgtctcaagaagagtcgagcaccgtacccctcacttaccccaaggcgcgcccacatcacccgctttagcaaatctggtgacttttcgactggatcgacggctggcgggtttagccgccagattcggtgccacctacagtcgatacgctgacgacctggcgttctcgggccctcttcgacaaccagctcgcctggtggccgcagtaacagccgttgccgctgaggagggtttccgggtgaacccagccaaaaccagggttcgggggcgtggtgaccaacagaggctggctgggttggtggtcaacgatcggcccgcagtgcccagagcagactatgatagattacgcgcagtgctccaccatgccgcacgcgatggcttagatgccgcaaatagggacggccacccggattttgctgctcacctcacaggcctagtcgcatgggccgcacatgggcatccaactcgtgccgcacgattacacgggttgctccgcgccgcaggcatcaacaggaggactgctacacctccatga

SEQ ID NO: 13041 - RNA, 1062 nt, synthetic construct
  source 1..1062: mol_type = other RNA
atggagttggccgaattcatcgccgctcaccttcctgctaggctgccagttcgaatagtagtcagacgggctgtccccacccggacagtaaggatgaggtgggatactcctgttcttgacgacctcgcggccctggccgaactactcgaactcgatggcgatcgattggactggcttgccgaccgtagggagatgaaccgcaagactctgcgcgaacccctgcggcactatagatacacctggatgggacgcaggctgatcgaggcaccaaaacccttgctgcgaggacttcagagacggttactggacgaagtgctggggcgcattcccgtacacccagcagcacatgggttcgtgccgggacggtccgtccatacatttgccgcccctcataccggaagggacgtggtggttcgtatcgacctcgcccatttctttgcctctattagcgtgcagagagtctacggcctctttagatctgtcgggtatcccgagccggtcgctcatgctttagcggccctgtgtacgacaagcaccccaagtgacatcgctaggggtagtatcgctcttcgcaccccccacttaccacaaggcgcccctacttcccctgcactagctaatctgtgcaccttcaggctggatagacggctaacgggcctggccctctcctttggtgcgacatacacacgatatgctgacgatctcgcattctcaggctcattcaacgcagaccacgtgatagccgcggtgcgccaaattgtggctggggaggggtttcgcgtgaacccagcaaagactagagtgcgggggcgaggcgatcgtcagagattggcaggcctggtggtgaatgagcgtcccggtgtcgctcgcgaagagtacgaccgccttagggctatcctgcacgcagccgccagagatggactggatgccgcaaatcgggatgatcatccggacttcaggaaccacctgctgggaaggattgcctgggttggtcacggcagccctgccagagctgcgaaattgcgggagctctttggattggttgcagccactggcctctga

SEQ ID NO: 13042 - RNA, 1305 nt, synthetic construct
  source 1..1305: mol_type = other RNA
atgtccacggctcagcacagacgccctgatgcagctcttcgagccggacagggaaggcacgacagagtctcctcaggacacgctgcactggccgatgcattcctggctacacccgcctgggaaagagccgcacttcttggcgccgggtacgaagtgcttggacgtcggccgaggtggttaggcccagttgtgaccgcagtgctgggagcctatcgcgaacctccagctgaccgtcccagggagttagctgcctttgttgccgcactcggccgcgtgccttttcgtgctcgggtagctgttcgtagggcggtaccgaccagggttgtgcggatgagatgggatactccccggttggacgacctcgcagcgttggctgagttcctcgaggttgatggggaccatctcgactggtacgcggaccggagagagatcaacagactagcagcggacggcgccctgcgacactatagatacacttggctggccactcgcctgatcgaggcccctaaaccccgactccggaccctacagcgccgattgctggatgaggtgctgggaaggatccctgtgcatccagcagctcatgggtttgtcccaggcagggacgtacgcacattcaccgctgtgcaccttggcaaaagcacagtggtgcgcctcgatctgagcgcgttcttcgcttcaatgacagttagccgtgtgtacggacttttcagaggtgcaggttatccagaaccggtcgctcacacgttggctgccctgtgcacaacccggactcctccagatgtcgtgcgcgacgcccctagttttttgctcgctgcccagctgaggcagccccatttaccccaaggcgccccctcttcgccagctctagccaatctgattgccttccgcctggataggaggctggccggtttggcagacaggtttggcgcggactactccagatacgcagacgatctcgccttctctggggcctttgacgcaccccgactagtggccgcagctaccgatgtggtagtcgacgagggttttcgggtccatcctatgaagacacggattcgggggcgggcagatcgacagcaacttgccggactggtggtcaacgagcacgcagccgtccccaggaccgaatatgatctcctgcgagccatgctacacaccgccgctagggacgggttagctgctgccaatagagccggccatccagatttccgcgcctatctggctggcagaatagcctgggttgggcgggatcaccccagtagagcggcgaagctggcacgcctctttactgccctgccttga

SEQ ID NO: 13043 - RNA, 933 nt, synthetic construct
  source 1..933: mol_type = other RNA
atggtcaggcggcctacacggcatgagcctcctcgacatcgtccaccaccggcaccccttcctctgccagtggataggggcagacccgccgatagggggacagaagtaccagccgcccgacctgctactcctgcacctcacagaggtcctcgaccacatcccggtccaccagccgcacacggatttgtgccgggacggagcgctcatacctttgccgggatccacacagctcagcccgtggttgtcaggatcgacctgcttgccttttttacacacatacccgctactcgggttcatggcctgttccgcaccgcgggataccctgagtctgtggcgcacaccttgacaggcctatgcacgaatcggaccccacaccccgtactcagacgtgccccaaccgaactaccccacagggccgctcgattagccgctcttagaactggccatctgccacagggcgctcccacttcacccgctctggctaacctgtgtgcatatcgcctggaccggagactgaccggcttagccgacgccttcgcaatcacctactccaggtacgccgacgacctcgccttcagcggagacttgactacgcgccgcatagacgacctgattgccgatgtgacagacatcgcgcgcgatgaaggtttccaggtgcacccggcaaagactcgggtgcgtggcagagctgataggcaactcctcgctgggttggtcgtcaaccagcaccctgcaacgccacgggatgagtatgatcagctgagggccatcctgcacaatgcagccagaaccgggctcgccgctcaaaaccgcacaggacatcccgatttcgcgcagtatctgattgggagagttacctggattagtcaccatcaccctgcacgcgccgcaaaattggcggccctccttgctcatgcattggcggccccctga

SEQ ID NO: 13044 - RNA, 1329 nt, synthetic construct
  source 1..1329: mol_type = other RNA
atgctctggcctgcagtggtgagggttacgggcgtgccccaacaagcacgacgtgaccctcggaggcatcgtcccgacactggcacagcatatcgaccaatcaatagtgcggtccagtcacggggaactccagctgggacacctgtggtgcccaggcagagagatccagctctgcatggttctctgcaccgcgccacaagaactggggataccgatgacggactgcgcagcctgagatgctcccatggaggcgtcagcagggctgaccaagcaggcttaccctgtggtgtcaggagccgaagcttgcgcggcaattctggaaaggaccatagccctcgtcaccacaccaccggggccaagtcaagactgcgagccctgcaacgccggctactggctgaggttcttggacgcataccagtccacttagcagcccacggctttgtgccggggagaagcgctcacacctttgctgccgcccatgcagctcaaccggtggtggtaagaattgatccactaggtttctttactcacattcccgccactcgggtccacgggcttttccgaacggcaggctacccagaacctgttgcccacacactcacgggcttgtgcaccacaagaacaccacatcccgtactgcggcgcgcccctactggtcttccccatagggctactcgcctggcggcactcggaactggacatctcccccaaggggcccccacatctcctgctttggctaacctttgtgcctataggctggatcgcagattgaccgggctcgccgatgccttcgagacaacttacactaggtacgccgacgatcttgccttctccggtaacctgacaacccgccgcatccacacgagatctccgccatcccctacttcacccgctaaacgggcatccgaatcgactcagccacggccagcgtcagtgggagcacctaccggaaactctagtcctgacagcagttctactaccacacccccgcatcacgccacgaacaccacctccagtgccccttccagtacaaccccccctgcgccagcttcaccaccctcaaccggcccaacaacaccgactagcctgcataccagtagcgacgagttttcagaatctgccatcaccacccggcacgcccagcctaattcccccaggtgctggcccaagctgttaagacaccgtcggctcacaaggcggggctctttcgcagggtccagacagggccacgttggcaggcctaaaagagggttgagcaggacatatacctgctcggcggatctgcgacaagcttccacggccacccggctgtgtgacccactcacctga

SEQ ID NO: 13045 - RNA, 1614 nt, synthetic construct
  source 1..1614: mol_type = other RNA
atgccgggcgctgctccattcataggtcgcgggcttactccacggattcatcgtcacgccacctgcattgccgatactcacggcggccctaggtcactgcgttgtagccatggaggggtcagcagagctgatcaagcggccccacctcgaggagtcagatcaaggagtctacgaggcaacccgggcgacgccatcctcacatctgcaccacaccaccggtgtgtaggcacgctgagggagccagtgcacccctacgatcgcgcctctagtggccatgcagctacaccaaccggactgccagtgaacaccattcacgcactcgcgaccgccctggctgatgcattcctcgcaggagccggatggagaaggggcgacctggtcgatcagggtggcttggtactaggcgtgcgccggagatggctttggcccgttgccgatgcagccctggtggcataccttcatccccccacagataggccacgggaattggctacttttctctcgacactggaccctttacgggccgcggttactgcagctaggcagcatcggcgcccaatcgtgattcgagcccgacccgtgacgcctacacgtaccgttcggcggccttggcacacacctgtaatcgacactgtcggcgatctcgccgctatgctcgatctctcaattgagcatctggactggtatgccgatcggagggctatgaatagacgggccccggcccaccgcttacaccattatcataacagatggaccgacagagggcgactgatcgaagcacccaagtcccgcctacgggctttacagcgtcgtctgctggcggaggtccttggacccatcccagtccacccgactgctcacgggtttgtgcctggaaggagcgcacacacattcgccgctactcacgctgcccagcccgttgtggttcggatagacctcctggctttttttactcacatccctgctacccgcgtctatggtctgttccgaaccgcggggtaccctgaaccagtggctcataccttgaccggactctgcacaaccagaacgccccaccccgtgctacggagagctcctaccgacttggcgcatagggctgctcgattggcggctctgagaacggggcatctgcctcaaggtgcccctacttcccccgccttggccaatcgctgcgcatacagactcgacaggagattaacagggcttgcagacgcattcgagatcacctatacccgctatgcagacgatctcgccttttccggtgacctgacgacccgccggatagatgacctgatcgccgcagtgactgatatcgccagaggcgaagggtttcaggtgcatcccgccaaaacacgcgtgagagggcaggccgaccgacagttactcgcgggtctggttgtgaatcaccaccccgccacaccccgtgacgagtacgaccaactgcgcgcaattcttcacaatgccgcgaggacaggcctggcagcacaaaacaggacaggacatccagatttcgcccagtacctgattgggagggtgacctgggtaggacaccaccatcctgccagggctgccaagctggccactctgttggctcaggcccttgcagccccgtga

SEQ ID NO: 13046 - RNA, 1380 nt, synthetic construct
  source 1..1380: mol_type = other RNA
atgacaactgtacgcgctctgacaaccgcactcgctgatgccttcctggctgacggcgactggcacaggccagacctcgttaaccggggtgggcttgtcctaggggttcgacgccggtggttatggcccatagccgatgctgtgctggtggcctacccccatccgccaagagacaggccacgggacttagccgccttccttgcgaccctcgagcctctgagaggggcagtaacagccgcacggcaacacggacgccctattgtgattcgggctaggccagtagctcccatccggaccgtcaggcacccttggcacactccggtgattgacgacatcggtgcccttgctgccatgctggatctcagtatcgagcacctggattggtacgctgatcgcagagctatgaatcggcgggccacagatcagcgcctgcatcactacggatataggtggacgaatcgtggcagactgattgaagctcccaaaccgagattgcgcgccctgcagagacagctgttggctgaggtgctggggccaatcccagtgcacccagcagcccacggcttcgttcctgggagatccgcccatacctttgccgcagcgcatgctggtcagccagtggtggtcaggatagacctactcgcttttttcactcacatacccgcctcacgcgtttacgggctgcttcgaattgccggctatccagagcccgtcgcccatacgctcaccggactgtgcacaacgcgtactccccacaccgttttacgccaggcccctgccgatttgcctcacaggagcgcaagattggcagcactgagagccggacatttacctcagggagcacctactagccccgccttggcaaacctctgtgcgtatagattggatcgacgcctaactggcctcgcagatgcttttgccctgacctacacaagatacgctgacgacctcgctttttctggggatctcacgaaccagaggacctccgatctgacagccgctgtcactactatcgcccgcgacgagggcttcaggatccatcccgataagatccgggtgaggggacaggcggaccaacagctgcttgcaggcctggtggtgaatcaccgtcccgctgcgccgagggacgaatatgaccgtctcagggccattcttcacaacgctgcacgaaccggactggatgcgcagaaccacacaggccatcctgcctttgcggaacatctgacaggccgggtcgcttggatcgcccatcaccatccaacccgagccgccaatcttgcaagactgctagaccaggccctgaatcctcccgatggccggtctacaaccgcgacccgacaagcacccgcacaattggacgtgggtgaagccgcaacttga

SEQ ID NO: 13047 - RNA, 1602 nt, synthetic construct
  source 1..1602: mol_type = other RNA
atggctgccgaggacatcccggttgcagccaatggctcggcttcacgccccgcaactgctgaacgggccgctacaggagtgagactcggctggctggggtgtacggacgggagtgtatccagggctgatcaagctgctccacctggtggagctcgctcccgtagcttgagagggaatccgggagacgccacactgacccaggctccacatcaccgctgtgtcggcaccctgagagagcctgtgcatccccatggtagagcctcctcaggtagagccgcacccattaggtgggcggcagtgaccactgttcacgcactggccacggccctcgctgatgcttttttggctgaagatagttggcgacgtcccgacttggtgcatcggggtggcctagtgttaggcgtcagacgaagatggctgtggcccgtagccgacgccgttttagtggcttaccccaggcctcctcgggatagacctagggagctagccgcctttctcacaaccctcgacccgctgcgagacgccatatcagcggctcgttggcagggacggccaatcgtcatccggactcgcccagttgcggcgaccagaacagttagacgcccatggcacacccccctcatagacgacgtgggcgctttggctgcacttctgcggctgagcgtggagcacctggattggtacgccgaccgaagagcgatgaatcggcgcgccagcgatcagcgtctgcaccattacaggtgccgctggacggacaggggcaggttaatcgaggcccctaagccgcgacttggagcgctgcagaggcgcttgcttgccgaggtgttgggccctattcctgtccatcctgcagcccacggattcgtccccggtaggagtgcacacaccttcgctgccgcacatgcgggacagccagtggtcgtgcgggtggatctgctggccttcttctcctctgtcccagccactcgggtctacgggctctttaggaccgccggtcatcctgaagccgtggctcacgcactaacaggcctgtgcactactcggacaccaagctccgtcctgagacaagctcccagcgatctcccacataggtctgctcggcttgctgccctgcgagcaggacatttgcctcaaggggccccaacaagtcccgctctggccaacctgtgcgcatatcggcttgataggcgattagctggcctcgcggacgcttatggcgcaacttatactcgctatgccgacgatctcgcattctctggggatctctcagccagctctctgatcacagccgtgtctgaaatcgtgcgggatgagggatttcgcattcaccccgataaaaccagagtgcgaggccagggagatcgccagctgcttgcagggctggttgtaaacgggaggcccgcaacccccagagatgactacgaccgtctgcgcgccctcttgcacaatgccgcacggacaggcctcgacgcccagaataggaccgggcaccctgcatttgcagaccacctagccggcagggtagcctggattgggcaccagcacccagcaagagccgcgaagctggcagctctgcttgctgaagcccttgcggcccgttga

SEQ ID NO: 13048 - RNA, 1335 nt, synthetic construct
  source 1..1335: mol_type = other RNA
atgaccagtgccagatccctggctgtagccctggctgatgcgttcctggccgatggtgagtggagacgtccagctttggcagatcggggcggcctggttctgggtgtgaggagacgctggcttgtgccagtggccgatgccgttctgactgcttaccctaggaggccctccgaccgcccaagagagttggcagctttcgtagccggactggagcctctccgtgaagccgttcggcgtcccatactgatctcatcccgacaggttgtcgccactcggacgattactcaccgctggcatacccccgtgctcgaccatctcggagacttggccgcccagctcgggcttagcatagagcacctagactggtacgccgaccgcagagctatgaaccggcgagcggcggatccccgattacaccattaccgatataggtgggcaggcacccggctgattgaggcaccgaagcccagactgagggacttacagaggcgcctacttacggacgtatttggaagaatacctgtgcacgatgcagctcacggatttgtacctagccggagcgcatctacatttgcaactgctcacagtggccagcctatcgttgtgcgggtcgatctgcttgccttcttcgcgactgtgacagctgcccgcgtgtatgggctactccgaaccgcaggctatcctgagccggtggcgcatgcattaaccggcatctgtaccatccgaacccctgccaacgtgttgcgtatggccccaccccatctgattgaacggcccgcccgaattgcggctttgagggctggccatcttcctcaaggggcccctacatctcccgtgctcgccaacctctgcgctttcaggttggatcgcagactcacagggctggcaggggcatttggggtgtcctacagaagatacgctgatgatctcgcctttagcggaggcatctctgggcagaggctggatgacctgctggttgctgtcgctgacgtggtcagggatgagggcttccgggtccaccccacaaaaactcgcattcgcggacgcggtgacaggcagttgctggctggacttgtggtcaacgaaagaccggccgtgccccgcgacgaatatgacaggctcagggctatcctgcataatgcagcacggaccgggctggccgcgcaaaatagaggtggacacccagcctttgccgaacacctagccggccgtgtcgcttgggtcggtagagcatcaccacaccgggccgcaaagctggcatcgctgttagacgccgcgcttgccacagctgccaatccagcccatccacaccagcgggacatcgtggacatgtga

SEQ ID NO: 13049 - RNA, 1308 nt, synthetic construct
  source 1..1308: mol_type = other RNA
atgacagacgccagaggccttgcggtagctctcgcggatgcattcctcgctgatggcgaatggcgcaggcctgctctggctgataggggtggacaggtcctcggcgtaagacgccggtggttggttcccgttgcagacgccgtagtgaccgcataccctaggcgcccaagtgaccgtccccgagagttagctgcctttgtgtctggtcttggccccttgcgggaggctgttagaagggccgcgacaccaattgtggtccggtcccggcctgtagtagccactcgaaccgtcagtcaccgttggtcgacgcctgtcgtagacgacctcgggggactagcagccgtgcttgggttgaccatcgagcagctggattggtatgccgaccgcagactgctaaatcgaagggccgccgacgatcggctgaggcattacagatcacgctgggtggggggccgactgattgaggcaccgaagcccaggttaagagccctgcagcggcggttgttaacggaagtgctgggccccgttccagtgcatggagcagcccacggattcgttccggcacggtcagcagccacatttgctgctgcccatgccggcaggccagtagtggtgagggtcgatctcctcgctttctttgcgactatcggcgctggtagagtctatggcctgttgcgaaccgccggatacccagaacctgtagcacacgcactgaccggcctctgcactattcgaacaccagcctccgtattgagactcgccccccatgacctcgtcgatagaccggtgaggctggccgccctaagagctggtcaccttcctcaaggggcccccacaagcccagcccttgcaaacctgtgtgctttcagactcgataggaggcttagcgggctggctggcgcctttggactgacctatgggagatatgctgacgacctggccttctccggtgaattacccggacggcgcctggatgaccttctggtcgcagttgcggaagtggtgcgggctgagggattccgtgtccaccctgctaagactcgcgtgcgtcgtaggggagatcgccaggttctggcagggctggtcgtaaacgagcggcccctggtaccccgggaggaatacgatcgcctgagagctatcttgcataatgccgccctgaccggtctagccgcgcagaatcgaacagggcaccctgcctttgcagagcacctcgcaggcaggatagcgtgggttgggcaaggctctcctcaccgcgctgctaaactggccgccttactcgacgcagcgctgagcactgacccacgctga

SEQ ID NO: 13050 - RNA, 1320 nt, synthetic construct
  source 1..1320: mol_type = other RNA
atgactaccgtcggcagtttggccgttgccctggcagacgcctttcttgcagccgatcgctggctccgaggggatctcgttgcgtccggtggcagggtcttaggcgttcgacggagatggctgtggcccgtagctgatgcagccctcgcagcatatccacgagctccccgcgataggcctcgagaactggccgctttcctcgcaaatctggcacttcttgctgaggtggtgggggccgctaggcagagaggacacacagtcgccgttcgagccagacccgtcacacctacccggaccgtgcgcagaccatggtctaccccggtcctggatgacctggcagacctcgccaggctgctagacgtgacccccgaccagctggattggtacgcagaccggcgtgcaatgaaccgcagggccgatgaccagaggctgcaccactataggtaccgctggaccgtggctggtcggctgatcgaagccccaaagccacgcttatgcgcccttcaccggcgcttgcttgcagaggtgctgggacccttacctgtccacccagctgcacacggctttgtacctgggagaagcgcacacacatttgctgctgcgcatgctgggagggcagtcgtagtcaggattgatctcgccgcattcttcggttccgtgcccgcacggcgtgtatacggcctttttcggactgctggctacccggaacccgtggctcatactctgacggccatctgtacaactagaacacctgcagccgtgttgcgggctgctccagttgacctcccggacagagtctggagactcgctgcgcttagagggggccacttgcctcagggagcgccaacaagccccgccttagccaacctgtgcgcatttaggctcgatcgtcggctgaccggactagctgccgccttcgacgtggactatcagaggtacgcggacgatctggctttctctggagagttgcctccccgacgcgtcgcagatttgttggccgcggtgacagaggtggtacgggacgaaggattccgagtgcacacgcgcaagactagagtgcgtggacgtgccgaccggcaactattggccggcctggttgtgaacgagaggccagccgtgccaagagtggagtatgatagactgcgggctatactccataatgctgcccgcaccggcttggccgcccaaaatcacgctgggcatcccgcctttgcggaacatctagctgggcgcgtggcctgggttggtcatacgcatcctggcagggccgcaaaactcgctgccctattagccgccgcgcttgcgtcacctcagacttga

SEQ ID NO: 13051 - RNA, 1377 nt, synthetic construct
  source 1..1377: mol_type = other RNA
atgctgtcaggggtagggggcgaggaacctccaggtcgacctggagagagggttgccgccgcactagccgatgcctttttggctggcgattggggcagagatggcctactggggagaggcgctcttgttgtgggggtgcgtgcacggtggttgagacgcgttgcggccgaagtgctgggagcgtaccccagagtcccagccgataggcctagagagctggcaggcttcgtggccgcaagcccagtgtatagagcggcatggcattctgctagacgcagaggtcggcggcttagagttagggcccgccctgtcacagcaactagaactgtccggaggccgtggccaacaccagtagtggacgatctcgccgctttagccgccctcctgggtctgacgcccgaagaactggactggtacgcagaccggcggtccattaatcggcatgcgcgtgatgagcgactgcgccactaccggtatacctggctcggcggccgcttaatcgaagcccctaaacccagactccgcgccctgcagcgaagattgctcgcggaagtgcttggtcccgtgcccgtacacccagctgtccatgggttcgtgtctggtcgcagcgcccacacattcgcagccgctcatgctggtcgcccgactgtcgttcgggtcgacctggtgagtttttttgcaactgtgagcgccccgcgcattttcggcttgctgcgtctcgccggctatcctgagccagtcgcgcacacgctcaccgctctgtgtgtgaccaggaccccagccggagttcttcgagcagctcccgctgggttaccggataggccctaccggttggccctgctgagaggaccccaccttcctcaaggtgcccccacctcaccagcccttgccaatctctgcggctttcggcttgacaggcgcttggctgggttggccgctgctttcggggcaacctacacaaggtacgccgacgatctggctttcagtggagacttacctccacgaagggccgccgccttggtcgatagggtcacagctgtggtggcgggtgagggctttagggtgaggcccgacaagactaggatccgaggaagagcggaccggcagctgctagccggtttagtggttaacacagcccccggggtgccaagggacgagtatgaccgactccgcgcactgctccataacgctgcacggaccggactggccgctcaaaaccgtgccggacaccccgatttcgaggctcacctcgcgggtagaatagggtgggtaggacgtgaccgtcctgcacgcgctgctaagctgagggccctgtttgaggctgcacgactgcggcctgacgatggatcccctggtgcacacgcagcagctccctga

SEQ ID NO: 13052 - RNA, 1233 nt, synthetic construct
  source 1..1233: mol_type = other RNA
atgttagggtacgccccgcagtggaccgatggagtggtagacgaggtgctcacctatccccgaccacccgctgatcgtccacgcgaactggccagattcatcgcacggctcagagcctttcgaagtcacgttgccggagcacctggggccagtcctgaagcagctccggtgagagtggtccaccgggttgtgactccaaccgtgacagtcaggcagccattccacacgccaaggttggacagcgtggcagatgtcgcagattggctgggtctgtctattgtggagctcgagtggtttgcagacgtgcgggagattaatcgccaggctactgaccggaggctgcggcattacacctataggtggctgaatggcagactgattgaagcgcctaagccgagactcagaagcctgcaacggaaagtcctggacgagcttctgggccccatccctgttcaccccgccgtacatggtttcgtcagcggccgctcacctcataccttcgcggcacctcacgctgggcagcgaatggtcatcagactggatgtaatgtctttctttgcctcggtcacagctgcccgggtatacgggctgttacgtgctgcgggcttccctgaacccgtggcacacgttttgaccggcctgtgtactacaaggaccccacccgatgttttgcgtcgagcccccgccagagtgccaaatagggacctccgactggccctattgagggccccacatttaccgcaaggggctcccacgagccctgccttagctaatttgtgcggatttagattagaccggcgcctcgctggattggcccaatccaacggattgcgctacaccaggtatgctgacgacctggccttctccggcttcacttcccagccccagaggtttattgacatagttcggtcaatcgtcgcggacgagggatttcgcctaaacgaggcgaagacaagacttaggggggccgctgataggcagctgctagctgggcttgtggtgaacgccgcacctgccgcacccagagatgaatatgatgccctccgggctctgcttcacaacgccatctacacaggcctggacgaacagaaccgcgatggtcatcccgattttgtggcacacctcgccggccgtatagcatgggtgggtcatcgacaccctacacgcgccgctaaactccatgcacttttccagcgcgctctttctggcccaccacctgaggcgactgcctga

SEQ ID NO: 13053 - RNA, 1341 nt, synthetic construct
  source 1..1341: mol_type = other RNA
atgactcgtggacggaccctagctgtggacgctgccgatgccttagcaggcgccttcttggccggagaatgggacccacctgcaatggccaggcgtgctcagcgcgctttaggagatagacgggggtggactctggagctggcgagagtggttcgggcagggtttccagaacggcccgccgataggcctcgcgaattggctggcttcatcgggagatgtgaagtatttcaccgcgctgttcaagacccagaccgccccatgcgcgtaagggtctggatggctcccccaaccgaaatgggtcccgcgaggtggcctgttgctcctcttcctgacgtggctgctctggccacttggctcggcgtcacagtcgatcacctcgcctggttcgccgatcgccgatcgctcgaacggcacgtcgacgatgagcggctgcgacactacagacggagatggctggccaaacccgacggaacagcacgactgctggaggccccaaaagaggagctgaaggacctccagaggcaggtgttgcaccagattctggacaggatcccggcccatgatgcagctcacggcttcagacccaaccgatcagtgaggacctctgccgccgtgcacagaggccaagaggtcgtcgtgaggctggatcttgaagctttttttacgagcgtagacgtggggcgcgtttatggcattttccgactggccgggtaccctgaaccagtggcacatacactcgcagccttatgcgtgaccgtgactcccggtgccgttttacgatccgcgcctcctgtcccagattctctggttgacgcgagacgccgtctgctacaccggcttaggtccccgcaccttgcacaaggcagtcccacgtcaccggccctcgctaacctggtcgcttttagacttgacagacggttggccggtcttgcagctgcactcgatgcccgttataccaggtacgccgacgacctcgtcctgtccggtggaagaaatctcgtgcgcagtgcagggcccatcctgcatctcgtagagcgcatagcccgtagcgaggggttcacagtgcatgatcggaagactagagtgctgaccagcgcacagaggcagcggatcacaggcctagtggtaaacgggggcgtgaatgttgcccgccccgactatgatagactgcgggccgtgctgcatgacgccgctttgcacggtccagaggcagcgaatcgagagggccatccagactttcaggcacatctacagggaagggtcgcttgggtgggcgcaggaaaccctggaagggcacataagttggcgcgggcgttcgctgccattgattgggatgcctga

SEQ ID NO: 13054 - RNA, 1362 nt, synthetic construct
  source 1..1362: mol_type = other RNA
atgtccacgtccagggcatcagttgccaacgctttagctgccgccctgctggacggagaatggaagagcgtcactacgcttgcaggcaggggagctagggcgttgggtgtgtctcaaagaagacttggcgccgtcgctggagatgtcctggctgcataccgcgaaccgcccctcgacagaagacgcgaactgtcgtcttatttgctcgagcttccgagctttcacgtgttatgggaagggccaggtcgccctccgatcgtacagaggcacagactgcccttggcggatatgggcagggccagatggcctgttccaacaatcgccacttccctcgaactggcatcctgggccgaggaagacctgtccgtgctcgactggtacgccgatgttcggagcttggaacgctctgccgcacccaagctgaggcattatgaccgggaatggagatacaacaggcgaggaggtgtacggctcttagagcggccccgatccaggatcaaaggtctgcaaaggcgcgtgctgcgtgagatgttggatgttgtgcctgctcacggcgccgcacacggatttgtagccggtcggtcagtcgtgagctttgtgacaccacatgtggggcgagacgtcgttgtgcgcttggatctgactgcctgcttcgcatccattactgccccaagagtcttcggagtgttccggatgctgggctacccagaagccgttgcccacacccttaccgggctgagcacaaccgtggttcctcgggacgttttgcgaagtgccccccaggctctacgcaacgaggacctggacgcgcggagatggctgctgacacggcttgctgagccccacctcccacaaggcagtcccacatcgcctgccctggctaatctggtgctcttccacctcgatgcccgtctctccggattggctgccgctgctggagccagttatagtaggtatgctgacgacctggcattttctctggatggcactgatgccgtccggcgagctaaacgcctagtggcgagcgccagaagcgtcgttgcggacgagaggctccgtctaaatgatgccaaaacctctatcacccgtagatcacagcggcaggtgctgtgtggcgtcgtggtgaatgataagcctgcagtagagaggcgccgccgagagtcactaagggctgcactccataacatacgacagcatgggcctgagtcacagaaccgtgcagggcatgaggattttagagcacatctgttaggggagattgcgtgggtgtctgcagtgaatccagaccacggcgagcgccttcggagtgaattcgcacagattacctggtctgagcttggccctggggcaagccagccctga

SEQ ID NO: 13055 - RNA, 1011 nt, synthetic construct
  source 1..1011: mol_type = other RNA
atgcctgtctggaggtggcaggttgcccggtggactacctttgacgagtgcgcagccgctttagatctgacgcccggtgaactctcctggttcgccgacgagagagggtggcacagacgatcagggcccgtgttgcgtcattactcttatcggtggatacccacagccaccggaggagctcggctgatcgagcgacccaagccacggctggcagaagtgcagaggcgcatccggcgtcaggtgttagatgcccttcctgtgcacgaagccgcacacggcttcaggagaggcagatccattcacacgtgtgcacggccacacgcaggacaggatgtggtggttcgtctggatcttgcaggcttttttccaactgtcagcgcttcccgagtacgatcactcttggatctggctgggtaccctaaagccgtcgctgctgcaattgccgggatactgacaacaagaacacccgtggatgttttgcgcagtgcgcctgccaggtccgctatgctaagccatctggctggtacccatttaccgcaaggggccccctctagcccatctgtcgccaatgcggttactcaccacctcgaccggagactgtcagggctcgctgcagtcctgggagcgaactatacccggtacgccgacgacctggcattttctggcgacgccagcctgccattgcatcgcctcctgccgggtgtacgccggattgtcactgatgagggcttcaggctcagggacgataagacttcggtgaagcctgcttatcgacagcagcgcgtggccggccttgtggtaaacgctgccccagcagtggccagggctgagtacgacgaactgcgcgccgtgctgcataattgcgcaaggaccggtcctgcgcaacagaacagagcgggccaccccgacttcagagcccatcttatgggaaggatcgcttggatcagtgccacaaatgcagcccgcggaaccaaactacgcggcctcttcgatagaatcgactggagttga

SEQ ID NO: 13056 - RNA, 1053 nt, synthetic construct
  source 1..1053: mol_type = other RNA
atgaacggagagagggtcacatcagcctccttgctgggcccaatgcccgtctggagatggcccgtagcacggtggacaaccttcgatgaatgtgccgctgcgttggatctaccgcccggagaactgtcttggtttgcggatacacgtgggtggaatcgcagagcccctgcgcgactccgtcatcactgccatcactggattccaacagccagcggcggagcaaggctaatcgaacggcctaaaccgcgccttgccgagcttcaacggcgcgttaggcggcacgtgctcgatgcactgcctgtgcatgaggctgctcacggctttcgtgggggcaggagcatccacacttgcgctcagccacacgccggtcaggaaatggttgtgcgcatggggctggaagggttttttcccgcagtgtcagccactcgcgtacgagcgctactggagctggccggatatcccccagctgtcagagccgccttagcaggcatcctgaccaccagaacacctgtcgacgtacttcgggcagccccagtgcgagctaggtctttagggcgcctcgccggaactcacttgccccaaggcgctccaagcagtccctccgtggctaatgccgtgacccatcatctggacagaagactgtccgggctggcagcaagccttggtgtcaactacacgcgctacgccgacgatctcgctttctctggagacgctgggctccccctccataggctgttgcccggtgtgagacgcatcgtgaccgatgagggcttcaggctgagagacgacaagacctcggttacacctgcatatcggcagcagcgagttgctggcctggtagttaacgccaccccagctgccgccagggcacaatacgacgagctcagagcagtgcttcacaattgtgccaaaactggacctgctcctcagaatcgtgcaggccatcctgatttccgagcgcacttgcggggcaggatagcctggattagtgccactaacccggctcggggtgccaagttaacggacctgttccaccggattgagtgggactga

SEQ ID NO: 13057 - RNA, 1110 nt, synthetic construct
  source 1..1110: mol_type = other RNA
atgaacggggaaagggttactccggccagtcctaccaatcccgcaaatcccgcggaacatacaaaaccatttggcccccaagaaccgagcctgttggaccccctcccccctatctggaggtggcaggtgcctcattggcctacattcgagagctgcgccgctgctctggatctcactcccggtgagttgtcatggttcagtgatcctaggcactggaatgaccgtgccaatcacacactgcgacactaccaccaccgctggatcccaacttccacgggaggcctgagactcatagagcgcccaaaaccccggctggctgaactccagcgccggattcggagacacgtgctgacagcgttgccagtgcacgatgccgcccatggctttcaccctggacgatcgatcctaacctgcgcacagccgcatgcaggccaggataaggtcattaggatggaccttgagcacttcttccccacagtctcagctcggcgcattaggtccctgttagagcttgctgggtatccaccagccgtcgcccaagctcttgccggaattctaacaaccactactccacccgtggttctcaagaacgcaccgcggaaggtgagagatcaattaaagaaacctcatctgccccagggagcccctagctcaccagctgtggcaaacgcagtcacaaatagattggaccgaaggctctctgggctggctcagaaattgggcgccaactacacgaggtatgcggacgacctggctttctccggtgaggccaccctgccactgcatcgactgtttcccggagttagacgcatcgtagaggatgaaggatttagactgcgcgacgataagacctctgtggctgccaaacatcagcggcaacgtgtggccggtctggtggtcaataccaaaccagcggcccagagaacgtattacgacgatttacgtgccacccttcacaactgtgcaaccaccgggccccaggctcagaaccatgcaggtcaccctgactttcaggcacacttaaggggccgcatcgcctggatatccgcaacttctgcccctcggggcgtaaagctcaaggagcttttcgacagaatcgattggagctga

SEQ ID NO: 13058 - RNA, 1089 nt, synthetic construct
  source 1..1089: mol_type = other RNA
atgaacggggaatccgtgacatcagcctcactgctccagccatggcctgtgtggcgatggcccgtctccagatgggccagtttcgatgagtgtgcgggggcccttgatttgatgcccggcgagcttggatggttcgccgatgcgcggtcttggaatcgcagggccaatccggtgctacgtcactattcttaccgctggatcccgaccgctagtggcggcattcgcctgatcgaacgcccgaaacctcggctggccgaactccaacgccgggtaagacggcacgtgctggacgcactccccgttcacgaggcagcccatggttttaggacaggccggagcattctgacttgcgctcaaccccatgccggccagcagttggtggtgagaatggatttagaagcctttttccctactgtgtctgcccgcagaatccgagcactccttgagcttgcaggttaccccgctgccgtctccgcagcattagctggcatactgactaccgctacccccgcggatgtcctacgagaggctcctgctggtagaaggggtcctgttcgggcccgtctcctcaatagtctggcagctactcacctgccacagggagccccctcctcaccaagcgttgccaacgctgtgacccatcatctggacaggcgattggctggactggctcgtacccttggggcgaggtacaccaggtatgccgacgacctggcattcagcggggatgcaggcctgccactgcacagactgttgccaggcgtccggctcattgtaacaggagagggatttaggttgcgcgaggacaagacaagcgtagccgcagcccaccagcagcaacgtgttgccgggctcgtcgtgaactctgctccagctgcaacaagggcctcgtatgacgaacttcgggcggtgctgcacaactgcgctaggacgggccctgcagctcagaatagagctggccatcctgacttccgcgcgcatttactgggacggataggatggattgcagccacgagccgagccagaggggaaaaacttaaggccctatttgacagaatcgattggcacgccgagactgccggggactga

SEQ ID NO: 13059 - RNA, 1068 nt, synthetic construct
  source 1..1068: mol_type = other RNA
atgaccggggagagagtgacgccagcttctctgctaggacccatgccagtatggaggtttcaagtcgccaggtggaccacctttgacgagtgtgcagccgccctcgacctgactccaggagagctgagttggtttgccgatgctaagggatggaatcgccgtgcagcggaaccagtgcgccattatacataccgctggatccccactgccagtggaggcgtcagactgattgaaagacccaaacctcgtcttgccgagctccaacgccggatagtacgccacgttgtggacgcccttcccgtgcacgaggctgctcatgggttccggaggggtcgctcacccttaagttgcgccgctccccacgctggtcgagaaacagttgtgaggatggatctggagggcttcttccctacagtgagcgctcggcgtatctccgccctccttgcattggctggctatcctccagccgttgcagaggcactggcaggcgttctgaccactgctgtgccgcctgccgtcctagcaacagtgccagggggaagaagggaccctgcacggacgagactgttgagcaacctcgcggccacacatcttccccagggtgcaccgtcaagcccttctgtcgccaacgctgtgacccaccatttggataggcggctgggtggactagcgcgagcgttaggagccacgtacacaagatatgctgatgacttagccttctcaggggattccctgcctctgcatcgacttctccccggcgtgcggagaatcgtgaccgatgagggctttcggctgcgcgacgacaaaaccagcatagccggagcgcaccagcgacagagggtagcagggctggtcgtcaattccgctcctgcagctactcgggccgactacgatgccttgagggccttgctgcacaattgcgccaggaccgggcccgaaactcagaaccgatccgggcacccagactttcgcgcacacctcctcggccggattggttggattgctgcgtcttcggaaagaagagctgccaagctcagggatctgttcggcggcatcacttggccgtga

SEQ ID NO: 13060 - RNA, 1074 nt, synthetic construct
  source 1..1074: mol_type = other RNA
atgaatggggagaaagtgaccagcgcctctccccttggtcccttacccgtttggagatggcccgtggctcggtggacgacctttgatgagtgcgcggctgcactggatctcacgccagacgaactctcctggttcgccgatgctaagagctggaacagaagggctgccggacctctgaggcattataggtacagatggatccctaccgcctcgggcgggattcgtctgattgagcagccaaagccacggctagccgagctgcaacggaggctacgtcgccacgtcctggacgctctgcctgtccacgaagctgcgcacgggttcagacccggtcgctctgctatgacatgcgcagctccgcatgccggccgagacttagtggttcgcatggacttagagggcttctttccgacagtgtccgcccgcaggttgcgcagtctgctactccttgctggatatcctgaggccgtagccggtgcacttgctggcatgttgaccaccgcagctcccgtcgacgtgctcacagcagcccctgatggcaggagagatagtgcccgaactcgactcctgaacaatttggcggccactcatctcccacaaggggcaccatcatcccctgctgtggccaatgcagtgactcaccacctggatcgacggcttgcaggtctggccaacgtcttgggcgccaggtatactagatacgcagacgatctcgtgtttagcggcgacaccggacttcccctgcataggctcctgccaggagtgagagccatcgcccgcgatgagggttttcgcatcagggacagcaagacctcagttacagctgcgcatcagcggcaaagggtagcggggttggtggttaactccagtccagccatagccagagccgaatacgacgaactgcgcgccttgctgcacaactgtgcacggactgggcccggagtccagaatcggcatggccaccctgatttcagagcgcaccttctgggccggatcggatgggctggagcctcttctcctgcacgggcagctaaactgcgtgaaatgttcgaccgaatttcatggacagggtga

SEQ ID NO: 13061 - RNA, 1050 nt, synthetic construct
  source 1..1050: mol_type = other RNA
atgctggatcccgtctggagatggccagtcgctcgatgggagacattcaccgactgcgccagagctcttgatctgactgaaggagaactgagttggtttgcagacgccaggacctggaatcgcagggcagacgctccgctgaggcactatacttacaggtggatacctacggccagcggaggcatcaggctgctcgaacgcccaaagccgcgtctagctgaactccagcgtagggtcgttcggcacgttgtaaatgctctcccagtgcatgatgccgcacacggcttccgggctggtagatctgccttaacatgcgcagcgccccacgccggacaagcattagtggtcagaatggatctggagggtttttttccatccgtgtcagccaggcgtgtgcgatctctactcttgctggctggctaccctgaggctgtggccttagcactcgctggtgttctgaccaccgctgcaccagttgacgtgattactggggcccctgatggaacacgggacgcttccagagtaaggctgctgaacaatcttgctcgaacccatctgcctcagggagcccctagttctcccagcgtcgccaacgccgtcacccatcacctcgaccgcagactggcaggtctagcccgggttcttggggctacttacacccggtatgccgacgatcttgcctttagcggacccgcggagctccctctccacagattgctgcccggggtgcgcgaaattgtacgcgccgaggggttccgcttgcgcgataacaaaacgtcagtggctgccgcgcaacatcggcaaagggtggctggcctggtggtgaactccgcacctgcggcagccagagcggactatgatgatctgagggcactgctccacaactgtgcccgcacatgtcccgcggcacagaatcgatatggccacccagacttccgggcatacctgttgggccggatcggctggattgggacagggcatccagcccgtgctgccagacttcgggcccttttcgaccgagtggagtggcccgacactttgcccggctga

SEQ ID NO: 13062 - RNA, 1074 nt, synthetic construct
  source 1..1074: mol_type = other RNA
atgaacggcgagaaggttaccagcgtgtctccactgggaccacgacccgtttggaggtcgccagtccccagatggaccactttcgacgactgtgcagccgcccttgaccttactccaggagagctagcctggttcgcggacgcgcgatcttggaaccgtagagctgggactgccctgaggcactaccgctaccgctggttagccaccgctggtgccggaattcggttgctcgagcagcccaaacccaggctggcagaactgcagaggcgagtgtgcaggcatgtggtgggcgctcttcccgtccatgaggctgcccacggctttcgcagaggcagatcagccatcacctgtgcagcaccccatgcaggacgagccctggtggtgcgtatggatctagaaggtttcttcccggccgttagtgcccgccgggtaagaagcctgctcgaactcgccgggtatcctgccgcagttgcagctgctctcgctgggattctgaccacggctgcacctgtcgatgtgttagccgccgccccggatggaaggagagatcctgcgcgcacacgcctgttgaataacctcgcttcaacacacctaccccaaggatctccttcagcaccagccgtggcgaatgcagtgacccatcacctggacagacggcttgccggcttagcacgcaccctcggagttcggtatactcggtacgccgacgatctcgccttttccggtgacgctactctgccactgcacaggcttctgcctggcgtgaggttgatagtcagggatgaaggctttaggctccgggagtccaagacaagcgtcacggggacacaccagagacagaggattgctgggctggtagtgaattccagcccagcggcggccagaccggattatgacgctctgaaagcattgctgcataatcgggtacgcacaggccctcagccccaaaaccgcctttgccaccctgattttcgagcctacctgctcgggcgtatcgggtggatcgctgctagtcaccctagacggggcgagaagctgcgtgctttgttcgaccggatctcctggcagggttga

SEQ ID NO: 13063 - RNA, 1863 nt, synthetic construct
  source 1..1863: mol_type = other RNA
atgaatggctctgggcccgacggtgccagagacgatgtccctagagacttcgtgtcacgcgactgcgccccacgcgatgaagtgagcggaggtgaagtgtctggcggagaggcatctggaggagcagcctcgggaacgctacccgcagctactgatgccgcaccagatgccgcaacagctgcggctgatgctgccgctgctgatgccgacgctgacgctgacgccgatgcagcaacggatgcagccgctgcaacagcggcagcagctacggacgcagctgctgctgctactgcagccgcagccactgatgcggatgcagccaccgctgcagccgctgatgcagacgtcgcagccgacgatgaaccagggcacgacatggacgagcttgcaccaggaccggcccatgccgaacatcctgggggtgcaccagaaccagccgagccagttgaaccggccgagctgatcgaacgcggcgattggcctgcactcatccagcggagcagggatcgagcccggacaaggtggagaagcaacgcagggcgttccgtggcagctgctttggctgggccatggcaacgcgatgctctggccgaccggttaactgaagaggcggggcattccgctgatgcggctgctgagctggccaatcgccttgtggagctcaatccttctcccccctttgggggagagaggcacttggccagattaatagccgatctaccccctctgcctgccccagcacctgttgcaccctttcgcattaccggtgggactgcagaaccccaagccggcttgtccgtagccgcaagggagtggcgatgggacgtccctcgttggaacaccgtaggcgagtgtgccgaggctctggacctgacagttggggagctggactggttcgccgatcggggaacttggaacaggagagctgcctgtccgctccggcattaccgatataggtggattcctacatcctcgggcggcgtgagactgctagagcagcccaagcctcgcttggcggaactccagcgaaggatcactagacacgtcctgagcaggctgcccgtacacgaggctgcccatggcttcagacctggcagaagtgccttcacctgcgccgcgcctcatgctggatctgctcgattggtcaggttcgacctagagggcttctttgctgcagtcgctccgggccggattcggtcattactgggtagagccgggtatccccgggcagttgctggagcattggctggggttctgactaccgcagcacccgtggatgtgcttagcgcggctcccagggcatcagatgatgccgtccggcacaggttacttcggggcttagctgccgcacatctccctcaaggcgcgccatcctcaccagcagtggcgaacgctgtgaccgcgggactggacgttcgactcgaagccctcgcacgagctttggacgcccggtatacaaggtacgccgacgacctggccttctctggcgacagcaccctgccactccatcgccttcttcccggcgtgagacgtatcgtgatggatgaaggctttctgctgcgtaaagggaagacaagtgtcacattcgctcatcagaggcagcgcgtggcgggactggtggtaaatagtgctccggccgtacctcgggaggagtacgacgcacttagagcgctcctgcacaactgcctgagaaccggtccagccgcccagaatgttcacggccaccacgactttcgcgcccacgtgctcggacgcataagctgggtgggagcgacacaccccggtagagctggtcgtcttcggaccgtgtttgacaggatctcctggcacgaaaccgacgtcaccgggagtcgccacggctga

SEQ ID NO: 13064 - RNA, 1305 nt, synthetic construct
  source 1..1305: mol_type = other RNA
atgagtgccgtggagcgacgcgtagctgcgagacgtcgacaggcagaagagctcgccgctatcgccctggcaggtctgtgggagcagacagaattggcatctaggttggagggccactcccgcctagatggcgacgatgccagactgctcgcccagcgtctgctggagacattccctggaggtagtcccagcgttgccggctttgtggacgcgctcaggaggtaccctccccttccggtcagaaccctacctggctccgctgtcgtaccagtcgagccctggcctgtttggcgctgggacgtaccccgttggagaaccgtgagggaatgtgcccaggcgctggatctgaccgagggagaactctactggtttgcagacgcccgtggttggaatcggagagcccgagcctcactccgccattatcggtataggtgggtgcctactagatctggcggcgtgaggttgctagagcagcccaagccacgccttgccgagctccaacgcagagtggttcgtcacgtcctggccgcactgcccgttcatgatgccgcacacgggttccggaaaggccgatccgctgccacatgtgctggtccccatgcgcgcagggatcttgtggtcagactggacctggaagggttcttcgctgccgtgccagcaactaggctgcaggggctgctcgccttagctgggtatcctgccggcgtcgcccaactgttagcagggctgttggccaccgaaaccccagctgatgtgctttccgctgcgccacgggctggtgatgctttggtgcgcagaagactcctggagcatctcgcccggccacatcttccacagggagcaccgtcttcacctagcgcggccaacgccgtggcttgtcacttagacgtccgactggcgggccttgctcgggttcttggcgctacctatacacggtacgccgacgacctggcattcagcggcgatgcacggctggctttgcatcggcttctgcccggagtgcgccggattgcatcggacgaaggatttaggttgcgggatacaaagacgagcgtagctggggcacaccagcgccaacgagttgccggactagtcgtgaacacggctcctgccgcacctcgcgaagactacgacgcactcagagccaccctgcacaattgcgtgaggacagggcccgctgcccagaacagacatgggcacccggactttaggactcacctgctgggaagaatcgcttgggtgggatcaactcacccaggtcgggccgcgaaactcagggcattatacgataggataacttggtga

SEQ ID NO: 13065 - RNA, 1068 nt, synthetic construct
  source 1..1068: mol_type = other RNA
atgagaacactgcccgattcacgcgccgtacccgtagagcctgaaccggtgtggcgttgggatgtggcacggtggcgtacggtggaagagtgtgcccacgccctggacctcaccgaaggtgaactatattggttcgctgatgcaagggggtggaatcgccgcgctggaacagccttgaggcactatcggtacagatgggtacctacccggtccggaggcgtcagactgttggagcagcctaagcccagactggcagagctccaacgaagggcagttcgccacgtgctgggggctttacctgtgcatgatgccgcccacggtttcaggagaggccggagtgcggctacctgtgctgctccacacgcgtccaaagatctggtggtgcggctggacctggaggggttctttgcggctgtatctgcagctcgcctccgcggacttttaaggctggccgggtatcccgacggcgtagcaacgctactggccggtctactgactacttctactccagttgacgtcctggctgccgcaccgcgaagtagggacgatgccgtgaggcggcgcttactgcataggctcgcagctcctcatctgccccaaggtgccccaagctcacctagcgcagccaacgccgttgcctaccacctggacgtccgactcgcaggcttggctggggttttaggggccgcctataccaggtacgccgacgacttggcgttttcgggggatgcgagattgcccctgcaccgacttttgcctggcgtccgtcttatagcgcgggaggaaggattcagactcagagactccaagacaagcattgcggccgcccaccaaaggcaacgagtcgctggactggtggttaacgctgccccagccgctccaagggcagagtacgacgcccttagagccattctgcataactgcgcacgcaccggaccccaggcacagaatcgtcatggccacccggattttcgggcccaactcctcggccggattgcttggatcggctcaacacatccaggccgagcagctagacttcgggccctctttgagcgcatcacttggtga

SEQ ID NO: 13066 - RNA, 1374 nt, synthetic construct
  source 1..1374: mol_type = other RNA
atgcctagagtctccgaacctggcgacgatgaggccgctgacgttggcgactggagacagcgcggacgagcgagaaggcgtaggcgaactgtagagagacgacgccaagcccatcagctggccctactcgcgcttgaggggccttgggacagagccgatctgacagcccgcttggttaggggctctcggctcgatgatgatgacgcccggcacttgacggcgaggttgcacgagcgattcccggatgccccaccagatgatccaggtcgggtggccgcggctattcttgcactgccccctctgcccgtgaggacactacctggctctgttgaggccccagtggaacccatgccagtgtggcggtggccagttccccactggaggacactgggggattgtgcggaagccctggacgtggatgtcggcgagctccagtggttcgccgataccagaggttggaatcgaagagcaggcgccgccttgcgccattatcggtaccgctgggtgcctactcgatcgggaggagtcaggctgttggaacagccaaaaccgagactggctgagttgcagcgccgggtgacacgtcacgtcttagctgccctgcccgtccatgacgccgcacatggattccgcccaggcaggtcagctgctacatgcgcagagccccatgctgggcggagctttgtcgttcggctcgatttagaagggttttttgcagcagtgagcgccgctcgcgtcagagctttgctgcgactggccggatacccacccgcagtagcagctgctgtagccggactactgaccactacggcacccgctgacgtcctctcagctgcacctaacaccagggacagggaaagtcggcgcagacttctccggaggttagcagcaccgcaccttccccaaggagccccttcctctcctgccgtggcaaacaccgttgcccagcggctggaccttaggctcgcaggtttagcagctgctctgggcgcccgctatacccgttatgccgacgatctggtgtttagcggggatgctgatctgcctcttcaccgactcctgcctggcgtccggctcattactggggacgaaggcttcccgctcagggactccaagaccagtgtggccgcggcacatcaaagacagcgggtggccggactggtagtgaatgcctcacccgccgtgccaagggaggactacgacgctcttagagccatcctgcacaactgcgtgcgtactgggcccgctgcacaaaatcgggacgggcacccagacttcagggcccatctgctcggtcgcatcgcttgggtgggtgctacccatcccagacgtgctgcccgtctgagagcgctttttgcgcgcataagctggtga

SEQ ID NO: 13067 - RNA, 1248 nt, synthetic construct
  source 1..1248: mol_type = other RNA
atggccctgcatcgagccaccgtggctttggacggaccctgggaaccagccgcagttgccgataggttggctacaaccagcatcgatttcgaagccgcacaggaactcgccgcccgactgtttgctctgtgcccatcccgaccgttcggccctagacaactggccaacctcctgcgctcactccccgaacctgcaccagcagagccaagcgcccctgatctgccaagtgaagccgcccctagagaatggcgctggggcgtacccagatgggagacacccgctgaggttgcccgggcattggatctaaccgtgggggagttggagtggtttgcagacctcgggggctggaaccgtcgtgcacctttacccgttcgccactatcgctgtcggtggcttcctggtggccgcagacttgtggaggcaccgaagccacgtctggccgagcttcagcggcggattagacggcacgtccttgaccgcatacccgtgcacgatgcagcccatgggtttcgccccggaagaagcccgcttacctgtgctaggcctcatgccggtcgggcactggtagtccggatggatctcgagggattcttcgcggccgtgagtgggtatcgggtgcgaaggatgctgtgccattcgggctaccccgatcaggtcgctgcagtcgtcgcaggtctactgacaactcgggcccctgtggatgtgctcggagagcctgacagaggcgatcccgctaggtggaggttagcgcgcaatctggcggcggaacacctgccacaaggagctccatcttcacctgccgtcgctaatgccctggcgtacggcttggacaggcgacttgccgggttagctggcactctgggtgctacgtatacgcgatatgccgacgacctcgccttttccggggacgcagacctcccactccatcgtctgctacccggggtgagaagaatcgctcgcgaggagggcttcagggttagagaggacaaaactggtgttgctgccgcccaccagaggcagagaattgctggactggtggtgaactccgcaccggctgtagctcgggctgagtacgacgaactgagggcactcctgcacaattgcgccagaaccggaccagccgcccagaatagggatgggaggcccgactttgctgcttacttgttaggtcggatcggatgggcgtctacaggcaaccctgcaagggccgcgaaactgaaggaaatgttcggccgcattccctggtga

SEQ ID NO: 13068 - RNA, 1077 nt, synthetic construct
  source 1..1077: mol_type = other RNA
atgccggagcacgccagattaagaccagcgccaccaccagaacccccagcacctagaccctggaggtggggagtgccacgttgggctacaccggcagagtgtgcccgggctttagatctgacgcccggcgagctcgattggtttgcggacctcggcgggtggaatagaagagcggggcgacccctccgccattatagatatcgctgggtacccactaggaccggaggtgccagactcctcgagagtcccaaacctcggctcgcagaactccagcggagggtggttaggcacgtggtggccagatttcccctgcacgaagcagtccacgggttccgaactggccgctctcccgtgacttgtgctgcccagcactcaggcagagacgttgtggttcggatggatctggaagggttcttcacgacagtgagcggccgacgcgtaagggcattgttggccgccgctggataccctccacgtgtagctgccgttctggccggcttactgaccaccgcaactcccgctgacgtactggcagatgctccagcaggtcgtgacccggccctaaggtggcgacaggtcagaggacttgcgggtccgcatttgccccagggagcacctagctcccctgctgtggccaatgctgctgcacacaggctggacgtgcgattagcggggctggccagggttttaggagtggcctacacccggtacgctgatgaccttgccttctcaggggatgctgcggtccctgtccacaggcttgtccctggcgtgaggaggatagcccgggaggagggatttcggattcgcgaggccaagaccagtgtgaccggcgctcatcaacggcagcgagttgccggtctggtcgtgaactctgccccagccgtgtcccgtcgcgaatatgacgccctgcgcgcacttcttcataactgcgtcaggacaggtcctcgcgcccaaaaccgggatgggcaccctgacttcagagcccatctattggggcggatcggctgggcaggcacaggaaatcctcgtcgggctgctcgcctgagagcactgtttgaccgcatcgcctggtga

SEQ ID NO: 13069 - RNA, 1230 nt, synthetic construct
  source 1..1230: mol_type = other RNA
atgacctctgctgatctgctgcatctggctcggaccgccttggatggagcttggaccaggcccgcccttgcgacaaggttagccggcatcagtttacacgccgccccgaaccccgaccctgaagatctggctgccagactcctggacctgagcccttctccttttttcgggccccctgaggccctagccagattgctggccgatctgcccaggcaggtggaacctgctgcagcaccacgacctcgctggagggctgatgtacctagatgggagactcccgctgacctcgcagcggcattgcgacttacaccaggtgaactggattggttcgctgatgcccgcacctggaatagaagagccgcgactcccctgcggcattatcgtcaccattggctcgggcacagaccccttgagattccgaagcccagactggctgagattcagcgtcgcctcaacaggctgctcttggctcgcctgccccttcatgaggcagcacacggcttcaggccaggcagaagtgctgccacattcgctgccccgcatgccggacagcctcttgtggcacggtttgacctcgccggctttttcacgtccataacagctgcacgcttgagggcctattttcggcatctgggctaccccggtaatcttgcagtggcgctgactggcctgctgaccacagccactccaccagaggtcctccgagctgccccacctggtgcacaacgccaccgtttagcaaccccacatctgcctcagggagctccttcctcgcccgctatagcgaatgccctagccgctaggctggaccggagacttgcaggcttggccgaacgcatcggggccaattacacccggtacgccgacgatctcgcgttcagcggggatctccctgtcgaccgcttgagggcaggcgttcgacgaatcgctgccgacgaaggatttagactgcacccaggaaaaactcgcattgcggccgcccaccagcggcaaaagttagccgggctggttgttaacgtgcggcccgctgtgtcacgggcagatcacgacaggctgcgtgccgtcctccacaactgcgcacggaccggaccagacgcccaaaaccatgtggggcacccagacttcagggcacacctccttgggaggatcggctgggtaggagcaacacacccggctcgagccgctagactaagagccatttttgacacgatccattggggtcaggcgtga

SEQ ID NO: 13070 - RNA, 1209 nt, synthetic construct
  source 1..1209: mol_type = other RNA
atgctcacagaagcgcaggctgccgcagttcttgacggtccctgggatcggggaggtttagcggagcggctcgccgatgttatcggaccagtgcccgccgaagacctcgcagtgagattgctgggcctttctcctacagccccacctggcggggcacctagtttagtgagactggtcggggatctcgcactggagacacccccagaagaaccccgatggcggggtgaagtgcctcgatgggagactactggcgacttggccagggccttgggactcgacgtaggcgagttagcctggttcgcagatgcccgcgcttggaaccgtagggctggagagcccttgaggcactacagaacatggtgggttccctcgcggtcacatggccgtcgattgatcgagtcaccaaagcccagacttgcggagctgcagcgccgattagtgagacacctgctcgacaggtttgacgtgcatgacgccgctcacggttttcggaaagggcggagcaccacaactttcgctgccccacacgccggtaagcctctggttgttagactcgatctggagggcttttttacctctgtgactggcgcgcgtctgaggggacttctaacggcccacggctacccaatcaccgtcgctaccgcactcaccgggctgcttacaactcgcactccgcctgaggcgctgcatcctgctgactggccccagagacgcagattggctgcaccacacctgccacaaggggctccgtcctctccagccaccgctaatgtaattgcacgcgcactagaccgtcggcttgctgggctggccagaaccctgggagcaacctacacgaggtatgccgatgatctggccttcagcggcgacgatgatctcccgctacatcggctgttgccgggggtgaggggagtggtagaggatgaagggttcaggctcaaccccaggaaaactcgaatagccgcagctcaccaacggcagcggcttgcagggctggtcgtgaatgatacccctgctgccagccgcgcggaatatgacgacctgaaggccgtcctccacaattgcgctcggcatggcctggagtcccagaaccgccatcaccaccccgatttccgcgcccatttgcgcggcagagtcgaatgggtgagtgccggaaggcctgctagaagggcccgactgacagcactgctggacgccatttccggctga

SEQ ID NO: 13071 - RNA, 1236 nt, synthetic construct
  source 1..1236: mol_type = other RNA
atgtacgttagagcccgtgggcaccgggagaacgaatccctgagagtggcagcaagcgccttggacggcccttggacccaagctgaaatcgctacccggttaatgcccctgtacgtggatcccgccgctgctgaggtcatggccgacagacttgtgagtcatagccccagggcgccattcggcggtattgcagacctcgcccgcctaatcgcagccttccctcccattactcaggcgccagcaccccccccaaaacctaaacgttccctggatatcgccgggctccttgacgttacaccttctgagctggactggctcgccgacgcaaggggatggaataagcgggccggaaagccgctatggcattaccggtcttggtggactggcacttccactggaggtttgagactcatagaggccccaaaaccgaggttggcagaggcgcagagacgcctagtgcgacacctgggccttccggtgcatgaggcagcccatgggtttcggaaagggaggagcggcctcacgtatgcagcaccccacagcgggaaacctgtggtggtccgcatggacctggaaggatttttcgcctctgtaaccggtgctcgagtcagagcgcttctgcacgagtatgctcaggctaccacgctggctggcctgctgacaacaagagctcctctggccgtgttaagagatgcgccaaagacatccggagatccagatgtgcgacgccgactgctcgctcacctcgctcaccagcacttgccgcaaggagctccatcatcgcccgccgttgcaaacgccgtggcctatcgcctcgatctgcggctgtcaggcttagctagggccttgggcgcccactacacccgatacgccgatgacctggcatttagtgggccccaaaccctgcccttataccggctcttgccaggtgtggctaagattgcgcgggaagaggggttcagggtcaggcctgataaaacttcagtaaccggccagcaccagaggcaaaagctggcgggcctcgtcgttaatgccagtcctgcagccccaagggccgcctatgacgaacttaaggcacttctgcataactgccgccgcacaggtccccaggctcagaatcgcgcaggccaccctgactttcaggcccatgtccgtggaaggattgactgggtagctgccggtcatcctgccagaggggctaagctgcgggctctgttcggacagatcgattggtga

SEQ ID NO: 13072 - RNA, 1206 nt, synthetic construct
  source 1..1206: mol_type = other RNA
atggaaagtctccgggtggcagctagcgctcttgacggtccatggacgcgctccgcgattgccaccaggctgatctccttctatgcggaccctgctgccgctgagacaatggccgggcaattactggatcattgcccgaggccacctttaggtgacgccgctgacctggcaaggatgatcgcagcttttcccccaatgcctggttacgctccaccgccccctaagcccaagcgtagcctggacattgccgcgctgttggacgttactccctcagagttggattggctggctgatgcacgcggctggaacaggagggcaggtcagccactgtggcactatcgtagtcgatgggctgggacttctaccggcggccttagactcatcgaagctccaaagcctcggctcgccgaagctcaacgccggattgtgcggcacctggatttacccgtccacggagccgctcacgggttcagaaagggccgaagcgcggttacatatgcagccccacatgcaggcaaacccctggtggtgagaatggacctggagggattctttgcgtgtgtgacaggcgctagggtcagggccctagtgcatgagtaccagcaggcgtcagctcttgctgggctgctcaccacgcggacccctcttgaggttctgagatcggcccctccttcatccggcgatccagatgtgagacggcggttgctcgcccgactcgcttaccagcaccttccacagggagccccttcttccccggcggtagcaaatgccgtagcctaccgcttagatctgcgactggcaggcctcgctagggcactaggagccgactatacaagatatgccgacgatttggcctttagtggaccccagaccttgcccctgcacagattgctaccgggcgttagggcaatcgccagagacgaagggttccgtgtccgcccagacaagactagcgtgaccgggcggcatcaacgccagaaactggccggtctggtcgtgaatgcagcacccgccgtacctcgcgccgaatacgatgctcttaaagcactcctccacaattgccgcactacaggacccgacgcccagaaccatgtcggccgaaacgattttgctgcccacgtgagagggaggatagagtgggttgccgcaggacatcccgccagaggagccaagctgcggaaactgtactctcagataacttggtga

SEQ ID NO: 13073 - RNA, 1239 nt, synthetic construct
  source 1..1239: mol_type = other RNA
atgtatgcgtgggcaagagggtaccgggaaaaccgctcactcagagtcgccgcatccgctttggacggaccatggacacagactgatatcgcaacacggctgagtgcactttatgccgatcccgcagcagctgaggtgatggccgatttgcttgtgagtcactcgccccgacagccatttggctccctcgacgaactggcccgacagatagccgccttccctccgcttccgaaaccacctgctcctgagcccccaaagccaaagaagagtctcgacctgcaagccctgctggacgtgaccgcaagcgagcttgactggctggccgatgccaggggctggaataagagagccggtcagcctctctggcactaccgtagcaggtgggtgggcacctctacaggaggactgcgcctgatcgaagctccaaagccacgcttagccgaggcccaacgccgcattgtccgccatgtggacttgcccgtacatgaggccgctcacgggtttaggaaagggcggtcagccctaacttatgccgctccccatgctggcaaacctctggtggtgcgaatggacctcgaggggttctttgcatccgtgacaggtgccagggtacgggccttactgcacgagtacgaacaggccgccacactggccggccttctaacgacccggactcctcttaaagtcctgcgcgcagctcccaccacatccggagatcccgatatccggagacgactgctggcccacttggcccaccagcatctcccgcaaggtgcacctagcagccccgcagtggctaatgcggttgcatatcggctcgattgcagactggctgggttagcgaaagccctgggggccgaatacaccaggtacgcggacgacctcgctttttctgggccgcagactctgccagtacatagattactgcccggagttgttatgattgcgagggatgaaggcttcagagtcaggcccgacaaaacttcagtggctcgtcagcaccaaagacagaagctcgcaggcttggtcgtgaacacggcacctgctgtccctcgggtcgaatacgatgcgctgaaggctttgctacacaattgcgttaagaccggtccacaggcacagaacagagcgggccattctgacttccaggcccacgtgcgtggaaggattgagtgggttgctgctggacatcctgcccgaggcgctaagctgagggagctcttctgtcaagtgacctggtga

SEQ ID NO: 13074 - RNA, 1254 nt, synthetic construct
  source 1..1254: mol_type = other RNA
atgtctgtgaggcacctcgatctgccggtgcacgaagctgcacacggctttcgcaaaggccgatctgccctgacctacgcagcccctcatgccggaaagcccgtggttgtccggatggaccttgaggggttctttgccgccgtgacaggggctcgagtgagagctctgctgttcgaatacgaacaggccgtggtccttgcaggcctcctgacaacgcgcactcctcaggaagtgcttcgggccgctccagggacaaggggagatccagacgtgaggcgcaggttgttgtcacgcctcgcccaccagcatctgcctcaaggggcacccagcagtcccacgatcgcgaacgccgtcgcgtatcgccttgactgcagactaactggcctcgcgcgggctttaggcgccgattacacacggtacgcggatgacctcgcctttagcggaccccacaccttaccccttcaccgcctacttccaggcgtgcggaccatagcgcgtgacgagggattccgagtgaggccagacaagacctccgccgcaggtcagcatcaaagacagaagctggggggtctggtggtcaacgtcgcacctgccgctcccagagccgaatatgacgcagtcaaggctctgctgcataattgcctggcgaccggacctggtgcagagcctagatggccccaaaggttacgccgtgctagggcatggcctggtcgggttggtggaggtcgcactcgtggacagggatccgaggtagctcgggctctgcagccagataggctggtggtaccttatgacccgggagttgctgacggagccgccgattttgagatcggcaaagatgggctgaccgtaattattgtgggcgtggatggcagccccccaagtctccatgctgccgcttgggcaggcggtctagccagaagggaacgggcccagctggtcttggtctatgtagagcccatcgcctccccagcctactggactgcaatggggatggctggggcaacagaggctgcaactgctttcgtcgacgagataagagtggaggcagcggcctacctcgatcacgctggcatcccctgggagttggtgcactatcggggtgatcctgcccacgggttggaagccatcgccgaggaaagacgagcagactgtattgtggtaggaaggtcaagacatggggggggtctggtgggctcggttccaaaaatgctcgttaagggcgccaaacgaccggtggtcgttgttccatga

SEQ ID NO: 13075 - RNA, 1137 nt, synthetic construct
  source 1..1137: mol_type = other RNA
atggccgacagactgttggctcattgccctcggcccccccttggtaacgctagagatctctctcggctgatcctcgaattccctccagaaccagtcctagtgatgccaccggtgccaagaatttggaggtggggggttccgcagtgggagtatacggccgacgtcgccgctctgttggatgtgactctgtcagaactcgactggcttgcagatgccggcggatggaatcgtcgcgctggcgaacctctgcgacactacaggccaaagtgggtagcgactagtacaggcggcataaggttgatcgaggctccgaaacctcgtttagctgaggcccagagacggatagctcggcacttgtctctccccgtgcatgaggccgctcacgggtttaggcccggacgttcccccctcacatatgcgcagccacacgccggaaaagcacttgtggtccgcatggatttagagggattctttgctgctatcacgggggcacgggtgagggcattacttcgaactgccggctatccgcaccaggtggccatcaaactcgcagggctcctgacaacccggactcccctggatgttctccgggacacacctcccacccaaggggatcctgatgttcggcgacggttgctggcaaggctgcctggacagcatctgccccaaggagcgccctccagtcctcagctggccaacgcaattgcctaccgactggactgtagactggcaggtctggccaacgtcctgggcgcagagtacacccgctacgccgacgacctagccttctccggcccacagaccctcccactgcatcgacttctgcccggggtgagagccattgctcacgacgaaggattccgtgtcagacccgacaagagcagggtgagcgcggctcatcaacgccagaagttagccggcctggtggtgaattcggcgccagcagtacctcgcgctgagtatgacgccctacgcgctctccttcacaattgcgttcgcaccggccctgaagcccagaatagggccggtcatcaggattttcaaagccacgtcagaggcaggattgagtgggtagcggccggtcacccagggagatcagcaaagctgcgcgccttgtacaggaacatcgcatggtga

SEQ ID NO: 13076 - RNA, 1299 nt, synthetic construct
  source 1..1299: mol_type = other RNA
atgatttggcaagacgtcgctttgcgggcccttgccgagacagcagtcaacgcagacgcctgggaacaatccgagttggccgccgctctactgaggcacttccgcagggatgggggtgcaagcgatgctttcgcatggactctgctggcacacgtgccagaaccccctgaaagtgccgaggagctactagctctcctggtcgcagttccagagctgaccgctgcgcttccaaaagcccccaggcctgccctcgaggtcgaattatccccagggtggagatggccagtagccagatggcacacagctgagcagctcgcccatgggcttgatttggatgtgggggagctgatgtggttcgcagaccgggggggatggttacgccatgcccatcctccgctgaggcactaccggtgcagatggatgcgcacacgctccgggggaatccgtctgatcgagcagcccaaagcccgtctcgccgagcttcagcggaggatcactcgaagggtggtggacgccatgccagtccatgaggctgcccacggattccgcagaggacggagtgccgcaacttgtgcggccgaacacgcgggtcggcattttctggtgagggttgatgtagagggattttttgcctctctcacattcacccgcatttctagggcaatgcgtgccgctggttatcccggcgcagtagctggcgctataggtggccttctcacaactgccacccctcgagatgtgttagccgctgcgcctcgagtgcgggaatcggaagttgacgctaggcgacgcttgcttggaagactcgccgccgcacacgttccacaaggagcaccgtcatcacctgcgctggccaacgctctgatgcacagactggaccggcgtatagacgcttatgcagggaccttgggcgcaacctacacgcggtatgcggacgatctggccttcagcggcgatcgtcgcttacctgttgccgctctgctcagaggcgtcacggctattgtgagagcagaagggctgagactccgccagtctaagacccgcgtcttggcgccgcatcagagacagcggattgccggcctggtggtgaatgatggcagagctgtggcccccagagcggaatacgacgcactgagggcccttctccacaattgcgctaggactggcccccaggcacagaaccacgaagctcatcccgactttcgaagccacctgctgggtcggatcgcttgggtgggtatcaaccatcccggcagggcccgaaagttgggagagctgtttgaccggatcaattggtga

SEQ ID NO: 13077 - RNA, 951 nt, synthetic construct
  source 1..951: mol_type = other RNA
atggatgactggctgcgcctgctgcgcattgacagtggcgagttcgcgtggtttgcagacgatcggggctggaaccgaagggctgccgaacctctcagacattatcgttatcgatggatgcgtacacgcagcggtgggttgcggctcatagaggccccaaaacccaggttagcagaggtccagcgcacactgctcagacacctggagctgcccgttcatgaagcagcccatggcttccgacgcggtcgtagcgtgcacacttttgcagccccacacgccgggcgggatttagtgctcaggatggacctcgagggcttctttgccagcgtcacggccaccagggtaagggcactggttggtgacttggctgggctggttactaccgccgcccctgtggctgtcttacgagctgctccccccgctcctgatgtggaggtgaggagaagactgctggacagactagctcgaccccatcttccgcagggcgcaccttcatcacctgctctcgcaaatgcggtcgcccatcggcttgacagaaggatcactgccttggctgatgttcttggcgccacctacacgcggtacgcggatgacctcgctttctctggcgatgccggactgccattgcataatttgctgaggggagtgagacgaattgccgcggatgaagggtttcaggtccgcccagacaagacccgcatcactcccgcccaccacagacagaggcttacagggctggtggtaaatgattccccggctgcgtctcgggctgaatacgacgagctgcgtgcagtgctccacaactgcgtgcacagtggaccatccacccaaaaccgcggaggccacgcagactttagggcacaccttctgggacggatcgggtgggtgggagaaaacagacctgcccgggccgcaaagctaagagccttgttcgatcggattacatggtga

SEQ ID NO: 13078 - RNA, 1278 nt, synthetic construct
  source 1..1278: mol_type = other RNA
atggctccagatccgcacacagtcgctgcagccgctcttgccggaccttggcagctggagccactgaccgaacgactcgccgagcacggaaagtggaggtcgcctgaggagattggcgatgtcgttgctatcttgctcggaagatggcgtgctcggcctcgaaggccctttgaacgggtggtcactgaggtggaaggcttattggccgcaaggcctggaactaggccgcctgatctggagcccgacgtccctatatggcggtggccggtgcagcagtggacagatctggacgcgctagccctggggcttgatctcagggacggcgagcttgagtggttcgctgatcctggcgggtggttgaggaggactcccgctggaccactgcatcactatcgacgaagatgggtgactgccagatctggcacacctcgtctgctcgaaagcccaggaccccggctgcaggaactccagagacgcgtgggccggcatgtattggcgcggattccggtgcatgacgctgcccatggctatgtccgaggccgctcacctgcaaccctagctgccctgcatgccgggagagccatggtggtgaaagtggacttggaggggttctttggtcacgtaacgggagagcgtctggccggcctcatgaggatcgctgggtacccacctgctgtggcagctgcattggccgggctgttagttaccgccaccccagaacccgtactgaggtctgcaccagccgcagaaggcgcatgggaagcgagaaggagattgctcgaccggttagcagccccacacctccctcaaggagcacccacctccccagcagctgccaatctgctggcgttccgcctggatagacgcttagcggggcttgcagctgcactcggtgccacatatgggcgctacgccgacgacctggtgttctccgctgcgacactccccgcttcaggccttatcacgcggatcgggcgcatagctgaggaggagggttttaggttgcacgccaccaagacccgcgtccttcccagtcaccaccgccaaagagttactggactggttgtgaacgccgagcccggtgcagctcgtcgagagtacgacgcactgcgggccctgcttcacaattgcgcccggacaggtccagatgaacagaacaccgcggaacatcccgcctttcgggaacatctcctgggcaggatcgcctgggttagcactggtcgtcccagaagagccgatcgcctgagagccctattcgacgccattcgctggccctga

SEQ ID NO: 13079 - RNA, 1353 nt, synthetic construct
  source 1..1353: mol_type = other RNA
atggatggcccttggcggcgggatgacctagctgaacgcctagcccctctgcgcggatggttaggccctgacgaggtgggtagaaccgtcgctgtcctgcttgcacgctggccaaggccacctacagcagcacctgcccaggtagcggccgaattggcacggctgctggctgcattgccaagacgcgggccgattgttcccgaccctcctcctcggccacaatggcgatggcctgtggccccatggactgatctggctgcgctgtcccacgctctgaatctgcgcgacgacgagctcaactggttcgccgatccaggaggctggttgcgtcgagctccagagggtcccctgcaccattaccgcagaaggtggactgcgagccgctctggagtccccaggttgctcgaaacaccagggccccggcttcaggagctacaaaggcgggtcgctaggcacgtgttggccagaatccccgtgcacgacgctgcccacgggtatgtgcgtgggaggagcccacacacacttgctgccgaacacgccggacgggccatggttctgaggttagatctcgagggttttttcgggcatgttacgggtgcccgagtggcaggcctccttagaaccgccggatatcctcccgcagtagccgcagcgttagccggacttctcgttacggcgacaccggcccatgtcctcagacatgcgccagcgggagaaccccatgcctgggaacccaggagaagactgctcgacaggctagccggtccccatttgccacagggcgcacctacatcacccgctgtggccaacctgctggctcatcgcctggaccgccgattggcaggcctgtctaccgccgtaggcgctaggtacggaagatacgccgacgacctcgttttttccggcgagctgcccgtgcatgggttagcagccagagtcaccgctattgcacgggaggagggcttcagagctcggactgacaagaccagagtgatgccgagccaccaccgccagagggttactggcctcgtggtaaacgcacgacccgccgctccacgtgctgagtatgatgccctgcgtgctctgctgcacaattgcgcaagaaccgggcctcaagcacagaaccgggatgggcacccggcctttcgcgatcatcttcttggcaggatcagttgggtggccgccggctctcccaatcgtgaagctcgactgcgagccctgttctccgagatagactggtcgtgcaggagtggttcacgggcactcatggtcggggtggacgtgctgctagtacggcagccacgggatggagtgcacgatctcgtgggatgtggccccgctgatcacccgtga

SEQ ID NO: 13080 - RNA, 1062 nt, synthetic construct
  source 1..1062: mol_type = other RNA
atgcggcccgaggaacctgctgttcccgtctggaggtggcccgtgactccatggagctcactggatgccctgacgggaggattggatctgcgggcgggggaattggactggttcgccgaccggggagggtggttgcataggaggccagagggcccactgcaccactaccgcacaaggtggaccgcttcccgatctggagtgccacgcctccttgagacaccagcccccagactacaggagctacagaggcgcataggcagacgcgtgttggccagaatccctgtgcacgtcgccgctcacggttatgtacgcggccgtagtccgctgactttagcagcggcgcacgccggtcgagcaatggtagtcaggctagatctcgaaggcttcttttcccatgtgactggggatcgcatcgctggccttatgagagcagcaggttatcccccggccgttgcctcagcgttagctggattactggtgaccagcactcctgtgcacgtgctgagaggagcaccaccggctcctccagacgtcctggacagccgaaggaggttgctggaccgtcttgctaccccccacctgcctcaaggcgctcctacatctcctgccacagctaacctgctggcccatcggctcgatcgcaggcttgcagggctcgcagcagctgttggcgctgaatacggcagatacgcagacgacctcgtgttctccggtggagccagactgcccgcacatggcattgcagctcgggttaccgagattgccgcggaggaggggtttcgggtaagggcagataagaccagagtcctccccgctcaccacagacagcaaatcacggggctggttgtgaatgctcggcctgccaccccccgacgtgaatatgacgccctccgggccctccttcacaactgtgcccgaacagggcccgacgcccagaatagatcggatcatccagccttccgggagcatctgctgggacggattagttgggtagaagccgcgcatcctgctcgcggtgccagattgagggcccgttttgccgagatccgctggccagattga

SEQ ID NO: 13081 - RNA, 1275 nt, synthetic construct
  source 1..1275: mol_type = other RNA
atggcaccagagcctcacgtgctggccgctctgttgccaggaccctggaccgttgacgctctcaccactcggattgctggctgccgaggttggggaggacctgacgaagttggggatgtggttgccgccctgttagctcggtggtcacgggctccaaccggcagacctgacagagtcggagcacaggttgcggcactgcttgccgctcgaagccgtcgtcgacacgtcgttccagagtccccgcctgccgatttagcatggcggtggccggtggaaccatggacaggactggacgctctggctaggggcctcgacttgaggcctggagagctggattggtttgctgaccgcggcggctggctccatcgaacacctgacggccctctccatcactaccgaaggaggtggactaccagccgctcaggcacgcccagactgcttgagacaccggctcctcgcctttctgaactgcagagaagggtgggccgcagagtgttagcccgcattccagtgcacgacgctgcccacgggtttgtacgcggtcgcagcccacataccctggctgcagaacatactggcgccgccactgtggtgcgccttgatctggagggcttcttcgcccacgtgagtggtgctcgggtagctgggctactaagggcggcaggctaccccgatgctgtagcctccgccttggcagggttactggtcacaagtacaccagcccccgtgcgtagagcagcacctgcaggaggtgatgtcggcgcccgtaggagactgctcgatcgcctcgcacacccccatctgccccaaggagcacccacatctcccgccgtggcgaaccttttggcccacgtcctagaccggagactccatggtctggcgggtgccttgggagctcggtatggtcggtacgccgatgacctcgtcttttctggggacagactccccgcccacggacttgtggccagagtcaccgctatagcagccgaagaggggttccgggtgcgtccagataagaccaggatcgcacccgcacaccaccggcagagagttactgggctggtagtgaacgctcatcccgcggtggcccgcgtagactatgatgccctgagggcgctcctgcacaattgtgcgcggacggggccagacgctcagaatagggatgggcatccggccttccgggaccatctgctggggagaatcgcgtgggccggatcaggacaccctgcaagggctgcccgactaagggccttgtttgatgccatttcctggtga

SEQ ID NO: 13082 - RNA, 1278 nt, synthetic construct
  source 1..1278: mol_type = other RNA
atggctccaggtgcccaggtagtcgctgccttggccagacagggcaggtgggacactgtctcactgactgaccgactggctgtagccagtggctggtccggacccgaagagattgcgggagtggtcggccatttggtgggacggtggagacgggagccaacagtgccagacgatctgtttgccgcccaagttgcagagctgctagccctcccgaggcgccatctgagagtgggtgcaccccctgaacccgtttggcggtggcctgtcgccagatggaccgatgtagccatggtggcgaggggcttacacctcgacgagggcgaactggcgtggtttgccgacacaggcggctggttacgtcacgtgcccgatggaccgctaggccattaccggcggagatggacagcaagcaggccagggactcccaggctcatcgaagccccagctcctcgactcgcagagctccagaggcgtctgcttcgccgggtgctggatcgtatccccgttcaccctgccgcgcacggttacgtccctggaaggggtccacgcacgttggcccttctgcatgccgccagacccatggtgctgaggctggatttagaggggttcttctcccacgttaccggggcacgaatcgctgggcttctgcgcacagctggctatcccgaggctgttgccaccaccctagcagggctcctggtcacggctactcctcctgccgtgttaagagcttgcccccctgcagccgatcctcagccaagacgccggctgttggatcgcctcgcagctccacacttgccacagggagcccctaccagtccagcggtggcaaacctgctgacacaccgcctggaccggcgactttctggattggctgcggcagttggcgccaggtatgggaggtatgctgacgatctcgtgctcagcggagccgcaaatctgcctgtccacgggcttgcagcacgagtggccgctattgcccgggaggaaggatttcgcgtccgtccgggtaaaactcgcattgccccggctcaccatagacagcgcgtgaccggtctggtggtgaactccggctcacccgcagcctctagacgtgactacgacgatctccgggctttgcttcacaacgctgcccgaaccgggccagctgctcaaaatcgagccgggcatcccgcgttcagggagcatctggccggcagaatagcatgggtaggtggaggcaggcccagaagggctgaagtgctgcggagccttttcgacgcaatctgttgggactga

SEQ ID NO: 13083 - RNA, 1272 nt, synthetic construct
  source 1..1272: mol_type = other RNA
atggcgccccatccagcagcagtagcagcagcagcctgcgctggaccttggggtactgatcccttaaccgaacgacttgcgggcttgggtggatggagtggccctgaggaactggcgggtgtggttggtgcactcgttgctagacgccggcgtgccccaagggacagttctgcaggggtcgaagccgaggtggtagctctgctggctggtccccgcagacatcgacgcgtcgagcagccagatcccgtctggaggctccctgtgcccagatgggctgatctgtcggctctggctacagccctccacctggatgacggcgagctggcatggtttgcggatcccggtggatggcttcgccacgcacctgaggggcctttgacccactatcggcggcactggaccccctctagatcagggacaccgagactgatagaagcccccgcaccacggttagccgagctccaaaggcggattcgcaggcgggtgctggacagaatccctgtgcacccagccgcgcatgggcatgtgagaggtcgcagcccacatacgctggctgctgaacaccgcgcccgacctatggtgctgcgtctggacttagagggcttctatagccatgtgacaggtggtcgagtggccggcctgttgcgtgtggctggttaccctcccgctgtagccgcaaccattgccggccttttggtcactgcaacacccccgggtgtactgcgtgcctgtccacacagaggcgatcctgctgcccgacggcgaatgcttgatcgcctcgctgcaccacatctacctcagggggccccgtcttccccaacggttgcaaatctactgacttacggcttggacaggcggcttagcggactagccactgccgttggagcggcctacggacgatatgccgacgatctggtgttttccggtgatgctgccctccccgtgcacggattgacacgccgtgtggctgccattgccgctgaggaggggtttcgcgtcaggccagacaagaccagaatcatgccagcccaccacaggcagagggttgtcggcctcgtcgtgaatggagacgcccctgctgcctccagacgcgatcatgacgaactgcgggccatattacacaacgctgctaggaccggtcccgacgcccaaaacagggcaggacacccggttttccgggagcaccttctcggacggatcgcgtgggtgggtcatggaagacctgcaagggccgcccggctgagagaactcttcgacaggatctcatggtga

SEQ ID NO: 13084 - RNA, 1218 nt, synthetic construct
  source 1..1218: mol_type = other RNA
atgaccgaccccgaggccgtgctggtggctattctgcgggtgccatggcgcgaaagagcagtcgccgcagcggtaagagagattgtgggcgcccaaagagcacctgaactcgccgccagactgctggaaaggtggccagacgccccccgagtaacgcatgctgagatactggcgggcatcaccactgcccttggtaggaggatcgtgttggatccgttaccccctccaaggtggcggtggcctgtacagagatgggaggatgtggacgccttggctgctggcctggacctacgtgacggggaactcgactggttcgcagacacccgcgggtggttagctgatgggcgccttggccattatcgcaggcggtggcacgatcgccggctaatagaggcccccaagccaagactggccgaattacagcgccgcgtgggtcgtcgagtgttagcccatattcccgtccacgacgctgcgcacggttacgtacggggcagaagccctcttacactggctcgggttcacgccggccaagctctggtgctccgactggacgtggaggggttctttacccgcattggaccggcacggatcgcaggtttgctggccacggcaggttatccggctgcagtcgctcggacactcgctggattgctggtcactgcaacacccccaggcgttcttagggcagcaccagcccatgtggacgccgctacccgtgatagactacgcgctccacacctgcctcaaggagcccctacttcccctgccgtcgcgaacgtgttagcccacggactggatcgacggctcacagctttagcggccgccgctggagctagatacggaaggtacgccgacgatttggtgttcagcggggacaccactcttcctgtccagggacttctgcgtcgggcacgagatgttgccgcggatgagggcttcgccgttagacccgccaaaaccagggtcatgcctgcacatcatcggcagagggtggtggggctcgtcgtgaacgagacacccgcggtttctcggcgcgaatttgatgcactgagagctttgctccacaattgcgcccgaacagggcccgcagctcaaaatcgcgacggccacccagactttagagcccacctgctcggcaggatcggatgggttgccactggtagtccagcaagggctgagaggctgcgtgccctctttggcgggatctcatgggattga

SEQ ID NO: 13085 - RNA, 1191 nt, synthetic construct
  source 1..1191: mol_type = other RNA
atgcgccctgatccggaagtggtgctcgcagcagtgctgcgcgtcccttggagggaggaagcactcgccgctgcggtgacaccggaagtcgctagaaggctcgtggaactgtggcctcaaccgccacgcgatactcacgccgccatcctggctggcattaccagatgcctcggccggcggatagtgttggatcccctgccaccaccacgttggagatggcccgtcgaacggtgggaggacgtcgatgctcttgccgccgggttggatctccgggatggagagctggactggtttgccgacgttagagggcgcctcggtgatgatgctcgcgctcactatcggaggcggtggcatgagcgtcgccttatcgagagccctaaaccaaggctggcagagctgcaacgcagggtgggacgcaaggtcctggcccatatccccgtgcatgacgcggcacacggcttcgtagctggcaggagtcccctgactttagccagggttcatgccggccgtgagatggtcctgagacttgacgtggagggctttttcacacgaattggcccagctcggatcgccgggcttcttgcaacagctggttaccctgccgccgtggcgagactattagccggcctcctggtgacctccacacctcctggagttctcagagccgcgcctgcagggacggcagttgaaaggctgagggcaccccatctcccccaaggagcaccgacatctcctgctgtggctaacgttttggcccacggacttgaccgacggctgtcagcgttagctgccgcagtcggagcgcgttacggtaggtatgcagacgacttggtgttttccggagacggcgccttgccagttcagggtctactgcgacgagccagaggggtagcggcagatgagggttttgccgtacgggcctctaagactcgcgtaatgccagcccaccatcggcaaagagtcgtggggctggtcgtgaatgctagccccgccgtgccaaggagggaatacgacgctctaagagcactgctgcacaattgtgctcgaaccggacccgccgctcagaacagagatggccaccccgacttccgggcccacttattggggcgcataggctgggtggcaaccggtcaccccactcgagctgcaagactgaccgccctgttcgacgccatttcgtggaacgggtga

SEQ ID NO: 13086 - RNA, 1239 nt, synthetic construct
  source 1..1239: mol_type = other RNA
atgcgcaggaggcgaccagaccctgaagccgttttggtagcagtgttgcgcgtcccatggcgtgccgatgctttaaccgccgcagtggctggtgaagttggagccgacgcagcccctgaacttgtggcacgccttctggaaagatggccagttgcgcctcgcgacactcatgccgccattgtcgcaggaatcggcgcaagtctggggcagcgaatagtgctcgatcccctgcctccccctaggagacgatggccagtccagccctgggaggacgtggatgctctggctgccggcttggatctgcgagccggagagttggactggttcgccgatccgggcggatggttggataggtccgcgtctcccagactggctcattaccggaggcggtggcacgggcaacggttaatcgagacaccggccccacgcctggctgaactccaaagacgcgtgggcagacgtgttctggcccacattcccgtgcacgacgccgctcacggctttgttgccgggagaagccccctcaccttagccagggagcactcaggcaggcagtgggtgctgcgcctggatgtggaggggtttttcagccgcatcggacctgccaggatagccggtcttctgggagctgccgggtatcccgcagctgtagcaggcgctctcgctggactgctcgtgacgtctactcctgccgccgtgctgagaagagcacccgaacggcccgcagacgctgtcagagatcggttgagggcgccacatctacctcagggcgcaccaacaagcccagctgtcgccaacgtacttgcccatgggctggaccggcggctatctgcacttgcagcggctgctggcgctcggtacggtagatacgctgacgacctcgtcctgagtggcgatggcccactgcctgtccaagggctgttgcgccgtgccagagagattgctgcggatgagggtttcgacgtccgcccagccaaaacccgggtaatgcccgcgcatcatcggcagcgtgtggttgggctggtggtgaattcagccccgagggtgcctagacacgagtatgatgcacttcgagcactccttcacaactgcgccaggacaggcccagcccgacagaatcgcgacggtcaccccgacttcagggcccatctactcggacggatcgggtgggtggctactggatccccagcacgagcccagcggttacgtgcactctttgacgcgatcgattgggcgtga

SEQ ID NO: 13087 - RNA, 1266 nt, synthetic construct
  source 1..1266: mol_type = other RNA
atgaccgaggaggctgagggggttctcagggacgttctgggcgtccggtgggaggtagctccactagctgccgccctggcagatagaattggggaaagggccgccggtgccgcagaaagactggttgaaaggtggccacaagcgccaaggggtacacacgccgatctggtcgaagagattgcagtgctactggccgtgcgcagacgactggtgcctgcagaaccccagccttcttggcggtggggtgttgccgagtgggagtcagtggacgcattaagtcgtgggcttgatctgcgcgatggagagacagagtggttcgctgatcccggtgggtggcttcgaagggcacctgaaggccccctccaccactatcggggcacttggcgcgtgtctccatcaggagcgccacgactgctcgagactccggctccacggattgccgagttgcagcgcagaatcgggaggagagtgctgatgcggatccccgtgcatcccgcagctcatggctacgtgagaggccgatcccccgccacttttgcagcggtacacgcgggtgctgcaatggtcctccgcgtggacgtggagggcttttttagccggataggcccagctcgtatcgccggtctactccgcaccgcaggatatcccgcagccgttgctgccgtgttagcagggatgctcgtgaccagcaccccgagagccgtactcaggagagcccctggcgctcctggagaagcacgaaggcgcttgatagaccgactcgccctgccgcatttgcctcaaggagcccctactagtcccgccgtcgccaatgtcttggctcacggcctggacagacggcttgatgggctggcgggagccgttggagccagatacgctcggtacgccgatgacctggtgttttccggcgaagcagatctgccggtccacggtcttcttcgcagagcgggcgaaattgccgctgacgaagggttcgacgtacgccccgacaagaccagggtgatgcctgctcaccataggcagcgagtcacaggcctggtggtcaatgccggccctgctgtgagccgtcgcgactatgatgacctccgggccctgcttcataactgcgctagaacggggccagacgctcagaacacggcaggacaccccgccttccgtgagtacttgttgggccggatcgcttgggcaggaacaggaaggccagcccgtagggatcggttagctgcgctgttcgcccggatcgacttcgggcaggatcgctcctga

SEQ ID NO: 13088 - RNA, 1203 nt, synthetic construct
  source 1..1203: mol_type = other RNA
atgacagatcctgaagcagtcctcagggcactactgggcgtaccctggcgtctcggggcactaacccatacactcggggaggtcctgggtgaacgagcccctgaagtggccgctcgtctggttgaccagtggcccgaagctcctagagcggcacatgctgagctcctggccggcattaggggcgcattggggagacgcatagtggtggaggaaccagcccccgtttggcgttggcccgtagctaggtgggcttcggtggacgagttagccgccggactggatctaagagcgggcgagcctgaatggttcgccgaccctggtggatggttacggcgagctccggagggcccacttcaccattaccgcgcggtctggcgaggagatcgactgatcgagacacccggcccccggcttgcagaattgcaacggagaattgggcggcgcgtcctcggtagaatcccggtacacccggccgcccatggatatgtgagaggccgaagtcctttcactttagcagccgagcacgccggcagggctatggttgtgcgcctggacgtggaggggttttttaccaggattggcccagcccgcattgctggactactgcgggcagccggatatccagctgctgtggccagagtgttggccggcatgctcgtcgccagtaccccaagagctgtgcttcggaggggtccatccagccaacggcaacggctcgcacttccccatctgccccaaggcgctccatctagccccgctgtcgccaacctccttgcacacgggcttgaccgcaggttggggggtttagcggctgccgttggggctagatatggccgctacgccgatgacctggtgttctccggagatgagctccctgtgcacgggcttgtacggcgcgtttcagcgatcgccgctgcggaaggattcacgctcagaccggataagactcgcatcatgccagcgcaccaccgtcaaagggtgaccggcctggtcgtgaacgctactcccgcagcctctcgcagggactacgatgacctgcgtgccctgctgcataattgcgtgcagcacggacctgacggacagaatagggaagcacaccctgcctttcgggagcatttgttagggcggatagcctgggttggtgctggccgaccagcaagaagggcaagattgcgggagttgtttgataggatcgccttctga

SEQ ID NO: 13089 - RNA, 1305 nt, synthetic construct
  source 1..1305: mol_type = other RNA
atgaattggctctctctcgcacagcgagctctggacgggccttggctacaagggcccctagccgaaaggttaggagatgaactggaccccgccgccgctgagaggttagcttcagccgtcctcgcacatcggcctagaatgccctggacagagcaggccagattcgccagggaactcgccgaaattccagacgtggtggcagctttggcaccagggaacggtaggggacctcgcgttctggtcagcccagaatggaggcctgtttggcggtggcctgtgccagaatggacgactaccgagcatctggctcacgcgctggatctcaccccgggtgagttggcctggtttgccgactctcgaggctggttgcgaagacaccggggagggcctttacctcactaccgccacagatggctgagaactcggggtggagtgcctcggttgctcgaggctcccaagccgcttctggctgagcgccagaggcgactgctgagacacctgctgcgagctatccccacccatcccgctgcgcacggttttgcgaggggacgtagtgtactgacttttgcaaggccacacgcagggaaagatcttgtcctgaggttcgatttagagggcttcttttcgtgtatcggagcagcccgtgtggcaggccttatgcggtgggctgggtacccaggacctgtagccaccgccctgacagggctaatggttactgccactcccccgccagtgctgagagaagccccacctcctgcagggccaggtcaggttgacgctcgcagacggcttctgacacgtctcgccggcacacatctcgcacaaggagcacccagcagccccgcactggctaacctggtggcctattccctcgatcgccggcttagtgcgcttgcgagggaacgcggccttgcctacacacgctatgcggacgacattgctttgtccggcgaccatgctacaagcgtgccggccttgcgcagagcagtctcaagaattgcccgagatgagggcttccgcatacgggccgacaaaacccgagtgatgccctctcacaggcggcagagactgaccggcctggtcgtcaatgccgagccagctgtagcccgggatgagtatgacacactccgcgccctattgcacaactgcgcaagaaccggccccactgagcagaatcgcacgggtcaccccgatttcgccgcccatgtgaggggacgtatcgcttgggtggctgcaacgcatccaggtcggggtgagaagctgctcgcccagtaccgtgcgatcaggtggcccaccccttcctga

SEQ ID NO: 13090 - RNA, 1443 nt, synthetic construct
  source 1..1443: mol_type = other RNA
atgtcagtgaggctctttgccgaaaggaagcacatgctgagcgcctccgatacacctccccctccaaaagatgccgccccacttgctggactgagccgatctatcgcggacttcttgctctactccctagaacaaggattcgctctgaacgccaaagccctgagggagcgtgcaagggcccactttttcgatgccagcgagatcctcgaggctgtttatgtagaactggaatcagatgagtggccttggagaggccagaccgcagatgtgctggcgcagagaattctggtcagtgaggcgttattggatctgcaggccccgatagatgaagatgagctgtggtacctggacgacgaaacccttgcctcttataagacacagcacgaatcttacctcttcagcctgtcgacaatgcctgtttggaaaccaccatctgtcaggggtcacgcctggctacattcagcccgaagtagcgtaccatccctggagtccgtttctgacattgcaacctggttgaatgtctcacgcgacgagtgggacggcgctactaacgcgagtaagtaccgtcttcgcgtgcaccgcaagcctagtgggaaactacgcctcctggagatccctccggaaccgaaacgggtgctgcagagaagactcctgcaccgcttattagaccatgtcgcacctcacgaagccgcacacggattcgttgccggacggtccgtgcatactcacgcctccctgcatatccagcaacaggtggtgattcggctggacctcgctgacttcttcgcaaacacactcgctgctagagtgtttctgctgttccgggctctcggctttgtcgcacacgtggccaacgccctgaccgcactttgcacgaccagtcaaagccgggtcagcctcaggggtgcattgggtgcagagtacttgaatgggaatcggtatgacatctattctgttaaccatctcccccaaggtgcccccagctcaccagctcttgccaatctgtgtgcgcatagtcttgacgtgcgcttaactgctatcgccggccagtttggagccatatacacgagatatgctgatgacattgtgatttccgggtccggcgaaattgcagctaggcccagaaagtttataactctggcccgggagattatcgctgatgagggctggaggcttaaccccgataaaacccggatcatgcgtaatactggcaggcagagcttcaccgggctggtggtgaatgaacgggtcaacgtggctagagacgagtttgaccgcatcaaggctgcagtacatcgcgccaccagggacgacgttccccatgtacttgggctcttgtcatggctgaagcagtcctctcccgagagagccgctaagttacgacagaaattgctagcacgaaatgatttgacagatgtgcgatctgcgtcgaagacacgttga

SEQ ID NO: 13091 - RNA, 1416 nt, synthetic construct
  source 1..1416: mol_type = other RNA
atgagcgccaacgaagatacatcccccgatgactcacgcactccccttctggcattcgaaagattcgcgaggtccattgctgagtttctgttgtacagtcatcgagagggctttcagctctccgtgtctgctttacgtgcaagggccacgagacatttcggaggacacgactacctggtgtgcgcgataatcagggaggtgatcgatgacgtcgccggctggtgtgatttgccccccacaactctcgcccagagaatcctcgatagctcagcactggaggaactggtggcgccgtttgtggaggacgactactggttcctcgatgacgacgctctgttggatcttcggtcggcccaggccaggcgtgttgctgatgctgcaagtctcgccgcatggcttccaccccctcaaaatggggctgaatggctaagggaggcccgtttgataagcccttcatttgcaacagtggtggatttagcaaggtggcttgacgttagtccagaggaattcgatgcggccatggccaaccgccggtataggctgcgcgtccacgcaaaaccctctggagggactagactgatcgaaattccgcccgaaagtctgcgcgtcttgcagagacgcgtgcttcaccgactgctggatcgcatttccccccacgcagctgcccatgcctatgtgagaacccgctctgctcacactcatgcagcccagcacgtcggtcgagaaatggttgttcgtctggacctccgcgacttctttccttctatcaagggagcccgggtctttctgctttttaggagcctgggtttcgcagctaatattgctaacgttctaaccgccctctgtgtagcgagccaaagcagagcttcactgcgaagagccttgggcgccgcacacgttgctttcttcgagaggttcagcgccaatcacctccctcaaggcgctccaacatccccagcactcgctaatctctgcgcccattccctggacgtccggctgaatgcacttgcagagtcctttaacgctacctatactcggtacgccgatgacctggtctttagtggtgacgagggcatagcctctgagccacgagaattcgtgtgcttagcgcgggccatcgtgagcgacgaaggctttcagctaaatacagagaaaacgcgcattatgaggaagtccgctcggcaagccttcgccgggttggtagtaaatgaaaagatcaacctgccacggtgtgattatgaccagctgaaggctgccgtgcacagggctacccttcggagtacctcagaggaggtgtcaaaactcctggggagaatcgcatggctgcggcagaactctcctcatagagccgacaagctgcgatctaaactaatttcgagcttaccaaaccagtccgcgtctcctaccgccccttga

SEQ ID NO: 13092 - RNA, 1470 nt, synthetic construct
  source 1..1470: mol_type = other RNA
atggttatcgacgctgctccaccttctcccgaatggcttgccgcccagcttgctgccctttttagccacgcggtggcccacggctacagcttgaagcctgccactctcgcacggcgatctagtaggcactttgccggagcttcaggcatcgttcgacatgtcgccagagatctccagaagcgcggtcagaccgggaacgattggactaagtggcctacagaggtcttggctgacttcatactcaagtcaaatgcgtttgtgccactcgtggatggctacgctgttgttaccggcgaagtcgagtccccaaaatacgagactgagccggacgcggagatcatggcccttctggcagagaatcctgaagcgctggctgcatggctggagcgggacgaagccgacgacgtacctctgtatgccccgtttgtagccacaaggcccctgcctgaggtgatgcccaacttcgccgccacgttacccgcactgaacggggtcagtgatattgcccggctccttgacgtatcccgagaagaatgggacgacgcattagctcggtctaggtatcgcctgcgctgcgtgagaaagtctagtggaggcgtgcgtctgatcgaaatcccgtcagaggctttgagggtcctccagcggagaacattgcatagactgctcgggcgcgtgtccgtccatgatgctgcacacggctttgtgcgaggtcgctccgtgcacacccatgctgccgctcacgttggtcgcgatattgtgattcggctcgatctcaaggacttcttccccagcatctcaggagcaagagtgttcctgtttttccggtccttgggctataacgtacgtgccgccaacgcccttactgccttgtgcgtggcctggcagacgaggagatctctgcgagatgggttgaaaacattggcgaccaccacagatattaacgctctcctacccaggtacagtgttgcacacgttccacagggcgcaccaacctccccagctctggctaatctgtgtgcccggtcattagacttaagacttgacgcatgggcaaagtcgtttggagcaacctacactagatacgcagacgatctggtattcagcggcgacgcagccctggctaagtcttggcgcgccttcatcgctaccgcacgtgtgattataggggaggagggatgggagctgaatgttcaaaaaacaagggtgatgaggcgttctgtcagacaagtctttaccgggctggtggtgaatagccgcgtcaacgtggcccgggatgaattcgatgccctcaaagctagcgtccacagattctgtaaacccgacgcgacagccaatgcggatgagctgcgagtgctgctagggcgggtggcatggctaggacagagccatcctgccagggccgaaaagctgaggaataaactgtatgcctccactgacagtcgcgcagatacgaacggtgacgcggcttga

SEQ ID NO: 13093 - RNA, 1461 nt, synthetic construct
  source 1..1461: mol_type = other RNA
atgccggctaccgtgccctccgagactacacctcctccagaagttgacgcgatcgcagacgctctggcagccttcatgctggccgaacatacagctgggcgctcactaactgcccgagcgctcactgcacgtgctagcgcacgcttcgtcggctgcagtgcccttcttggagctgccagacgagacttggccctgcacgcggagctagcttggccacactggtccgccgcacaattggccgctcgaatccgtaagcttcccgcctttgaacgcctcgtgacccagagtgtgctcctgaccgccgctatcgaggacattaccgctactctggctcacgcggcagatgagaaggaacggggcgaacacgccgattgggtggctggtttgcaagcaaggcgggcacgtttacaggctgacctcccaaggatttggccagtggcagctaccgctgggtctgacccacccagggttgagagcgggcttcagcctctcgccgatctggcaaggcggatcgaaatctcggaagacgagctggatgccgcccttagaacctccagaactcctcacgccttccgccttctcgtgatgcgcaaacagtccggcggcttacgggtgatagagcaaccccaggacgcgctgagggtgttacaaagaagagtgttgcgggaggtactggcgaccgctgatttgcacccggcggcacacggttttgtcaggggacggtccgctttaactcacgccgccctgcatagcggtagacggttagtactgcgactggacatcgccgacttttttacatcaattaccgctgggagagtacatagtgcattcttgcgcctgggaatgccccctagggtggcaactgctctcacggccctgtgtacatctgtccagcgggctggagcattgagggccgcattgcggcgacatgatgccttcgcaagccagacacgcattgtcggccacgtacgcgattggcaacagaccctgtgcgtcccccatctacctcagggagcccccacatcacctgccctagccaactggattgcttaccgcctcgacagacgtcttagtgggctcgcagcggcctgggatatgcggtattcaaggtatgccgacgatctgactttttctaccgacgcctctgattgcaatagcctgcgcttcgtcgatcaggtgagaacaatagtggctaccgagggctggctgctgaacgaacggaaaacgctggttatgccgcagtctaaccgacagagggtgacgggtatagtggtcaaccagacaatgaatctgtgtagacaagactacgacgcactgaaagcagccgttcacagacatgttaatgccccaccagatgacgctcagcgcagccagctccttggcaggatcgcctggctcgcccagtttaggcctgagagggccgatcggctgctccataagctgcgttccgcgcccagatga

SEQ ID NO: 13094 - RNA, 1362 nt, synthetic construct
  source 1..1362: mol_type = other RNA
atggccgctgttcacgccctcgcccatgccatcgcatcagcattccttgatggaccatgggtcccaagagagatggcacagcgggctacatatgctgtccgcggggtgcgtaccgaaaccagagtggggctgcatctcgtgattccacacgaagccgtccggactcggacttggctgccagcactggctagggccaccgtcatgagatttccagagcccccccatgccaccctcgatgcattggccgtatggattggggaccaagattctctggcccgccacgcccatatcactgtggtacgggctattgctctgcctgccccagcgatgagtacaatgaggggagcgttagctgacctgggcgtgccttcgatcaccacactgcccgagctggcagcgcaaatcggcacttccgtggctgccctggatttcctcagcagagcccggccacgggaaattgtgcgaccgcaacaccgcactacactgctaaggaaacagagtggtggccttcgggttctcgagataccctctccgcctcttgcaagagcccagcgtgcaatccttgacgcaatcgttgcccacgtgcctatccacgacgcagctcacggattcgtcaggggaaggtcccctagaagcgcagcggtccgtcatatgcaccgcgaggtggtggttaggctcgacctcgcagatttctttttgagcattactgcggctcgtgtgcgcggcgtgttcagcagaatggggtaccccgacgtaatagccgctagattaacacggttgacaacgaccgcgacacggcccgatgtgatcgcctctcttaggacccacgtcgatcatgcttccacgcatgccctggcgcagcgactaagaaccccacacctcccgcagggcgctccttcatctcctgccctggccaatttggtggcctaccatctagacgcccgcctggctggtctggcacgaagatttggggctacatacacccggtatgctgacgatctaacgttttcaggtgatgctagcctctcccaccacgtccgcgggttagtgcgaagtgtcgtggccatatgtcgagacgagtcctttggcgtgagacatgacaagactcgggtattacgccgacacagacgccaggacgtcctgggtgttgtggttaatgataggcctaacctggcaagggaccgttatgacctgctccgcgctgtactgcatagggttgccagggaaggctgggaacgggcagagattgacggacagcccattggcccctcagcccttgcgggacatgttgcccacgcttgcaccttggtgaacgatgcccgagccaggaagttgcgcgcaatgctggccaggctgccctga

SEQ ID NO: 13095 - RNA, 1227 nt, synthetic construct
  source 1..1227: mol_type = other RNA
atgcttctccggagcccgtgggaactgtacgctctctgggcagcgctggacgaggcatttggaagaagaatgccgtttaccagacagctcgcaatggaagcactccgggttggtcgggtcggggaggaacgtttggctcgcggtctgagggaagggagggcatttagaggcctgttgcgagacgaggaaccactcaggctggtactgtgggatctgcctgtgacccagatgcagccacccagggtgcctctacattgggagcctcccgagctgcccacagatgacgcgctggctgcctggctgggattagaactcgggcccttgcgagcattcgcggatctacaagatagagccagacatcaccctccagcctggcgtaactatcagcaccgctggatcggccgaaggcttatcgaggcccctaaggcccggctcaaacacgttcagcgtcgcgtcctgcacggcatactcgacgccctggtagtccatccagccgcccatggattcgtgagaggcagagatcgcagatcacatgccgccccacacgtcgggcatgaggtggtagctcgcgtggacctggccaggttcttcccgagtatccaccgacggcgcgtgactggcctttttgaggccatgggctatcctagacgggtggcaaggctgttggctgggttgtgcgccgctaggactccacctgacgtggtcgaggctggtccagcagatgcacctgtgaggtatgacgccccacatctgccccaaggagcacccacctctccagccgtggccaatgctttgtgctggcggctcgaccagcgactttccgctcgtgcaaccgcgtccggacacgtctacagcaggtacgccgacgatctgactatttctgggccccggcggggtatgagagccttagttgctgccgtgcaggtgatcgccgcggatgaagacttcgtggttgcagccgacaaaacgagggtgatgcaccagtcggagcagcaacgcgtcacaggcattgtcgtgaatgcacagcccggagttccccgacgcgaaagggaacggctggaggctattcttgtgaactgtggccgcacagatcctgctgcacaaaaccgggacgggcaccccgattttgcggctcacctgagaggacgtgtcgccgctgttggcgccgtgaatgctcgccatggcgagaagcttctagccttatggcaggctgtagattggggatga

SEQ ID NO: 13096 - RNA, 1314 nt, synthetic construct
  source 1..1314: mol_type = other RNA
atgcacgccgctacgttttgtgctctccttgccgaagcattcctggccggcgactggcaacccgcagatatggcgaggcggggatcagccatgattgacgcagcagggtcccagaggaggtggatgcgcagactggctggtagagtggccgaaagcctaccacggggagagcatctgactccagcccgcgtggcgtcgtttgttgaacgggatctgggatttcgacgcgtctggagtacttggttgagttcctgtaggattcggcagaggttttgggtccaccccactatggggcctagccagctcccactggaagcagcgttaccccaggtcgcaacagcggggcaactagcagactggttgggcgtgggagtgagcgaactggccgggttcgcagacctccagggaaggcacttaagagccagtgcccgcagccggcgacattatcgacgtcgctggcgagagccaagaagcgtagccggcagtcctcggcttctggaggctcctaaggaccgcctgcggcgattgcagaggcgcatactgagggggatcctgtctcaggtccaggtccatgacgctgctcacgggtttgtgcccggaaggtctgttcactcttgtgctgcacggcacgcttgcaggccggttctagtccggatggatctctcagccttcttcaccggcatcgatggccgtagggtggctggtctgtttgaggcaatgggcatcccgaggactgtagccagagtgctggccggtctgtgcacaaccgctactcccgccgatgagctcgctgcgttagcccacacctggtggctccgggtcttgtatgcccgaccgcatttaccccagggcgctccaacaagccctgcccttgctaacctgtgcgcattcagacttgacgcgcgcctggatgcattcgcccgttcaaagggctggagatacaccagatacgcagacgacctgtacctctccgggcccgatcgacctcatcggctcgttagaatggtgcatagaattgcccgccaagagtccttcacagtgaatgcccggaaaacctccatcatgcggcctggtcgcgctcatagatgtttgggcctttctgtggaccgtcaaccagctgtaccacggcagctgagagagcgccttgaagccatattgacgaattgcgtgcgtcacgggcctaacggacagaaccgagaaggccaccccgattttaggcgccatctggagggaagagttgcctgggtgaccgctgcctgcccaagacacggtgaaaggttcgccaggctcctggaggagatccagtggccttga

SEQ ID NO: 13097 - RNA, 1353 nt, synthetic construct
  source 1..1353: mol_type = other RNA
atgattagccatcttccccgcggcataccaggggtgccaactagcatgcacgaccaccggcaagctgcagatcccgccgttcgcagagccggatctcagggaacagaatccgaggtcagcctgcatcaccctctgatcgacgctctcgcggacgctttgctggccgttccgtgggatagggaagcccttcagcgggggtttagagaggtgctgggcggttacgaccccttagcagccggtttagccgcacggctgtggacggatgctaggccagacaggggtgaggcagtgaggctgctcgtcgaagacgtagagctgcggcgccttctccaagggccagttgtagcccggagaagggcgtggcatttcccagaggaggacccggcacctcttcgattcgagggactgccggagctgcctgatgtagcggcactggcccgctggttaggctggtcagtgcccgtcttgctaggccacgccgatctgcgacatgaccatcggcgccgagccgaatacagggattatgtctacagatggcatggagctagacttatcgaggcaccgaaagaccggttggctggtggtcagagacgtatactgcgggagctgctggttcacgtccctttgcacgacgccgctcacggctttgtgagaggcaggtccccaagaacacacgctcggctccatgtcggctgtgctgtggtggtacgggtggatctagagcgcttctttgcttctatcaccgccccccgagttagggggatgtttcgggcactcggatatcctcgcagggtggcgtctcttctagccggcctgacaacatcatggcccccacctgatgttgtgcccggaggatccccatggagtgcccctcacttgccacagggagcccccacttcacctgccttggccaacattgtctcccacgggctggacagacgtctccaagggcttgctcgacatcacggcgcggcttactctagatatgcagacgatctgaccttctccgggcgtgcattgccttcgtcactcgtgcccaccatcgagcagatcgctgtgagcgaaggctttcgggtgcgcagatgcaagacgaggcgtatgggagaaggggctgcccaacgcgtaactggcctcatcgtcaatcgacacgtggccgtgagccgcagagaacgcgatcacctgagggccctgctgcacttagcactcacccgcggtcccgccagtgttcgtgtcgaaggcgtggacgatgtgaggagttggctccgggggagaattgcttgggtggcacatgcccgacctgcacatgcggaaaggatgctggaggtcttccatcagattgcctggaccgcatga

SEQ ID NO: 13098 - RNA, 1365 nt, synthetic construct
  source 1..1365: mol_type = other RNA
atgcttgacgtcctcaggcagggtcgaccagggccatctcctttttgggtgggacttgtggcccgggtgagagacgcattcggacccacttccccccccccaaccctagacgcattaactaggatgctggcggaggacccaatcttcgatgaggactaccgggcagagatggccctgctcacagaggccgacgggtggaagaccccaccctacgtggatcgactgatttttcgccctgtgggatctaggttcaggccaggggcagcagctgcagaatggccagtccccagactggaaagtgtgcccgaattggccgcccatctcgaggtacccgaggctactctggaaggatgggctgacgttggcgggtggttgggcaggtatccatcagatcggcgccagcactacgtgagaaggtggatacctggggtgcctggtagaagatctcgcccaacccccctacgtagagctgcccctgggtgtgccccctgtctcagatcaagcggtggctcaggtccgcgcctcattgaggctccaaagacacagctggccaaaatgcagagaaggatccttcgcagcatcctggacctggtgcctgtacatccggcggctcacggatttgttcgggggcgaagcattcgcacgcacgctgcacgacacgtgcacatgcaggtcgtgctccggttcgatctgaggcgcttctttccttcagttcaggcaccgcgtgtccagggcctatttcgctacctggggtacccagaagaggttgcccgtttgctcgccggactgtgcacaacaatcacccctcatgacgtttttcccccccggactgcggctgatgtccgtcaactgtatcgccagagacacttgcctcaaggcgcgccaacctcccctgccttagccaacctgctctgcctgggactggacagaaggatgatgggcctggcaagggccttcgacgctggctattcccgctatgccgatgacttggtattcagcggaggcgctgcccttgctgcacgatcgagaaggtttggaggattcgtggcccgcgtcgtggaagaggagggctttctgcttaaccatgataagacgcggcggatgccccggtctggtagacaagaagttaccggcttagtggtgaatcaggggcctgcttacccgagagatgagttcgatcggttaaaagccatactccaccagtgcgcactggatggccctgaaaggcacaatcgcgagggccatcccgattttcgtgcccatctgcttgggcgggtcagtttcgtggaatccgtagacccgagaaggggcgcgaaattgagggtccggttcgagcgaatccggtggggtagcagtcaacgatga

SEQ ID NO: 13099 - RNA, 1242 nt, synthetic construct
  source 1..1242: mol_type = other RNA
atgagccacgctgtggctgcagccatcgctctagccctgctagagccagagcggtggcgatccggagttagggcaagtttggaatcttttgaaggcctggacgccgaatctcggaccgccattgggagactcgtaaagtccctttacgtccgacctgaagtggacgagctcgctgccctcatcgcaagagatcccaaggtgacccttcggggcgtcattccccgtaggtgggccttaccccctttgaggatgactcgtcctccctatggcgcaccacctttgccaacgccagccgacctggctgcttttctggatgtcgaggtcggcgagctctcgttcttggcggacccgaaaggctggaacactgatgcgcgcagacagcactaccgaacccgctgggttcccaaaaggcgcggtggtaggcggctgatagaggcacctaaggctcggctgaaaagggtacagcgcaaggtgttaagaggtattctcgacccggtacccctgggagcagcagctacagggtttgcgccaggcgccagcccaagtaagcacgcagctcgtcattcaggcaagcgctgggtgttgaaaatggatctggccgactttttcgcacacgtggggtctggtcgggtgagagccatctttgagacgttgggatatccgctcgcggttcgccgactactcgtgggactatgcaccacacgggcccctgctgaactgcttctcgacgccgatcctgtggagagagcgctgcatggtcgccgccgattaccccagggagcaccaacaagccccacccttgccaacttagctgccgcccccctggaccatagactttggaaccttgctgcccgtctggggctgacttattcccgctacgccgacgatctggcattctccggggacaggatgccagagagtctgatacccagaatcgccgcgatcggcattgaagaagggttccctctgcagctccggaagactaggaggatgggccgagctgtcaggcaggagctgacagggttggtggtgaatgccgatcctgcgccacgcagggaaagctatgaccggctcagagccatccttcaccaagccgctctggatggacctgcagccgccaatagagaggccagggaagacttccgggcttacctgcggggcagaattgagtgggttgcaggaggacgaccgcaacgtcgggcaaaactggatgctctgttcgcaagaatcgattggtcatga

SEQ ID NO: 13100 - RNA, 1056 nt, synthetic construct
  source 1..1056: mol_type = other RNA
atggggctgataatctatgcaatcctgtcaagaggcaagatcgacgccgtggccattaggaggagtcggaaagactacagatccccgtttttatttcgccgggctggaaggcctgatgcaggcaaactggcctctcgtggcttacccgtgctagggaacgttaacgaagtggcagcgcttctgggcgtcagtcccaaacagttgcgctggttaagcgtggccgacttcggccactatcattccttcctcttggagaaaaaatcgggagctgccaggcttatcgacgcccccaagccacagttgaaggctgcccaaaggaagatttacgagctcctcctgaagaagcagccactccaccctgccgcacatggcttctgtccgggtaaaaatgtacgtgatcacgcagcccggcattgcgggaagcaaactgtcctggggatggatgtcgctaacttctgcccctccgtgagtgcacggagagtttgtggactctttaagtcctggggctatggagaggatgttgcccttctgctgactacactgaccacgtacaatgggcatttgccccaaggcgcccctacatctccagctctggccaatctggtgttcactcatgctgatgcacgtctggcaggtctagcgcgacgcttcggtgcggagtatagcagatacgctgacgacatgacattcagcgggggccaggccttccagaggaagctttctgcattttcaaaagctgtgcagggaattgtaaaggaggaaggttttgcgctcaatcacaacaaaacacggcagatgcggcatggaaggcgacaggtggtcaccggccttgtggtcaatgaaaccccacacgtttcacgacgaatgcggcgccgcatgagagctatcctgcacaacgcccaacgcaagggactcgaagcccagaacagatttaagcaccctcggtttgcggaacacctcagggggcgaattgcttggataaccagcctgcaccctaggttgggtggcagactgcttgaggggtggaaagctgcccgcgccagattcgcaggatga

SEQ ID NO: 13101 - RNA, 1389 nt, synthetic construct
  source 1..1389: mol_type = other RNA
atgggactgtttgatttcattaaggggctgtttggcgggtccgcccaggttcaatctggtccgactcatgccgacgtcaaccctgcgcatgatcaggccggaagggaccagacagaaacttcatacgcagagtccattcacgctgatgctggggaggcagtaccgcacgagcattcctcaccgcagaattcttcctcgaacaaggtgttcagggaacgcaaggctagcaagaacatagttcttagaaaattctcctaccggccttccactgtcgctacaccccaggagcaagagattgtgcgccaccgcccctacaagtttgccgtgccaggaccacataccggtgagtttctcgatctcagccaggatgctgacgagagatggctggagtattatggactgcctaccctggcgacacccgacgaccttgccgactggtttggcatatcgataggtaagttggcttggcttacccaccggatgcgtgacggaaacagaccaaaagacgtgaaagatgctcactaccacttccagtggaaaaagaagagaagcgggtcatggcggctgatcgaggcacccaaagaagagttaaaaggcgttcagaccaaaattcttcgagagatcctggaccttgtcccagcacatccagccgcccacggatttgtgcctgggaggagcatcctgagcaacgccgtaccccatgtgggaagtaagttcctcctgaagctagacctggaaaacttttatccaacagtgcgttacagcagggtcgttgcaattttcaggtccctaggcttctctcgggaagtttccatctggttggcgcgacttacggtgagtgcccccccttggtctttggatgcaccaaaaaagaattgggaattctggcaactgatgcccccgcatttacctcagggtgctcctactagccccgccttggccaatctgagtgcatttgcgctggatgtgcgcttaagcggcatggctaaagcttacaacctcaagtatacccgatacgcagacgatctgaccttctcaggccccgggctctcaatcccagccctgaacgaatttatcccactgactagtaagattattgccgccgagagattcttcgtgaacaaaaagaagcgtaagatcatccggaattctcagcggcaatgtgtcacgggcgtggtcgtgaatgaaaagattaacgtctctaggcaggattatgaccagctcaaagccatactccacaattgcgtaaaaacaggccctcagcaacagaatagaaatcaacaccctgattttgctagtcacctccgcggccgcatcgcccatatgatgcagttgaatccctctaggggggcaaaactactggaaatctatcagaagatcagatggtga

SEQ ID NO: 13102 - RNA, 1077 nt, synthetic construct
  source 1..1077: mol_type = other RNA
atgggactctttgactttatccgtggattgttcggcagttctcctaatcaccaggtcgagcagtcaggcgagcaaagggatacaacccctgggagatctgatccaggggtgagcgaaactgctagccctacacctcaggtggaaccacgccagagtgtaagcaagagaacgcaaactcatctgccttgcagtaagcgctcacctgtcaagctacaacagctggagtatcgcccagggatcgtgagaaccccctcggaacaggaagtttccaaacagaagccctaccgattcgctagcattgggcccaggacaggcgaatacttgaatctatccagggacatggatgagcggtggttggaatacttcggactgccccaactagctaccccagacgacctggcccagtggcttaatctcagtatagggaaactcgcctggcttacccatcacaccagggagggctacagaccgaagaatgaatccgattctcactatcacttccagtggaagcgcaagcgatcggggggactgagattgattgaagctccaaagcaagagttgaaaaatgctcagcaccagatcctgcatcagatcctcgactcagtccctacccatcaggccgcacatggcttcgttcgaggacgcagcatcctctccaacgccagcagacacgttggatcaaagtttatcctgaagctggatctcgagaacttttatccttccgtgaaatattcacggattgtggctattttcaggtctatgggcttctcacgtgaggtaagcctgtggttagcccggcttactacgtctgccccctattggggtctgaaagcaccggagaagaactgggagtactggcagctcatgcagaggcaccttccccaaggtgcgccgacatccccagcgttagccaatctgagcgccttcagtcttgacgtgcggctgtctggcctggcaaaagcctataacctcaaatactcccggtacgcagacgacttaacttttagcggcccaggtatgtccattcccgcactgaacgagtttatccccctgacaaacaaaataatatctgattga

SEQ ID NO: 13103 - RNA, 1380 nt, synthetic construct
  source 1..1380: mol_type = other RNA
atgggctggttcgacttcctacgtaaaatctttggcttcggccgggcagagtcttctcagggttcacagaccgtcgccgatgcaccactagcagaggcccctgtaaccgaatcatcagccgctgagtcccctagttccgatgttagcgactccgaggtgtcagagccagcggagaaacggaaagctgagcctaggcccaattctacagtcccccgccccgatgttcaccttcgcccattggactacgttccctcaacggtgccgattcctcccgacagagagattgtgtccgaaaagccttatagattcgccgtgcctgctccacggacaggagaatttctcgatctgagccgagattcagacgaacggtggttagaatactacgggctgccgcggcttaagactccagatgatctagcggactggctgggtgtgaccaccgggactttggcctggttgactcaccgttttagggaagggcatcgacctagcgatgaaagagatagccattaccactatcggtggatagctaagcgaagtgagggttggaggctgatcgaggcccccaagagcaagctcaaggacgtccaaaccaagatcctgcgcggcatccttgactccgtgcctgcccatagtgcagcccatggattcgtgccaggccgctctatcgtctctaatgctacaccccacagcggctcgaaattcatcctgaaaatggacctcgaagacttctatcctacagtgagatacagtagagtcgtagctatttacagatccctcggatttagcagggaagttagtctctggctggcaaggctgtctgtgtcagccttaccgtggtccctgaagtcccccgtaagcgctcacgagtacgtggtttataccgcacaccatctcccacagggagctcccacatcgcccgctctggctaatctgtctgcttacggtcttgacattagactggccggcatggccaacgcataccgcattaggtatactcggtatgccgatgatctcactttcagcggacctgggcttagtatcccagcattaaacgagtttattcccctggccaaaaagataatccgtgaggaacgatttacgatgaaccggcgaaaactgaaagtcatccgcaacagccagaggcagattgtcacaggcgtggtggtgaatgaaaagaccaacgtatctaggaaggagttcgaccaattgaaggccattttgtataactgcataaagcacggcccacagtcccagaatcgcgccgagattgcgaactttgcggagcatctgagggggcgcatagcccacatctcccaactgaatccgagaagaggagcaaaactcatgcggatgtacagtcagatcgggtggacctga

SEQ ID NO: 13104 - RNA, 1101 nt, synthetic construct
  source 1..1101: mol_type = other RNA
gataggccatatcactttgcttggccgggaccgagaacaggggaatacctggatctaagtactgacgctgacgagaggtggttgcaatactacggcctgcctaccctgcggacaccagaggaccttgcagactggttgcatataccaattggtaagctggcttggctgacactcagaacgaatgatggtcacaggcccgtgtccactgaggcctcacactatagataccaatggatcccaaagaggtctggaggatggagactaatcgaggcccccaaagaacagctccgactcgtccagacccaaattttacgggaaatactggatcgcatccctcctcactcgtccagccatggtttcattgctgggcggagcattattaccaatgccgaaccccatttgggccagaagtttatactcaaactcgatctgcaggatttctacgcctctgtccgttatgcacggatagtagctatttatcgatcattcggcttcagcagggaagttagcatctggctggcccgcctctcaaccactgccgtaccctggtctttgcagttccctacgcgcgacgcaaggtcctggacattccacgcctactacgcattccatctgccgcagggagcaccaacctccccagcacttgcgaacttgtctgcgtatggtctggacgtcaggttagctggcatggccgcagcgtacgggttaaattacacacggtacgctgacgaccttacctttagtggccccgggagggcttttcctagtctgcgcgaggtgatcccttttgccaatcgtattatccgaagtgagagattccgccccaaccagaaaaaggccaaggttatccgtagatcacagagacaaactgtgactggagtggtggtcaacgagcacctgaacgtgagccgccaggagtatgatcggctgaaggccattctacataactgcgttaaaatgggcccctcctctcagaaccgcggagaactggccgactttcctgcccacctgagagggaagatcgctcacgtgatgcttctcaatgaggatcggggcctcaaacttctggaaatctatcatcgaatcgactggagccggtga

SEQ ID NO: 13105 - RNA, 1359 nt, synthetic construct
  source 1..1359: mol_type = other RNA
atgggcctgtttgatatacttaaaaggttactggggttcgggccccgacctgatacaggaccagctgcaccaccaggccaacctgcaccaccaccggaaagtctccctggacccgcctcagccactattgctgagcccagtcctcagaaacgagcatccgcacgggaggcccatgaacagccagccaggagggttcgtgttgtcctgaaacctcttagatatcagtccaacctgatcccgacaagctccagccaggagatagtgagcggcaaaccttaccgcttcgccggtattgggccacagcaggggcagttccgcgatttaagccgcgatattgatcaacggtggctggattacttcggactgcctgtcttggctacccccgacgacttggcggcgtggttgaatatacctatcggccagctggcttggcttacacataggacatccagaggccatcgagccgaatccgtcaaacaatcacattacgtctatagttggatagcaaagcgctctggcgggcatagactcattgaatcaccgaaatcggacctgaagcacgcccaagagcagattctccggggattactggaccacgtccctccacacacggcagctcacggttttgtgcccggaaggtctatcctcactaatgcctccccccacgttgggcagcgctttgtgctcaaatttgacctccgggacttctacgtaactgtgcggtattctagagttgtagctatctttcgcagtctaggttattctcgagaggtggccatttggctggccaggctgacgacctcctcagtgccctggggcatcaaggcccctgtgaaggaatgggagctggccaagtatgcttctcgtcacctgcctcaaggagcaccaaccagccccgccctcgctaacttatccgccttcggtctggacgtgcgactagatggcttggcgggggcatacggactggagtacactaggtacgctgacgatctgaccttctctggccccggtaccgcaatcccagcccttcacgaactaatccccctcattcagaagattatcagagctgagaggttcagcagtaattggcagaagagaagagtgctcagaaatggtcagcgccagacagttgccggcgtagtggtgaacgaaaaactgaatgtgtcgagacgggattatgactctctcaaagctaccctgcacaactgccggaagctggggccgtcaactcagaaccataagagccatcccgagtttgcaagccaccttaggggccggattgcgcacgtccgccaacttaaccccgcgcgtggagagaagttgttggccatctaccagcagatcgactggagcaagtga

SEQ ID NO: 13106 - RNA, 1368 nt, synthetic construct
  source 1..1368: mol_type = other RNA
atgggcctcttcgattttctttcacgcctcattttcgggtcgcctgcttcccatgactccgcagccgatgtgccaccaacagctccggagccatcacgagccgatgctgcacctaaacacaacagcccgcctcccaagaggccatcccggattaagaatcggacgtccagtacccgtccggttagactcgtacctttgagatacgtgggttctctcgtccgtacgccccagcagcaagagctgacagccgagaagccctacccattcgcttcccgcaacctaaacccgcggactggagaagatcttgggtggctggatctgtcgaccgatggggatgaaaggtggttgcagtactattctctacccatactcaagacaccaaccgaccttgctcagtttctaggcatccctctgggacggctggcatggttaactcagcgcagacactctaattatcgccccgcaaccattcgggagagccattaccactatcgatggattactaagcgcagcggtggacatagactgatcgaagctccaaagcagcagctgaaacaggtgcaacagaagatcctgagtggcattctggaccgcgttcccgcacatcctagtgctcacggcttcgtcgcaggtagaagcatcttgaccaatgcccaggcccacgtggggaaacgattcctgctgaaactggacctcgaagacttctacactaccgtgaggtaccgcagggtagtcgccatctttagatctcttgggtacagtagggaagtggccttatggctctctaggcttacaacaagcgcggtccccagagaatttgtgggaccagacagcagacctggttggcaccacagtctgagcaggtatgcccttctgcatctgccccaaggcgcccctacctcacctgcactggctaatttgtccgcctacgctctggatgttcggttggccggcattgctggagcatatgacatggactattcaaggtatgcagacgacctgactttcagcggggaaggaagatctattccagcccttcaggagtttgttcctctggtccagcaaataatacgcgcggagcgatttcggcccaacaggtccaaacggagggtggtgcgggattctcagcgtcagatcgtggccggcgtggttgtcaatgagagaaccaatgtggcccgaaaggactacgatctgctgaaagccatcttgcacaactgtatgagggagggcccctcctcacagaatcggtacaatttggaaaacttcgcggagcacttacgtgggcgcatcgcgcatgtaacacaactcaaccccgagcggggcgcccgattactcgagatgtatctcagaatcgactggaactgctga

SEQ ID NO: 13107 - RNA, 1341 nt, synthetic construct
  source 1..1341: mol_type = other RNA
atggggctgtttgagttctttaagcgcctcttttttggcagccccgcacccgacgtgacgtcttctgctggctcggcatctgcccctcattcttcaccaactccggccgcccctgctaagtcaacgccaagacgccgccgaaaacgagtgcccggacagtcctcaaggccaccagtgcagcttcgttccctgcgctaccgaagtactttggtccagactccaaggcagcaggaacaagttcccactaagccctatgcatttgccgtcagggatttcgatgcctatcttgacctgagccaagatgccgacccccggtggttggagtattatgggttacctgccttaagaacccctcaggacctcgccaattggctgggcatccccgttggtagactggcatggctgacccagcagcatctgccggatagaagacctgcatccccaaaagaggcacactatcattaccaatggaaacagaaacggtctggcggataccgtctgatcgaagctccgaaagagctgctgaagaccgtgcaaacccagattctccgagaaattctggatagggtacccccccatcctgcagctcacggttttgttgaggggcgtagtatagtaacaaacgcgaggccgcatctcggccagaggttcattcttaagttcgacctggagaacttctatcctagcgtgcggtacagccgggtggttggaatcttccggagcctcgggttttcccgcgaagtcgccatatggcttgctcggctaacgacaaccgccgtgccacaggaattcagatcacctgacagcaggcccggttggcactggtccatgagtacctacaggtcccaccacttgccacagggggctcctacttcacccgccttagccaacctgagcgcctacgccctagatgtgagactgagcggccttgccaaggcgtaccatgtgacttataccaggtacgccgatgacctcacattcagtggcgcgccaaggacagttccagcgttaggagaggtgatccagctgacagaaaagatcgtgcgctccgagagattcagacttcaccctcgaaagcggaaagtcctgcggaataatcaaaggcaggtggtgacaggagtcgtagtcaatgatagattgaacattagtcgcaaagagtttgaccagctgaaagctaccttgcacaattgcattaagctcggccctgcttctcagaatcgcgcggaacatcccgagttcgcagctcacctccggggacgaatcgctcacgtccggcaactcaacgcactacgtggggacaagctgatggctttgtttcagagaatcaactggaaccgctga

SEQ ID NO: 13108 - RNA, 1401 nt, synthetic construct
  source 1..1401: mol_type = other RNA
atggggctgtttgagttcatcaagagactcctgtttggatccccagcgccaaccacagccacacagtctggcgatgatagccccctagagcgcccagccgagtctggttctgcatctgctgcgacgtccgctatgactccagccgagcaacaccggcaacggatgcgctaccaaagtcgccagcgaaacgccggccggagggaaagagtcagggtgtccttgaggcccctgcgttacgaatcgagcctggtgcccacatcggcatcccgagaacaggtcgccgaaaagccctacttgttcgccacttgctctgtggatccgcgacagggtccacgccatggctacctggacctaagtcaagacgccgatccacgctggctcgaatattatggacttcctgtgcttagaactccacaggatttggccgattggctccagatccccgtgggcagactggcttggctcacccagcggcaacatcgggagaggaggccacccaccgttagagaggcacactatcactatcagtggatccgtaagagaactgacggacacaggctgatcgaagcccctaaagagaagttgcgagccgtgcagacgcagattctggaggggatccttaaccacgtccctccccatcctgcagctcatggtttcgtggaaggcagaagcattgtcactaatgcaagaccgcacgttgggcagcggttcgtcctgaagttcgaccttgagaatttttacacgacagttcgctatagccgggtcgtcggcatatttcgcagcctgggcttctctcgtgaggtgtccctgtggctagccaggcttaccactaccgcactgcccgagcaggtgaaaaaccctgaaggcctccccgggtggcattggagtctcgcaccctatagggcagctcatctgccacaaggagcccctaccagccctgccttggctaatctgtcagcctacggtctggacgtgagattacagggactggcgaaaacataccacgtgaactacacccggtacgcggacgatctaaccttctccggggaggctcgtgtacttccggctctctcagaatttattcctttatgccagaggatagtgagaagcgaacgatttgtattgaacctgcgtaagcggaggctggtgcggagtaatcaaaggcaggtggtaactggggttgtcgtaaatcagcgcaccaacgtttcaaggagagagtatgacaggttaaaagccaccctgcacaactgtctccggcagggacctcaatcacagaaccgcgaggacgttgagaattttgctgcccacctccgcggacgaatcgcacatgtgacacagctcaatccggctagaggcgctaaactgttagaaatgttccagcggattcactggacagggtga

SEQ ID NO: 13109 - RNA, 1317 nt, synthetic construct
  source 1..1317: mol_type = other RNA
atgggtctgatcacactgctgaagaggatcctctttggaagcgcaccatcaatcccgcatgcaggagggcaacctgagcctgccgcggaaagcacaggagatcataccgctagagtgggcgctgtgagccaaagaccctccggtccagtgagattagcccccttgcggtaccagagtagcctggtccggacaccacctgacagggaacatgctgacggggccggcaaaccataccggtgcgcacacatagatccgagacggggcggctaccttgacctctcgaccgacggggatgctcgctggctggagtattacggactgccccacatagctactccagagcaacttgctgtttggctccagctgcccttagggaaggtaggatggctgacggatcgattctgtcagaaccatcgcccccagaacactcgtgaagcgcactatcattaccactggcttgccaaaaggtctgggggccataggctgatcgaggcccctaaaagccagctgaagcaggtacagcagcagatcctccgtgagatcctctgcagagttccccctcacactgccgcgcatggctttacagcgggacggtcaatcagaaccaatgctcgcccacatgtcggtcagcgggtcctgataaaatttgacctggaggatttctacccctcctgcagatacgccagagtggtggcaatctaccgctcccttggctattgtcgggaagtcgccctctggctggctcgcttaacaacctctgccgccccggctaacctaaggttccccgacgggaacctgcggtccctaatgccttatctccctcgccatctgccacagggcgcaccaacttctcctgctctggcaaatctcagtgcctattccttggatgtgagactcgccggtttggcagcccgctatcacctgaagtacacccggtacgcagatgacttgaccttctcaggggacgggcactctattcccgccctacgagagattcttccactgattacccgtatcgtgcgcgacgaacgctttagggtgaaccgtaaaaaaaggaaggtgattcgaaacaatcagcggcagactgtcacgggcgttgtggtaaaccaacacctgaatattcgaagggacgagttcgaccggttgaaggctattcttcataattgtcgaaagcacggtcccgcaagtcagaatagggatgatcaccctgattttgcagcccacctgagaggcaggatcgcccacgttatgcaattgaataggcaccgaggagaaaagttactcgcgatgtatgaccagattgattgggccagatga

SEQ ID NO: 13110 - RNA, 1287 nt, synthetic construct
  source 1..1287: mol_type = other RNA
atgggccttctgcgcttgctgcagaggttgtttttcggaagttctgcgaccgctgaagaacctcggcaagacgtcagacccagtagccaatccaaaccttccgcctccgccgagaggcagagagaacggttggcacctctgcggtaccagagctcccttgtcgcaacgcctcgaagccgcgaggtggtggaagggtcctcaccaccgtatcggtttgcgcatcgtgatgctgtggggggcgcgtatctcgatctcagtcaagacgtggatcccaggtggcttgactactacggcctgccacatctgagcacgcccgaggacctagcaggctggctgagattgcccatcgggaaggtggcatggctcacctaccggttttgcgaaaacaggaggccgcaatctgccaaggaggcacactatcacttcagatggatccgtaaacggtctggcggacatcgactgattgaggcccccaagaagactctccgcctcgtccagatacagatcctgcgcgaaatcctggaccggattccaccacatcctgctgctcacggtttcgtaaggggaaggagcttaacaacaaacgccgccccacatgtggggaaacgcgttgtcgtgaagttcgatttggataatttctacggcagcgtaagacagtcacgcattgtcgccatctttagatccctggggtacagtcgagaggtagccctgtggctcgcccgacttaccacatcagctgctcccggatcgttaaaactgccactcggcgagtcaacttccatttggaaatatatgcctcgtcatctccctcagggtgcaagcacaagtccggccctggctaatctgagcgcattcggactagatattcggttagccggtctggctagagcctggcacgttgactatactagatatgccgatgatctcaccttttctggcgaccccaaatttgtcgccgcagtgggagacttcatcccattagtgcagcagatcatacgggacgaggggtttcagtctaagaggtcaaaaaggcgcgtcctgaggaccaaccagcgccaaactgttacaggtgtggttgttaatcagcacatcaatgtgtctcgggcaaagtacgatagactcaaggccaccctgcacaactgtgtgaagcacgggcccgcttcgcagaaccacgacctgcatgccgacttcgctgcccaccttcgaggacgcattgcacacatgcacagacttaatcctcatcgtggccagaagctactggcgttgttcgctaaaataaagtggtga

SEQ ID NO: 13111 - RNA, 1260 nt, synthetic construct
  source 1..1260: mol_type = other RNA
atggggctgtttgattttcttaggcagctgtttctgcccagctcccgggatgtcgcctcacctagccaccgcagaagggagagagctcctagacgccgcgttaagctcaccccccttaggagaaggcatggacagcggccctggtccgagccaatagaggaagaaaccccgccctatcggtttgcccaatacggaatcagagatggcaggttcctggacctaagcagagacggagatgagagcctgctcgacagcttcgatcttcctgttatccatactccggagcagctcgccgagtggttgcaaatgccactgggtcaggtggcatggttgacacagcgcttcagcgacgggtatcgcccagagaatgagcagcaggcgcactatcatttcagatgggtcaagaagcgatccgggggctggcgcttgatcgaagccccaaagcagaaactgaaacaggtccagacacaaatcctccgggaaatcttggacagggttcctccccataattgcgcgcacgggttcgtacgacgtcggtccatcgtgacaaacgctcgacgccacgtgggccaaagagccattttaaaactcgacctggaagacttctacgctaacgtggggttttctcgggtggtcgggatttttcgtggactcggatactcgcgggaggccgctctgtggttaggtaggctgactacctccaaggtgcccagtaacctgaggtacccagaacggttctcaagtgccttctttcccttccttaagagacatctaccccaaggcgcaccttcttctccagctctggcgaatctgtcagcttacggcctcgacgtccgcctttctggccttgccaggagttattctgtcgaatacacccgatatgccgatgacttaaccttttccggcccccagtcttttattagggcactccctgtattcatccctttgacgtcacagataatacgagacgagcgatttcgtgtgaatagaaacaaacgtaaggttgtgagaaacaatcagcaacaggtggtggcaggtgtggtcgtaaacgctcacacaaacatgccgcgtcgggaattcgatcggctcaaagcaattctgactaattgtgtgcggcacggtcctgcaagccagaatcgcgagcaccatgcagatttcagtgcccacctaaggggacgggttgcccacgctgtgcagctgaacccacacaggggcaataaactgagagagctgtaccatgccattgattggaagcgctga

SEQ ID NO: 13112 - RNA, 1296 nt, synthetic construct
  source 1..1296: mol_type = other RNA
atgggcctgttggactttctgcgcagattacttggcggtcagccagcgtcgcccaatgatcaaccctcagccccagacacaagcactttagtacgcgatccccggaccggaggtgttacaccggcagcaccaaaactcttagctcctctgcggtaccgatccagtctgaatagaacagccactgctgctgagagagttgccgaactgccttaccggttcgcaaacctcagcgtggatggcgacggctacttggacttgtccaccgacgcggatgaacgatggttggaacattttgacctgccacacttgagaacgcccgaagacctagcaaatttccttcagctgcctttgggtaagctcgcttggctgacacaccggttcgaagagggaggcagacctgcgggggaaaaggagagccactaccaccatcattgggtcaaaaaaaagctcggggggcaccgtctgatcgaagcacctaagcagaccctgaagatggtccaacgccgtattctgcgcgacattctagatcacgttcccccccatcccgccgctcatggatttgttactggcaggtctatccggaccaatgctgagccccacgtgggaaaatccgtgcttctgaagttcgatttgcagaacttctatccctctgtgaggtattccagggtggtggccattttcaggtctgtgggcttctcaagagaggtggctatctggctgggaaggctgacaacaagcgccatcccagcaagcctgaaatacccacaggatgaccctagtgcactttggatgtattatccacgccacctccctcaaggcgcatgcacctcaccggcccttgccaacctgagcgccttcgctctcgatgtgaggcttaccgggctcgcgcgcaagtatgatgtgcactacactagatatgctgatgatttaacgttttccggtaccggccgatttgggggcgcccttagcgagtttatccctctggtcacccatatagccaagtccgagaggttttacattcacaggcaaaaacgccgggtactaagaggatctcagagacagactgtcgccggagtggtcgtaaatgagaaacctaacgtgtcacgacgcgacttcgaccgtctgaaaagtatactccacaactgtgcaaagcatgggccatctactcagaaccatgacgaccatccggattttgccgcccacctcgccggaaggattggtcacgtcctgcacctcaatccccatcggggggctaagctgcgagagctgtacaaccagatcgactggagtcggtga

SEQ ID NO: 13113 - RNA, 903 nt, synthetic construct
  source 1..903: mol_type = other RNA
aggccagcgggcgttagggaagcccactaccattaccattgggtgaagaagaagacagccgggcacagactcatcgaggctcccaaacagaccctgcgtgcggtacagcagaggatcctgcgcgacatcctggacaaagtgccaccgcaccccgctgcacatggattcgtctctggccggtccattcgaactaacgcagagcctcatgtgggtcagaggattctgctgaaattcgatctgcagaacttctaccccagtgttaggtatagtcgagtggtgtcaattttcagatccgtgggttatagtcgggaagtggcaatatggttagcccgccttaccacttcagccatcccggcctccctcagctttccaaagggcgaccccagcgctttgtggacatattaccctagacatctgcctcaaggggccgctacgtcgccagctttggcaaacctttccgcttttgctctagatgtacgcctggctggtctggcccgaaaatacgacgtacggtacacacggtacgcagacgatctcacctttagcggctcacaccgcttcggcggagccttatctgagttcattcctctggtggtgcacatcgcaaaatctgagcgttttgttcttcatcgtcagaagcgcaaagtcctgaggagctcccagaggcaatctgtggcgggagtcgtcgtcaatcaaaaggccaatatcgctagacacgagtttgatagactcaaggcagtcttgtataactgcgtgaagcacgggccctcaacccagaaccacgatgctcatcctgactttgccgcccacctcgcaggcagaatagggcatgttttacacctcaatccagcccggggagccaagcttagagaactatataatcggattgattggagccgctga

SEQ ID NO: 13114 - RNA, 1338 nt, synthetic construct
  source 1..1338: mol_type = other RNA
atggggcttttcgactggctaaagggcatgctaggtggggctcccccatcaccaacccctgcagctccttcaccacccgcagctggcgtacgcatcaatccatttacacaagaagtggtccagctggggatcgatagacggacatcggctccttccttgcatgctttcaggtacagaagctctttggtgagaactccccctagtcgcgaattcgccgctaaaaggccatacccctccgcgcagcgccaagtttataagggctggctggacttgacaactgacagcgacccgcgatggcttgagcactttgggctcccccctcttaaatcacctgatgatctggccaagtggctcaacgtccccttaggccgcctcaattggcttagcggtaggtatcgagatggcggtcacccgggaaccgcaaaagaggcacactatcacttccaggtgatcccgaaacgttctggaggagcgcgcctgttagaagccccgaagccacagctgaaggccatacagcagcggatcctccgggacattctggataggataccagtacattcccaggcacatggtttctccaaaggccgttctattgtgactaatgccgaaccccatgtggggaagcgaatcattctgaagtacgatctcgagaatttttatccttccgttcggtataacagagtggtggccatttttaggtccatcggatttagccgcgaggtcggaatttggctggcccgactaacgacaagcgccctgccctggaacaccagtgacattcctagactcggcgagttgagcgggctggagactaggggccgatactgggagctctatggtagtcgtcaccttccccaaggcgctgccacttctccagccctggcaaacctgtctgcttatagtttggacgtacgcctgtcaggactggcgcggaagttcgatgcggattacacccggtacgcagacgacataacattctctggcaccaaaaggtttgcaggagccctgtccgattttatacctttagtcgaacgggtggttcgcgccgagaagtttgtggtgcacaagggaaagagaagggtgctgagaaacaaccagagacagagcatcacgggcgttgtggtcaatagcaaacccaacattcggcgcgaagagttcgacagactgaaggccatcctgcacaactgcctcaaatacggtcctagtacccaaaatcgggacaggcacccaagattcgctgaccatctcagagggcgagttgccttcgtctcacagcttaatgctgataggggggaaaaattgcgtgagatgtacgataggatcgactggcggaagtga

SEQ ID NO: 13115 - RNA, 1305 nt, synthetic construct
  source 1..1305: mol_type = other RNA
atgggtctattcaactggctgagaaccgtgttgtttggcgctcccccacaacccacaggggacttcacacccgatcaacctcctcctgctggacgcgacgtgcacccagtgacgggagaaagagtctcccacagccgcgcacgcttagacaggctcgagtaccgaagcagcctgattcgtactccatccagaagagaatcagccgggtcagatcccccctatcagtttgcccataggaatccacgaacggggcgatggctggacctcaccactgatgctgatcccaggtggctggactattacggactgccgcacctgaaaacacccgctgacctggcagattggcttgagatgcccatcgggcgcctgggttggttaacccatagattctgcgacgataggcgcccgccatctgcacagacagcccactaccacttccagtggctgaacaaaaagaccggcgggcataggttgattgagagcccaaaaacatcactgaagggggctcagcggaagatcctctccggcattattgagcgcatccctccacacaggaatgctcacggattcgtggccggacggagtattttgtcgaacgcccgtcctcacgtgggcgcgtatgctgtcctcaagctggatctggagaatttttatccctcagtgcggtacagtcgggtggtggccatctttcgctctgttggcttcagtagggacgtcgcgatatggcttgctagacttaccacgagtgccgttcctcatgatattcctagaccagctggcggccatgcagcagtctggccttatttcagccgacatctcccacaaggcgcgcctacttcccccgcactcgcaaacctctctgcctactcgctggacgtaaggctaactgggatggcccgtgcctatgatgtaacctacacacggtacgccgatgaccttacctttagcggaagctatcgcttcgctgccgctattcgggactttgcaccgctggtcaccaggatcgtgagggatgagcgatttaaggccaatcggtctaaacagagaataatccgtcggaacaagcgacagactgttacaggtgtggtggtaaacgaaaaacctaatatatcccgggatgcctacgacaccttaaaagccatcctgactaactgtgccaagcggggcccctccacccaaaacagaggagcccacgaaaatttcgcggcacacctccggggtagaatcgctcatgttgcccatcttaatccgcgcagaggcgcaaagttgttgcagctatacgcgactatcgactggtctaggtga

SEQ ID NO: 13116 - RNA, 1317 nt, synthetic construct
  source 1..1317: mol_type = other RNA
atgggcctattcgaccttctgcggagactgctctttggagcgccagcatcgccaaccgacactgctggctctagccctgctcctcgagccagccagatgcctgttgctcccaagtccttgcccgtagccacacctgcaggtaaaagaggtcccgcaaggaagttgcccccatttcgctatcagagcaagccacgcagaactagccccaaggctgagagagttgcccggaggccgtacactttcgcagcgccaactgctctgggggaatatctggatctgtctacagacgctgaccttggccttttggatcacctgggattaccgagactgcagacacccgcagatatcgcagagtggctggaaatcccactaggtcggcttgcatggctaagcgggcgattcttcgaaaatcacaaaccacaaagtgagcgatccgcgcactataatttcagatggttgaaaaagcgcagtggagggcataggcttatcgagtcccctaaaaaacagcttaaggcagtgcaggagaagatcctgcgggaaatcctggacaaagccgatgcccaccccagagccttcggattcattgctggacggagcgccattctcaacgccagggaacatgttgcaccttatgtgctgctgaagttcgacctggaaaacttttacccctctgtacggtattcccgcgtggtggccatttaccgtacattagggttttcaagagccgctgcgatttggctggccaggctcacaacaagtgcggtcccgagcagcatgagttttccaggcggcgatccttacgggctgaacccctacctctcacgccatctgcctcagggagcacctacgtcaccggcactcgctaacatgagtgcctacggcttagacgtgagactaaccggactggcccggtcttttggggtcacttacacccgctacgccgatgatctgaccttctctggcgatcaaaaatttgccggcgccctccgagacttcatcccattgaccgagacgataatcaggaaggagaggttctttctgaatgtctccaagcgtcggatcatacgcaggtctggccggcaaaccgtgaccggtgtggtcgtcaatcagcatccaaatctcgccagggctgagtttgaccgcctgaaagccatactctttaactgcgtgcgtctcgggccctcaacccaaaaccgtactaatcaccctcagttcgctgcccacctccagggcaggattgcccatgcagcttccattaacccctcccgcgccgctagattgcgagctttatatgaccggattgattggtcaaagtga

SEQ ID NO: 13117 - RNA, 1290 nt, synthetic construct
  source 1..1290: mol_type = other RNA
atggggctgttcgctttccttcgtcgtatcctcttcggagcacctgaggatgcggccgatgatggaggctcaaccgcaccccgccaatcaccgccaccacaatctcccgctacagcccggcgacgaagaactccactgccacctctccggtatggctccaaacaccccaggacacctgccgcccttgaacaagtagcagagcgcccttatcagtttgcgaatctgggacccgcaggcagattcctggatctgtccacagacgccgacttaagtcggctggagcagctggaactgccacgcctcctgacacctgcggatgtggcacattggttgaacatgccgcctggacgcttggcctggcttagtggccggtttgagccacagcagagggcagcatccgagaaagccgcccactaccactacaggtggatcaggaaacgctctggtgggatgcggctgatcgaggcccccaaggtacggctcagacaggtgcagacccgcattctacgagaaatactcgatcatgtggctgcccatgaccatgcgcacgggttcgttagggatagatctgccctgaccaacgctaagcctcacgtcggcagctacgtagtccttaagctggacctggagaacttttacgctagtgtgagatactctcgcgtcgtcgcaatctttcgcgccttaggcttttcacgggccgctgcactctggcttgcaagattgaccactagcgcagcccccgcttccctaagtttccctgacagatcccctctcggcctcctgccgtatcttccccggcatttgccccagggggctccaacatctcccgctctggccaacttgtccgcctggagcctggacgtgagactgactgggctggctaaaaagtatcacgctacctatactagatacgcggatgacctgacgttcagcgggtcgcacagatttgctgccgcattatcagaattcataccactcgccgaaaagattatcaggtcggaaaggtttaaggtgaatagggctaaacgcaaagttttgcgaaggagcggaagacagactgtcacgggagtggtgaccaatgcccgtccgaacattgctcgggaggactatgataggcttaaggccattctccataattgcgtgcgcagaggcccaagcacccagaatcacgacagccgaaaggacttccaagcacacctacggggtcgggtggcgcacgttaggtctgttcatcccgcccgtggtgctaaattattggccctgtaccagaggatcgactggaagcgatga

SEQ ID NO: 13118 - RNA, 1047 nt, synthetic construct
  source 1..1047: mol_type = other RNA
atgggcttctttacgtggctctttaggtggctgggctggggcgctgattccagagacttccccagtgacaccgagcgtaccagcgatttaggagtgcgaaccagctctggatctcttaatcgctcaagtttcgacgactctgatgccccgcgacggaactcagacctcacagagactgccattcactcgaactccgagcggtccgtgactactagacccgtcaccagtcgccctaagttgacattgtcacgaagggaggaggaacgcatacggaatccgcctgaaaggtccccctgtgtggaagtggttggggagacaccatatcggtacgcacggtttggcagtaccactgggcgacacctggacctgagccaggatggtgacgactcccagttaaacgcccgctgcctgccaatcttccacacaccagaagaactcgcaggttggcttcagatcccccttaatcaactggtgtggctcgtgcatcggtttagcgctggcaggcctccagcatctgacgctgctcactacgtgtttcaatggttgaagaaaaaatctggcggctggcgtctaatcgagagcccaaaacccattctaaagagggcgcaggtaaagattctgcgtgagatcctggacaggatccccgctcacagaagcgcccatggattcgtcgcaggaaggtccatcgtaactaacgcagaacctcatgttgggcaggatgtcgttgtggccttcgatctgtctaacttctacacaaccgtgggatttagtcgggttgtcgccattttcagatccctcggttactcaagagaagccgctatatggcttgggctgctcaccacttccgccattcctggtaatatggcctttcccgagagaaatccatatgcctttgatccctatttgaagagacatctgcctcagggggctcctacatcgccagccctggcaaacctgagcgcgttcggactggatgtcaggttgaccgggttagcgcgcagcttcggcgcaacgtatacgcgctacgctgatgacatctcactctga

SEQ ID NO: 13119 - RNA, 945 nt, synthetic construct
  source 1..945: mol_type = other RNA
atggccttcttcgcctggttattcagatggcttggctggtctaccgacccccgcgactcttgggatgcacctgctcctcctcaggctgccgatagaagtgccgtgcggacagccactttagaggccccgccaagagctccatccagacctcccagcgagccacttcctcggccaaggctgacacccaccaggagggacaccacacgccacgatgctcgcaagtcccacgcaaccttcgtcgaagtaactggggccgtgccgtacaagtacgctagatttgggagcggtacgggtcgccatctggatctttctcaggatggagacgaggccagactgcagcagaggggactcccggttttccgcacccctgagcagctggcagactggctcggtgtgccactaaaaaaggtggcttggcttgtacaccggttcagtgctgggcggcctgccagtgtcgaacaggcacactaccactttcgatggctgaagaagaagtccggcggctggcgtctcatcgaatcaccaaaacaaactctcaagcaagcgcaagtcaaaatattgagagagatcctggaccgcgttcctacacacagcgcggcccatggatttgtgacggggaggagcattctgactaatgccaaaccccatgtcggacatgcgatgctggttaaactggacttaagtaacttctatgccacagtggggttttctcgggtggtggcactatttagggcgctgggctattcacgtgaggctgcaatttggctgggcctcctgaccactagcgccatcccaggaaatatggcatttcccgcccgggatccctatgccttcgaaccctatctccgacgtcatttgccacagggcgcacccacctcccctgcattggctaacctctcagcctacaggctggacctgcgacttgctggcttgtccaaatcgtga

SEQ ID NO: 13120 - RNA, 1356 nt, synthetic construct
  source 1..1356: mol_type = other RNA
atgttcagttggctcgggggaggtgaaccgtccagccctagccaaccgaccactgacagaggccaacagccagacccccaacattcccccacacccccagcagatcatgggccagacaggacttctcggagtaccacaccccctcgtcagcgacctcggattcgacggttcccaccaaagcgcaatcccaggctgaacgtgagatcccatgatcagcagcatcggcggaaccgaaaaaaagcaagttttctggaagtgacgggtgcaagcccttacaggtttgcccggttcgggagccaaacaggacggtacctggatttttctcgcgacggtgatgacgcgcgtttgcgagacagaggcctccccgtgtttcatacccccgaagagttggctgagtggctcggcctaacacttaataagctggcttggttggtgcacaggttttcaaatgggaggccagacagtgtagaccacgctcactatcacttcacttggcgcaagaagaggtcgggtggggtgcgtctgattgagtccccgaagcagaccttgaaggaagcacaggttaaaattctgagagagattctggatcgggttcctactcacccggcagctcacggcttcgtagcagggaggtctgtgctcactaatgctaagtctcatgtgggacagggcatcgtcgtgaaattcgatttgaccaatttctacaccaccgtctcatattctcgagtcgtcgccattttccgaacactgggctacgcgagagaagctgcgatatggcttggtctgctgacaacgaatgccgtgcctggaaacatgccattcgaccgccagaagctgtacagcatcctcccctattggagaagacaccttcctcagggcgcgcctacttcacctgcattagctaacctgtctgcctatcacctcgacgctaggttaaccggcatggcccgtgcctttggcgccgattacacccgctatgccgatgatctgactataagcggaccagagacattatcctacgccctgagaacactcatccccctagtcgagcagatcatcagaagagagaggtttcagagcaatcggtccaagagacaggtgctgcgggctcaccagcggcaagtgatagccggcgttgttgtaaacgtcaaacctaacgtgtcaagagctaaccttgataggctcaaagcaaccctgaccaactgcgtgcgcatgggaccatcgacgcagaaccgcgaccaggttgaagactttcaggcccacctacgtgggcgcatcgcccatgtcctccaattgaatcccgcccgcggagagcagctgcttgccattttccataggatcgattggaggcgctga

SEQ ID NO: 13121 - RNA, 1506 nt, synthetic construct
  source 1..1506: mol_type = other RNA
atgggcctgattcgatggctgttgcatcggctgggatggcggccagcaccacttacgcggtcgttgcccacagcaggtccggtttctccagccccagcaacacctgctccgctggatacgccccctttagacactccccccctagcccaggcttcacttacccctgcctggccggtagtagcttcccctgtggtggctccacccgctcaagcgtccccaattgtggcctcacccaatcccgatagtgtgcctccaagcattctgtttgaccctcccgcggtggctccagccaatagtcgcaagaggccaagaatttggagccggacaagcaggatccgactcgtccctacgcggcggaagcaacagaggcaggcagcacgtagaccagctatgctggtggaggaaacacagggtgcggcaccctaccgatacgcccgttatggatcaaggaccggtcactacctggacctatcaagggatggagatgtcgtgcgacttcagaggttcggccttcctgagtttcacaccccagagcagctgagccactggatcggacttcctctgaaccgcgttgcttggctcgtgcaccgctttagtggagggaggcccgagatggaggaactagcacactaccatttcagatggatcaagaaacggctcgggggttggcgtttaatcgagtctcccaaaactaccctgaaattggtccaaaccaagatattgcgggagctgctggacaaggttcctgtgcatgcagccagtcatggatttgttaagggccgctccattctgacaaacgctagagcccatgtcggccagagcgtcgtactcaaattcgatctcaccaacttctatacaacagtgtctttcgcccgcgtcgttgccatattcaggtccctcggctatagccgggaggtggctatttggctcggtctgctcactacatccgcagtccctgggaacctgagattccaggaccagggaccttacgccctggtcccatatttgcgcaggcatttaccgcaaggcgcgcccacttctccagcccttgctaacctctcagccttcggcctggatctgcgcttgactgggctggcccggagttttggagcacactacacccgttacgccgatgacctgaccctttccgggcccgaagaactggggaaggccttgagaaccttaatcccgctcacacaacaaatcatacgacaggaaagatttgttctcaatcccgaaaagagaagggttctgagatcccaccagcgccagactgtgactggcgtggtagtgaaccagaagaccaatgtgtctcgcggcgactttgaccgacttaaggccattttgaccaattgcgtgaaacagggccctagcacccagaatcagaaaatggtcgaggatttctatcaccacctccaagggaggatcgctcatgtgtctatgctgaaccccctgagagggcagaaattaacgctgctatttcaggcgatcgactggactagatga

SEQ ID NO: 13122 - RNA, 1332 nt, synthetic construct
  source 1..1332: mol_type = other RNA
atgggcttgattcgctggttgatgcagaggcttgggtggggttcctcacgcggaccagtgccaactgagagcaacagcagacccgccagtgaacaggcctctgcaaagtcagaaaatcttacccctacaagtctgcgcacgacacggcgctcatatccaccaggaagagcacggcttgtcgccagcacacgcgtcgagtccgacattacacgaccctcgatggcgtacgtagagacggaaggcgaaccctataattatgcacgctacggatctcaaaccggaagatacctagacctgtctagggacgccaatgaggctcgcctggctcagtttggcctgcctgtactgaggacccccgacgatctcgcaaattggatcggcctgcctctcaacaaagttgcctggctggtgcaccgtttctctgctggtagaccagccactgttaaggacgcgcattatcacttccattggcttaaaaaacggcaaggtggatggcgtctaatagaggccccaaaagccatgttaaagctggtgcagactaagattctccgcgaactgctcgatccaatacctgtccatagaagtgcacatgggtttaccgtgggacgaagtatcgttacaaacgctctcccccacgtgggccagcatgtggtcctcaagctggacctgtctaacttctacacaaccgttagcttcgcgcgggtagttgcaatcttccggggtctgggctattccagagaagtcgccatctggctcgggcttttgaccacttccgctgtgcctggcaacctgggcttccaggaacaggggccgtatgctttggtagcgtacttaaggagacaccttccgcaaggtgcccctacaagccccggcctagctaacctgtcagcttttggactcgatgcccgaataactgggctcgccaagtcattcggggcaacctacactaggtatgctgacgatctgaccattagtggcagcaaagagctgactcgagggctgagagccattatccctttggtgcagcagatcgtgaggcaggagcgtttttttgtgaatcacaagaagaggcggatcctgcggagccaccagcgacaatctgtgacgggcgtggtggtcaacgagaaacccaacattagccgtggggattacgaccggctgaaggcaatgttaaccaactgtcagaggcatggcccctcctcccagaatagagatggagtcgtggatttttacaatcacttgagggggtgcattgctcacgtgtccatgctgaatccggttcggggacagaaactcaccgagttattccaagtcatcgactgggccaggtga

SEQ ID NO: 13123 - RNA, 1338 nt, synthetic construct
  source 1..1338: mol_type = other RNA
atgggactcctggcattcctccagcggctgttttggggagctcctccgagggagtcatctatggtggggagaggaacagccggagctccttttggcgacccgctgagccgggataactctctgagcggtcctgccaccagcggccaagtcctgtataagtcccggcgtggtgtgttccagaatcccgcttcaaacaggtacgcacctcacggagacaggacaggtagggggcaggtggtggaacagtccccctatagatttgccaggcgtgacctgcccagcggaggtttcatcgatctgaccggagatcaccggccagatgtgctgaatcagtacgggctccctcttcttcgcacccctgatgatctggcacggtggctatcaatccccctgccacggctagcgtggttgattggacgattcgacgataatcacaggcctcagtccgagtctgagtcccactaccactttcactggattaaaaagaagtcaggggggttccggctgatagaggcacctaaaagtcaactcaagcagattcagcttcagattctacgaggcatcttggacagactcgtgccacaccccgcggttcatggattcgtccccggtagaagtattcgttctaatgccgcccctcatgtgggccaggcatgggttcttaagttagacctaaccaacttttacccatccgtatcgtttaaccgggtggtggcaatcttcaggtcactgggctattgccgtgaagtggccatatggttgggccgcttgacgacaagcgccattcccagcagtttgaacagtccagatagacgcatggcaactgtctggccatacctcagacgacacctgccccaaggtgccccaacttctccagctctcgccaatctgtccgctttcgggttagacgtgagactgcaggggttagccggcgcatatggccttcgctataccagatacgctgacgatttgacactgagtggaccccagcgagccgtagcagctcttcgcgagatcataccatttgccgggtggattgtgaggcaggaaaggttccaccttaacaaagctaaaagacgcgtcctgcggcgctatcaacagcagtccgttacgggcctcgttgtcaacgaccaactgggcgtaccgcgcgcggaattcgaccgactcaaagccatcctgactaactgtctgcgacatgggcctgccagccagaatagggaggcccatccggcctttgctgcgcatctgttgggccggatcgggcatctcgctagcgttaatcccggccgcggcgtcaagctcaggtctttataccaacagatcgactggaatagatga

SEQ ID NO: 13124 - RNA, 1311 nt, synthetic construct
  source 1..1311: mol_type = other RNA
atggggctgatagcctttctgaaacggctgttctgggggacccctactcccagttctgtgccttccgccgagagtgccgactcgtcaaggctggccgcggatagcacctccagctcagcaaaaatcatcgtcaggcgcaagtttcgaggcccagatctgctgcgattcagtgccaccgtacgtagacagggccggaccgtacaagtggttcgggggcagccatacagatttgcccggccgttcgtgatcagctctgtggattacggggacctgtccactgacacaaatcccgccgccttgggcagattcgacttgcctgtgttacggactcccgaggatttggcgcattggctgggcattcccctcggaagagtggcgtggcttaccggccgattcttcgaaaatgagcggccccagtcagatgacgttgcgcattaccactttcattgggtaaaaaagaagtctggggggtatcgcctgatcgaagcaccaaaagcccttctgaagttcgcccagactcaaatccttagaggcatactcgatagggtgcccgctcaccctgcagctcatggttttgtcaagcagagatctattaggtcaaacgccgctccccacgtaaagtcagcatgggtcatgaaactcgacctatccaacttttacccttctgtgactttcagccgtgttgtcgcaatcttccggtctttaggatatagccgcgaggtcagtatatggctcggccgcctgacaacctcgactatcccatccaacctgagcgcacccgacagacgagagaatacagtgtggccatatcgcttaagacacctgcctcagggagcaccgacaagtcctgctattgccaacttgagcgcctttagcctggatgtgaggctaaatggactagcagctaagtaccacgcccgctacacacgctatgctgatgatcttacgctgtctggtaagggcaaatccatcccagctctcagagagattattccaatggcagaatggatcgtgcgtaacgaacgcttccacctgaataggtccaagaggcgagtccttaagcagcatcaacgccagtcagttaccggaattgtcgtgaatcaaaagctcggagttggtcgggccgagtttgaccagctcaaagctatcctcaccaactgcattcgtcagggaccggtgagccagaacaggaatcaacacaacgactttgcttcccatcttaggggtaggatagggcacttcaaaagtgtgaatgctgaacggggcacaaaactcttgaagctgtattaccagattgactggacgagatga

SEQ ID NO: 13125 - RNA, 1311 nt, synthetic construct
  source 1..1311: mol_type = other RNA
atgggcttgctgtccttcttaaaaaggctgctgtttggagccccagcctctaacgacgctccagctcggcctaagccatcaaatgatcctgcttcaagaccagcaactccacccgcatcccccccatctactgacgggacagctacaaaaaagcgggtccgcttgacccctatgcgaaggcagggaccaagggagcgtggccaacctgcacgggaaaccgccaggccaccctatccgtacgcttttcccacttacggaggcaagttcctggacttatccgacggaaccgatttcgagagactccgacagtttggactcccggagctggtgtatccagggcagctggcagagtggcttcagctccccctgggccatgtcgcttggctgacctaccggttctgcgatggtaacaggccccagactgcagggcaggctcattatcacttccattgggtgcgcaaaaagtctggggggcaccggctgatcgaagcaccgaagagtcgcttgcggcgggtgcaagaccagattctgcgcgaaatactcgatagggtgccctcacatcccgctgcccatgggtttgtgagaggccgcagcattgttacaaacgccgaaccacatgtgggccacaagttcgtctttaagctcgatctggagaacttctacccttccgtaagatatagccgagttgttgccacattcagatctttgggatacagcagagagattgccatatggctcgcacgcctcaccacatcactcattcccaccgaccttcctacgcctggccaaaggcccggtatgctgtacgcgtactttggaagacacttgccacagggagcgagcaccagccctgcgatagccaacctgagtgcactcggtctggacattcgtttatcgggtcttgccaatgcgtatggctgtacgtatacgcgatacgccgatgaccttacattgagcggccccggaaaagcagccggtgctcttagggaactaatccctctgtccgaacagatcgtcaggagtgagaggtttcacctgcaccccgtgaaaagacgaattctacgccgtggtcagcggatgagggtgactggggtcgtagtgaatgacaaggttaacatcgcacgtggcgattttgaccgcctgaaagccatccttaccaattgcatcagaactggccccgaggctcagaacagagaggggttaccggccttcagtgatcacctgcgggggagaatcgcccacattacacagctcaatcctaatcgaggcgctaagctgcaagccctattcgcccggatccgctggccttga

SEQ ID NO: 13126 - RNA, 1392 nt, synthetic construct
  source 1..1392: mol_type = other RNA
atgggcctcctggatttcttacggcgtcttttctttccccaaccgtcgccccctcctaataaaactgcctttgatggagtaccttccccacggcctccagtaagagcgccaagtgacaacgggcggcatccgagcgataactcacactcagcggcaacctctactgctgagccggaagtcgagtctagggacaggcggcctaagaggcccagaaggaccggacctcgaccacgagccaaactcacccctcttcgccatgcccccccagagtttattgcagatcgatctacagaggtgacccccattccctatcgtttcgctagatttggagtgcgaagtggtggtttcctcgatctggcaagcgacggggacgacgcgagattgcgcgagaggcaattgcccgtgttacacacccccgaggatctcgccgcttggcttggcatccctctggggaaactcgcatggcttatccaccgcttcacagctaacagccggccactgagcgaacgcgaggcacattaccacttccgctgggagaggaaaaggtcaggggggtggaggctcatcgaagctcctaaagccacgctgaaggatgtgcagtgtaggatcctagaagagatcctctcccgcgtacccgcacatccagctgcccatggcttcgtccccggcagaagtatagtgacaaacgccgccgagcacgttgggaagcccattgtggtgcgcctcgacttgactaacttttacccaaccgttactctcgcacgcgtcgccgcgatttttagaagtgtgggttactcaagagaggcctccgtctggatggccagactttgcacttctagcctgccgcagacggctggctttcccgaaggtaatgcctctgccatcaggccatatctgcctgcacatctgccacagggcgcctgcactagcccagctctggctaatctgagcgccttctccctggatgtgcggctatccggactggcacgggctttcggcggtgtgtatacccggtacgctgacgacctaacattttctggaccagacggatttaggcgcgccctgcccaatttcttgcctttggtcgaacaggtgatacgcgaggaaagattccgtataaataaggctaagagacgcattattcggtcaaacgcccgacagatggttacaggagtcgttgtaaacgataggaccaatgtgagacgagtcgactttgaccggctgaaggcgctgctgacaaactgtttacgacacggcgccagatcccagaaccacgaagggagggataatttcgccgcatgggttcgtggccggatcgcacacgtgcaaagtctgaatgctgctcggggctccaagcttttggccctgtatcagcagatcgactggcgttga

SEQ ID NO: 13127 - RNA, 1158 nt, synthetic construct
  source 1..1158: mol_type = other RNA
atgcctttgagatacgacggacaccgtagtggaaagaggcagaagaacgccgaggaggtggatcggctgccttaccgttttgcccaacagggggttaggtatggaggctatctggatctttccgatgacgctgacgtgggtaggctcgagcagctgggtcttccaatactgcacacaccagagcagatagccgtgtggctcgatagacccctgggccaggtggcctggctgattcacagattcagctctggctatcggccagaaaatgaaggggaagcccactaccattacaggtggcaacgaaaaaagtcaggcggctggagactgatcgaggctccaaaacctattctaaagacagtgcagcagcagattctcaccgatatccttagccaggtgcccgttcatcctgctgcgcacgggttcactgcaggcaggagcatcgttacaaatgcagccccccatgctggacagcaggtcctcgtgcagtttgatctcgcaaacttctacgcaaccgtaagcctctcacgcgtggtcgccgtatttaggagcctgggttactgccgggaggccgctatctggctggcaagactgacaacttccgcaattccgcagactgccacatttccggaccaggacacccatgcactgaccccattccttccaaggcacctgcctcagggagctcccacgtctcctgccttggcgaatttgtccgcctattctctggatgttcgactcaccggattcgctgctagttgggggggtacgtatacacggtacgccgacgacattaccatctctggctccaaatcactaatccgggccttgcccaaatttatccccctggcggagagaattattgggcaagaacgattcgtcttccatcgtcaaaagcgaagagtcgtgcgcgattgtagtcgccaggttgtcaccggcgtggtggtgaactcgcaccctaacttatcccgcccccaatatgaccgcctaaaagccatcttgactaattgcatacggcatgggccatcaactcaaaacagagaaaaccatgccgactttgcggcttggttacgcgggcacgtcgctcacgcacggaatcttaatccccaaaggggcctgaagttacaggcactctacgatcaggtagactggcagcgctga

SEQ ID NO: 13128 - RNA, 1302 nt, synthetic construct
  source 1..1302: mol_type = other RNA
atgggtctgctgaggtggctccttgggctctttggtgccaatagtggaaccgctgtggccaaggcatggacagatcaggctctgaggtccactgctggaagaccatggcgcaggccgcgcttgtcctcaattagaaggaacgccgtatctcctccacttcgccgaactcccgcgcccactacaccacaaccggcctataggttcgccagacagggagtagctggtatgcttgaatctctgcggggccggagttcttatttgaatctcgcaaccgacctggaccgcacccgcctagatagatggaacctgccccctttggccactccggacgagttagcagactggctggagatcccagtaggtaaattagcttggttgtcaggccgtctcgttagcgggaataggcccccctcaacacgcgaggctcactacgtgtttcggtggaaggctaaaagaagcggcggcgcaagattgattgaaagccctaaaccactcctgcgacaggtgcagaccaagatcctgagagaaattttagataaggtgccccctcacgcggcagctcatggtttcgtggccggacggtccattctgaccaacgcgaaaccacactgcgaccgggtggtggtggtgaagtgggacctgacggacttctacgcctctgtcaggtacagtcgcgtggtggccattttccggtccctggggttttctagggaggtcgcactgtggctcgctagcttaacgacatctgccatcgccgctgatctgccattccctgaaagcggcccccaagctctacgcccttacttggggcgacatctgcctcagggagcagcaacctcgcccgctcttgccaatctgtcagcctttagtcttgacgtaaggctgtccggactcgctagagcatttggcggcgcctatactcgttatgcagatgacctaacaataagcggggatgacgccttcgcccggcaactgaaaaatgttatccctcttgttgagaaggtcattcgtcaggaacgatttcatgtgcacgcaaaaaagcgaaaggtgatacggcgcgggcaaaggcaagttgttgcgggggtcgtcgtcaaccagcaccccaatatccgtcgggatgattttgataggttgaaagccatcctctacaattcggcgaagcacggacctgcctcccagaacccaaacggccatcccgacttcgccgcacatctcagaggacggatagcccacgccgcgatgctcaacagcgtcagaggcgagaagctgatgcgactgtacgaggctatcgatttcggctga

SEQ ID NO: 13129 - RNA, 1350 nt, synthetic construct
  source 1..1350: mol_type = other RNA
atgtggagattgttctcaagtctctggcgattgtttacggggcactccggacggcaggcgaaaaatccatatgctacattcggcacaacggacgaaagcaccgctaatgagacatttgatgatgcaatggtaagtccacccgaaccccctagacaccagaggaaacctaaggctgatcagcgctacccccgccttaccaagttcaggtaccagcctgggagagtgagtgacagagagcatgccccccagattgtgaccggcacaccataccgctacgctaaccctttcgtcgtgagccccggcatgttcttagatatgtccaacgatcttaggtctgagagactcgaccgttgggagcttccccaactgaaaacacctcaggacctggccgattggctgcaactgcccctgggcaagatagcctggctgactgacagatttacggaagccaatagaccagttgacgcatcaaaaagccactatcattattgctggaagcaaaagaagtccgggggctatcggctaattgaggccccgctgcctctgctgaggcaagttcaggaacagattctggatgaaatcttagcatctgtgccggttcacgccgctgcacacggattctgctcgggacgttcagtcgtcactaacgccaggccacacgtagggcagcagctcgttatcaaaatggatcttgacaacttctacactcgggtgcgatacgcccgcgtagtagcgctttttaggtcattaggctacagtcgggaggttgctctgtggttagcgagactcaccacttccgcagtgccatccaatctcccctttccaggtggggaaccaaagcagctccggttgtttctagcccgacatctacctcagggtgcccccacctctcctgctatcgccaatctggtggcttataacctggatgtgcgcctggcgggactggctagatcttttcaggtgcagtataccaggtacgcagacgatctgaccttcagcggaggcgaagacctgcagtattgtagcagggtgttcctgccgttggtgtctcagattgtccgcgacgagcggttccagatgcacgccaccaagcgtaaatttcttctcccaagctgccggcagcaagtcactggagtcgtggtcaacgagaagacaaatatatcccgcaaggagtttgaccgactcaaagcaactttgtataattgtgtgaagacagggcctgccgcccagaaccataatgcacacgccgacttccaagcacatttgcgcggccggatcgcttacgtgcagcaactcaaccccgcccgaggtgctaaactgctcgatctgtaccagcaaatcaggtggtga

SEQ ID NO: 13130 - RNA, 1335 nt, synthetic construct
  source 1..1335: mol_type = other RNA
atgtggcggcttttcagtttcctgtggcagctacttggcgggcgatcccccgacagcagggtttctgagcctattagccctggcggcaccgtgtctgagagaacagcaagttcaagtgcggctctttctcccgctcctgggcggaagaagtctaaggcagaccagaaaaggcccgttctggtcccactcacctatagaagaccacgcttatccgaccgcgagcacgcccctgaaattgtgagcgaatccccgtataggtacgcgctgccttacgttgtatcacagggaaagtacctggatctgagccaggacattcgaccagagctgctccaacggtgggatttacctctgttgaaaacacctcaggacctggctgattggctccatctgcccgtgggccaagtcgcctggctttcagggcgttttggagagggaggacgccccgcagatgcttcgaaggcacactacaggtattcatggaagaagaaaagaagcggcggctacaggctcatcgaatccccactgcccctccttagacaggtgcaagagcagattttggatgagatcttgagccgcgttccagtccaccaagcggctcacgggttttgcgccggtcggtctgtagtgaccaacgccgcgcctcatgtcgggcagcatgtggtgatccgcctggacctcgataatttctactccagagtccgccatagtcgagtcgtggccgtcttccggggaatgggtttctcgcgagaggtgtctctgtggctcgctaaattagtgacttccgccatcccgagcaacctagagtttcccggagatcagccaggcttgctgcgcctgtttctgccccggcaccttccacaaggtgcacccacatctcccgcagtggccaatctggtggcctattccctggatgttcgcctggcagggcttgccagagccttcagtgccaattatacacggtatggcgacgacttaaccttttcaggaagtgccgaattgtctcaaggtagccgtcttttcctcccactcgctcaggctattataagagaggaacggtttagggtcaactcccgaaagcgtcggttcatgagacagtcaacgaggcaggaagtaactgggctggttgtaaacgaaaaagtgaattactcccgtcaggaatacgacagactcaaggccaccttgcataactgtgtgaaaactggttgggagagccagaatagggccgggcaccctgactttctggcccacttgcgcggcaggatcgcatatgtgcagcagatcagcccgctcaggggcgctaaactgctggctctattcacgcgaatagtgcggtga

SEQ ID NO: 13131 - RNA, 1116 nt, synthetic construct
  source 1..1116: mol_type = other RNA
aaccgctcatccagcatcgtgagccaacagccataccgcatggccctgccttccgtcagaagcccgggtacattcttggacctcacaaccgactatagtcccgataaactcaatcaacgcgacctgcctcttctgaaaactcctgaggacctggcaaattggctgcagaagccactaggtaccgtagcatggttgacagactattacaatgaggccaggcggccgatagacattcggaaagcccactacagatactcttggaaacagaagcggagtggcggctaccgtttaatcgaggcaccactgccaatgctgaaggaagtccaggagcagattttagatgagattctcgatagaatcccagtgcattcgtgcgcacacggattctgtaccggcaggtcaattctgacaaatgctcgcccccatgtggggcaagatgtggtggttaagctcgaccttgataacttttacaccagggtccgatattcccgagtagtcgccatcttcaggagcatcggttatagcagagaggttgccctgtggctggctaagctcaccacctccgctatccccagtaacctggaatttccaggaaacgaacccaaactgatgcggctttttcttcccagacatctccctcagggggcccctacttctcccgctatcgcgaacctggtcgcttattctttggacatacggctgtccggcctaacacagtctttcggcggcaattacacgcgttacggagatgatatgactttcagtggggactggcagtttattaaagcgatgcggctcttccttcctctgacccagcaaataattaggcaggagagatttgttgtgaacgggaggaaacgcaaggtgctgcgtaggagcaaacagcagagcgttactggagtggtggtgaacgataagacgaacatctctcggaagtcatatgacaatctaaaagccactttgcacaattgcatcaagtccgggcccgactctcagaaccgcgaggaacaccctaattttcatgctcacttgagaggacgagtggcattcgtacagcagttaaaccgagccaagggcgataagctgctcaggatgttcgaacaaatttcatggtga

SEQ ID NO: 13132 - RNA, 1335 nt, synthetic construct
  source 1..1335: mol_type = other RNA
atgggcttaatccagtttttgcgaagcctgttcttcggcagcggacctcagagtgctggaacagctagccgacagtactcagaccagtggaatgccggcagctcttcggcgaatcagaatagttctactcccacagccaccgcaccagagacagtcaggacccgacccaagctggtgccgctgagaaggcacaagaaaggcagaaaccgtcaactgattagcggggagcgcggcctaaagactgcgccttatcaactggccgtcccagacgttacctcccccggtactttcctggacttgtctagagatggcgactcagctaggcgcgccgattgggagctccctgagttgacgacaccccaggatctcgcagactggctcgaaattcccttggggcacctgggatggctaacgggtagatacctcgatggtaaaaggcccctggacgccagtaaagcccactatcattacacctggaaacagaaacggaaagggggcttcagactcattgaggcaccttatccactcctgagacaggtccaggaacaaatcctggacgaaattttgtgctgcgttcctacccatgtctccgcccatggcttcaagacaggatgctctgtactgacaaatgcccagccacacctgggcaaagacgtggtggtaaagctggatctggataacttttataccagagtgagatattcacgagtggttgcactcttcagggggattggttacaatagggaaattgccatatggcttgcgcggctgactacttctgctatccccggtaacttgcgatttccaggggggcaacctaagctgatgagcctgtttcttccccgccatttaccacagggagctcctaccagcccggccttagccaatctggtagcatactccctggacatcagacttaacggcatcgctgaatcttttggcgcacagtatacccgctacggggacgatctaactttctccggagatcacaagttccgtgcctcgcttcggttattccttcctctggtccgccagattatacggcatgagaggtttgtgctcaacccaaagaagatgcaagtggtgaggccgtgttcccggcagctcgtgacaggagtcgtggttaatcagaagcctaatatctcacgcaaagagttcgatcggcttaaagctacgctccacaactgtgtgcggctggggccagagtcccagaaccgtaccaatcacgaaaactttcgggcacacttgcgcggacggatagcttttgtgcaacagctcaaccccgctagggccgagaagcttctaatgatctacaaccgcatcaagtggagttga

SEQ ID NO: 13133 - RNA, 1338 nt, synthetic construct
  source 1..1338: mol_type = other RNA
atgcgcttcctcgaattcttgaagcgcctttttttcggagggtcagcacagtccacagccgataaatactccaggacccctgacgacactcgattccagtctaccctcgctccgaccgagcccgaaacccatcctgagagccagataagtgaccacgtcaaacgcgagcagcattggcctgtcctagtgcctctgcgtcggaagaggatccgccagactactcacaacggggaggaaaccgccggccctaagaagtacgccctcgctttaccatatattatgtcacccgattcttatctggaccttacacaggatgtgcaacccgagctcctcaacaactgggaccttccacacatcgtcacgcccgccgatctggccgattggcttcagatctccttagggcagctggggtggctgacggaccgctttagcgaaggcaagaggccgatcgatgctaggaaggcacattacaggtattcctggaaagaaaaaagaagcggtggctaccgactgattgagtcaccactgcccatgctgaggcaagcacaggaacagatccttgacgaaattctggaacagattcctccgcacgctgccgctcacggattcaggacagggagatctatcgtcactaatgccgaaccacatgttggtcaggccgtgctggtaaagcttgacctcgacaacttctatacacgggtgagatttagtcgggtggtagctatcttcaggagcctgggttactcccgagagatttctttgtggctagctcgcctcacgaccagcgcgattcctggcaatttacagtttcccggcggacagccaaaactatttagcctctttttgcctcgccacctgccacaaggagcgtctacaagtccagcactggcaaatctggtggccttttccttggacgttcggctgagtggcctggccaagtcttttaacgcgaattacacccggtatggagatgatctcactatctcgggcgatgagcgattccggcattcactgagattgttcattcccctggcaagacagataattaggcaagagcgcttcgtgttgaacgcaaaaaaaaagaagatcatacggccaatgtcccaacaacgtgttacaggggtggtcgtgaatgagaaaactaacatcccccgaaaagagtatgacagactcaaggctacccttcataattgcgtgagatttggacccgagagccagaaccacgatcagcatgaacactaccaagcccacctgcggggcagaatagcgttcgttcagcagttgaatcctcacagaggtgagaagttactggccatttaccgtaagatcaattggtga

SEQ ID NO: 13134 - RNA, 1338 nt, synthetic construct
  source 1..1338: mol_type = other RNA
atgctgttgctcgaactgttaaagcgccttctctttggctcttcagcggtatcctcaaagaaaagggtagtcgagactgctagttcgcgcagcgatgggagattttctccccccgctgaagcttccgtggccgtagcagataagcccaggaagaagcctcgcgaagagcaaacttggccgattcttagaccactgagacgcaaaaaagtgcgtcctgaacgggatgctgccgcaaacgccgggagcaaacagtatcccttcgcttatccttacgttgtgagcgacggctcctacctggacctgactaaggatacagaccgtgagcggctggaccggtgggatcttccctacttcgagacgcctacacagctagcagaatggtttaatttgccccttggccagctcgcctggttgaccgataggttcagcgatggaaaaagaccagtggacaagtctaaggctcattatcgttatcagtggcggaccaaacggtctggcggctaccgtctgatagaagccccacttccgctgatgaggcaggtgcaggagcagatcttggacgagattctagacagggttccaacccatgacgctgcacatggcttttgtgccgggcggtcagtagtgacaaacgccgaaccgcacgtgggtcaagcagtggtggttaagttcgacctggacaacttctataccagagtgaggtacagtagggtcgtcgcagttttcagaagtttcgggtactccagagaagtcgctatctggctcgcccgactgagcacctccgctattcctgcgaacctcgactttcccggccgccagccaaaacggttacggctgtttctgccacgccatttgccccaaggggcccctacttctccctgcatggcgaatctcgtggcgtttagcctggatgtccggcttagcgggttggcaaagtcattcggtgccacctatacacgatatggagacgatctcacgttctcaggagatgagagttacctgaggagcttgcgcgtctttatccctttagcccaccagattataagacaggagcgcttcgttctgaacggaaaaaagaagcaaatccggcgaagggtgtctcagcagaaggtcaccggcgtggttgtgaatgacaaaacaaacatcccacgaaaagagttcgaccgcctcaaggccactctgcacaactgcgtccagcacggacctgattcccagaatcacgatcaacacccaaactttagagcccacctaaggggtcgaatcgcatacgtgcagcagctgaatgagcatagaggaaataaactgctctccctgtaccaagccattaattggagttga

SEQ ID NO: 13135 - RNA, 1113 nt, synthetic construct
  source 1..1113: mol_type = other RNA
atggacttatctcttgatggcgatgattcgttgctggccagctaccacctacccgtatttcacactccacaacggctcgccgactggctgggtattcgggtgggggaattggcatggctggtgcacaggtcaacgtccgatagacgacccgcagacgagcagcgcagccattatgtataccggtgggtcaaaaaaagaagcgcgagtctggaggctggatctcccaactcacggccagttcagacacagtggcgacttattgaggcccctaaacagaccttgaaggctgcccagcggaaaatcttaagcgaaatcctggagaagatccctgcccatcacgccgctcacgggttcgttcgaggcaggtccatagtttccaacgcaagaccacatgtgggccaggcggtggtcataaaactggacctgcaaaacttctatgccaatgttacctactcgcgggtcgtggcaattttcagatctatgggatattgccgggaagctgcaatctggctcgggaggctcactactagcgctgtgccatggtcactcgcagtgcctgacggcgacgaggcaatgaagtccctctacgttcgccgccatctccctcagggagctcctacatctcccgcgctggctaatcttagtgccttcggccttgacgtccgcctgagtggactgcttaagaagttcggagggaactacacaaggtacgccgacgatttgaccttatctggcagtgatgattttcgtttttcactcagatgtgtgatcccgctaaccgagcagattgtacggtccgaacgcttccgactcaaccaccgaaaacgtaaggtggtcagaagagggcacagacaactggtgacaggtgtggtcgtgaatgccaagcctaacatccgccgcgatgagttcgatcgcctgaaggctattctgtataattgcgtgaagctgggtcccagctctcagaacagggacgcccatgccgacttcagcgcacacctgagaggcaggatcgcctttgtcaggcagctgaatccggcgcgggctgaaaaactatggaggttgtttgagaatatacgttgggacgggtttcccccaacccaaggttccaggtga

SEQ ID NO: 13136 - RNA, 1320 nt, synthetic construct
  source 1..1320: mol_type = other RNA
atgaagctcctcttagatttcctgaggtggctactaggggacagaggcgggaccagtcgtacagggagccagcagccaacaggcactcagtcacggcggctgaaacgacgcccagtgaaactgacaaaacgccgccgcctgtctggtaatgccctcctgatgcaaaggcctaagccaatcaaatctctggccccgccctaccaattttcggcctacgcatctgaccacaggcagttccttgaccttagccaggatggcgatgatagcctcctggcctcctatcaccttccagtatttcataccccacagcatctggcgcagtggctcggtgtcagggtaggggagctggcttggctggttcaccgcagcacctccgaccgaagaccggcagacgagcagcgctctcattatgtctacaggtgggttgaaaagagattagcctccgtggagtccggaatgcccaatacgaggcctgtgtccacacagtggaggcttattgaggctcccaagcagactttgaagtgtgcacagcggaagattctcacagaaatcttagagaagattccgactcaccaggccgcacacggatttgtgagaggaagatcaattgtcagcaatgcgaggccccatgtcgggcaggcagttgttataaagctcgaccttcagaatttctatgctaacgtcacctattcaagggtggtggcaatctttcgatccatggggtactgccgtgaagccgccatttggctcgctaggcttactactagtgccgccccttggagcttggctgtccctaacggcgacgaggccaccaaaagcttgtacgtgcggagacatctgccccaaggtgcgccaacatctcctgctctggctaacctgagtgcctttggtctggatgttaggctgagtggattgctcaagaagtttggaggaaattacacgcgatacgctgatgacctgactttgtcgggcgatgacgatttccggtatgcgttaagatgtgtgatccctctgaccgaacagatagtccgctcagagcgattcagactgaaccaccggaaacgtaaggtagtgcgacaaggccatagacagctggtgaccggagtggtagtgaataccaaacctaacatccggcgcgatgaattcgaccggcttaaggcaatactccacaactgcgtgaaactgggccccgcactgcaaaaccgtgacgggcacggcgattttgctgcccacctacgcggccggatcgctttcgtgggccaattgaatcccgcccgggccgaaaaatgccagagattgttcgagcagatcagatggtga

SEQ ID NO: 13137 - RNA, 1341 nt, synthetic construct
  source 1..1341: mol_type = other RNA
atgggtttattcgactgggtgcgaggtcttctggggtttggcaatcctgctccaaaccccgtggaatcccctgtggaaacgaaaaacgcccccttgcctactccagcttccggggtcgcctcaccaccttctggtcctgccagttccagacgcgaccgtggagtcactaggtcaagggagttcaggcggtcacgatccgctatacagctgcggaccctgaggtttcagctgcgcccaaggtccgacttgcggacgaccgttcaggatcgagcgcattacagattcgccagaccatccgtggaaggaggctttctggacctgacacaatcaggcgatacgggaaatctggagcaactatctttgcccgtattcagaacccccgaggagatcgccgggtggttgcaaattcccctgggacagctggcgtggcttgtgcatcggttcgatgaagaccagaaagcaggtgacgagaagacaagccactactggtatagacttatccccaagcgaagtggcggacagcggctcatcgaagctcccaaggcgaaactcaagagggcccagtggcagatcctcgatggcattctatctaaagtcccggcccacagggctgcacacggattcgtcgccagtcgcagtatcctgacaaacgccaccccacatgtgggccaacgcgtgattgtaaaactggatctggagaatttctatccgagcgtgacctttaaccgcgttgtcgccatattcagaagcctgggctactgtagagaggcagctatctggcttggtcgtctgaccactacaacattgccacgccgtatttcccctgaactcagccgatgcgccgatctcaacgattataggggacggagactgcctcagggggcacctactagcccggctctagcgaatctttcagcttttgcactggacctgcgcctctctgggttagcacggtcttttcatgccaattattcgagatatgccgatgatataaccttttctggcgacgacagattcctccggagcctcgctgttttcatccccctcgttaagacaattttaaagtccgagcgttttcgagccaaccggcggaagtggagagtgattcgcaataaccagcgccagaccgtgaccggggttgtcgtgaatgcaaggcccaacgtgactcgcagaaactacgacaggctgaaggcaatcttaactaactgcattcggaggggcgccagcacacaaaatcactcgcagcacaaacagtttgctgcccatctgttggggaggatcgcgcaggtaagtcacctcaatgctgagcgtggccagaagctttacgcactgtacagctga

SEQ ID NO: 13138 - RNA, 1311 nt, synthetic construct
  source 1..1311: mol_type = other RNA
atggggctgttccagtggcttcgtggcctctttggattcggggatgcagccccagagtcctctgcccagcctcatagtcccagttctagcagggctagtgacagcaatcgcgctacaccagccgctcgaccaccaagaaaaaggcgcagaccagcccgcctgaagcctttgagattcaaacccccacggaaggtcggaggacgaacgactttgcctaaagaccggggttatagattcgcccgccctagtgtaacgggaggctggctagacctctcccagggaggcgacgcatctagactggagcgctactcactgcctgtctttaagattcctgagcagctcgctaagtggctggagatccccctgggtcaactgggttggcttgttcacaggttcgatgacgagcacagagctgcagatgaaaagtcagcccactacttttatcgctggattgacaaacgggccggcggcaaacggctaatcgaagctcccaaggtgaaactgaagggggtgcagtggaaaatcttagatggcatcctccgcaaagtacctgcacaccctgccgcacacggtttcgtaaccggtaggtccatatcgaccaatgcggtgccacacgtgggccaacgtgtggttctgcagctggatctggagaatttttatccctccgtgtcccttaatcgcgttgtggccatatttaggtcactcggctactgccgagaggccgcaatttggcttgggaggctgacaaccaccactctgccagcctccatgaccgcgacatttggcagaggacccgaaatccatccgtaccgagggaggagattaccgcagggggctcccacttctccggctcttgcgaacctcagcgccttcgtattggacctgcggctttctggcctggctcggactttcggcgcaaactatactaggtacgcagacgacctaacatttagcggggatgcagtcttcttgaagagcttggctgtttttattcccctcgtcaagcagatcgtgagggatgaacggttcttaattaaccgcaggaagtggcgagtgctgcggaacaatcagcggcaaactgtggccggtgtcgtggtcaacacacgaaccaacgtggccaggaaggattacgatcgcttgaaggccacactgaccaactgtgttcgtagaggagctagcacccagaaccatgacagacatgagcggtacgcctcacacctgctggggagaatagcccacgtggcacatcttaatcccgcgcggggagaaaagctccgtgtcctctatgatcaaatcgactggaataaatga

SEQ ID NO: 13139 - RNA, 1350 nt, synthetic construct
  source 1..1350: mol_type = other RNA
atgggcttcttcgactgggtgttcgggtggctcggtttaggccttcggtcacccgcaaagacagcaggcagtgctcccccaggatctccgggtgatagcctggggcaaccaggggaaaccgaaacccaatttcggactaggaatagaaactacgccaaggtggcgctaactccccgaacattcagagctaccagggcaggtggtgaacacccggaagagcgccgtgcaacaggagattggccatacaaatttgcaagaagggcccccgatccagctcgctggttggatctgagtcgcgatgctgaccgcgtaagactcgcccagttcggcctgcccgtactcgaaacgcccgaagaccttgcgcgttggttgcaggtcgagctgggggagcttgcttggctcagcggtcattttcacttcggaggccggccagacagcgttgcgagatcccactatcactatagttggatcgagaagcgatctggagggcggcgcttaattgaggcacccaaggctaggctgaaacatttacagacacagatccttcgatgcatcctggacagggtgcctcctcatagggccgcacatggcttcgtcgcaggacggtcgattttgagcaacgccgccccccacgtaggacagagagtgctcgttcagttcgatctaagcgacttctacccctcagtgtcctactcccgcgtcgtggccattttccggagtctgggcttttctagagaggtgggttgctggttagcccggctgacgacttctgctgtgcctcacgagctgctcaccggcccttcctcaacccgcttcgggtccaggtttgattctgatcacgagctgtatctgcgtcgccatctgccacagggagcccctacctcaccagcccttgccaacctctccgccttcgtgttggacctgagactcgctgggctggctagggctttccaggcacattacaccaggtatgccgacgacctgacctttagtggcgggactaggtttcagcgaagcctggctgtttttatccctctggctagacaaattatccggggcgagcgctttagcatacacccattgaagtttcgagtcaggcggagggggcagcgccaaacagttactggcgtcgtggtcaacgatcatcttaatgtgtctcgggcggatttcgacagactgaaagccatcctacataattgtgcccgtcacggccctgcatcccagaaccgttcacaattgccggactttgccggccacctgagaggacggattgcccacgttcagatgataaatcctcggagagcagccaaactcgtggcgctctttggacagatcgactggacacgatga

SEQ ID NO: 13140 - RNA, 1293 nt, synthetic construct
  source 1..1293: mol_type = other RNA
atggggtggctggactggttgtggcggctgtttacaggcagcggtgctgacagatcacctcaggagctgacctcggccagaggcacagcagcagacccagcctcaaaggcaagacgacgtcctggacgcagacgccgactggttccactgcgctatcgccgtaatccctctagatcccctcctgctttggcagcgcagctcccatatcgcttcgccaggagaagcgcagacctgcgacactggaacgatctcaggcaagatgggcagccacgtcggcttgaacaactaggccttcccgtgcttgctgggccggatgacattgcttgttggctttcattaagcgccggagaagtggcttggctcaccggacgcttttgggaagggaggtctgcccctagagtggcagcaagccactatcactacagatggatcgctaagcggaggggaggaaggcggttgatagaggcccccaagtctcggctcaagcgagtgcagcagcagatattagcagagattctgggacgcatcccacctcacgttgcagcccatgggttcgttacaggacggtctatccagaccaatgcccagccccatgttggccagcgggtgttgcttaaactggacctcgagaacttttacccatcagtcacctaccccagagtcaccgccattttcaggtccttaggctacagtagggaggccgccatctggctggctaggttagtgacaacagccgtcccgcccaatctctgggaggctggtagaccgtccgatgtagcggaaaccagatatctgcgacggcatttgccccaaggtgcgccaactagtcccgctctcgctaatctaagcgcatttgtactggatctgaggctggccggtctagccaggtccttcaacgcacagtatactaggtacgcggatgacctcactttcagcgggggcgaagtattccagcggtccctcgccgtctttttgccccttgtgcgtcagattgtggcccaggagcagttccgcctgaacagtaggaaaacggccgtgcagagggcttcgcaacggcagagagtgactggcgtggtcgtgaattctaaactcaacatccgccgtgaagactacgatcggctgaaggccacgctgaaaaactgcattcaatacgggcctactagtcagaatcgcgaacgccaccctgagtttgcctcccatctgagaggccgaatagcatttgtcacctctctgaacagccaacggggcgcgaagctactggctctgttcgagcagatcgactggaatcgatga

SEQ ID NO: 13141 - RNA, 1290 nt, synthetic construct
  source 1..1290: mol_type = other RNA
atgtcctttttcgacagcatcctccgctggctcggactcaagaatacgccgccaaccggtagagatcacgcccaacagaggaggggcaaactacggagacgacggggcaggctggggcatatctatatggtacctctgcgtcgccgacagggacagagatctgcagatcccaccgaggacgcgggcgaagaatcagctgagtccccctacaggtttgctcgctttggcggctacggcgaatatcgtgacctgagtaaagacagcacgccagagcggctgtatcagttcggacttcctcagctgtgtacccccagtcacatcgctgaatggctggaagtgccttgcgggaggttggcatggctcattcaccggtttgatgatggtgggcgcgccgcccatgttgcacaagcacattatcattactcatggctgaagaaaagagggggagggtatagactcgtggaagccccgaagcctatcctgaaggcaatccagcagaaaattttaagggagatcctggatcgcattccccttcacggagccgcccatggcttcgttgctggtcggtccatctgtactaacgctcagccccacgtgggccaaagggtggtcctcaagttcgacttagagaacttctatgcaaacgtcagcttctctcgggtggtggctatttttagatccgtgggtttttcaagagaggccgcgatctggctggggcggttaacaacagcattgccacctgagggacttcctgccccaggtggagacagaaatgtcgtgcgaccttacctgagcagacacttgccacaaggggctcccacctcaccagccctcgctaatttgtcttgctacgccctagacctgaggctagccggaatggccagagcctttggcgctacctacactcgatacgcggatgacctcacattttctggcgatcagcacctgattgattcgctgaacgtcttcataccgttggttaccaaaatagtgcggagtgaacgtttcactgtccacgcggggaagcggaaagtagttagaaataatcagcagcagcgcgtcactggggtggttgtaaatgagagacttaacatttgccgcaaggattacgaccgcctgaaggccatcctgacaaactgtgtgaggcacggagctgcaacacagaaccgtgagcaacgggccgacttcgccgcacatcttcgcggtcggatcggccatgtgcagtccattcaccccggccgaagcaggaagctgcaggctatattcgatcgaattgactggaggagctga

SEQ ID NO: 13142 - RNA, 1299 nt, synthetic construct
  source 1..1299: mol_type = other RNA
atggggctgctgaattttttttggcggctcatttttggtgatcccccgagtcggccggagagcagttcttcagcttctcgtgatagtagcgtatccagaaaccctagcacacctcggacacggactcgaaaactgcgcgctaggctgatccccgatcgcgtcaagagaagccgccaggacttcccccagaatatagtgtcttccctgccctacaggtttgcaaggctgaacgtgacgggcggttatctcgacctttcgcaggatttggacgagccccaattacagcagttgggactgcccctgctcgctactcctgagcagcttgctaattggctcggcattccgctggggaaactggcctggcttacacacagatgtgatgaagggcagcggccacgcgacgtcagacatagccattaccattaccgttgggttaagaaaaaacagggcggctacaggctcatcgaagcccccaagcaccaattgcgcagactacaagacaaaatcctcttagaaatactgtgcaagattcccgtgcatccagctgctcatgggttcgtagccggacgatcaataaggtcaaatgcagaaccccatgttggtcagcgcgtggtggttaagatggatctcgcgaacttttatcctacggtgaggttcagtcgggtcgtgtccatcttccgagccatcgggtttagccgggaggtggcaatttggctagcgcggatcaccacttccgctgtccctttggccttcgagggcccacctggtgagttgaatcggtgggccctgacaccttattatagtagacacctaccacagggagcaccaacctcccctgcccttgcgaacctgtctgcatatctgttagacaggcggttggctggcttagcgcgcaggttcagggccaattacacccgttacgccgatgacctgaccttttctggggacgcaaagttcctgtcaggacttcgaaactttgtgccactggttcataccgtaattcgcagagagagattccagcttcactacaagaaaactaaagtgcacaggtctaatcagcaccagcgagttactggagtggtcgtcaatgagaagccaaacatgtccagagccgatttcgaccgactgaaagccatcctgaccaactgcatcaggcgcggcgtgagcacacaaaaccactcacagatcccagacttcgaagcacacttgcgtggaaagatttcccacgctaagtttctcaaccctgccagaggcgcaaagctcctggcccttctcagaaaaattgattggcaaagctga

SEQ ID NO: 13143 - RNA, 1290 nt, synthetic construct
  source 1..1290: mol_type = other RNA
atggggctgtggtcttggcttagaaggcttctgtttggccaaccgaaacgctcagcagcctcccgcagtgatgatcgagaacaaaaaagacggcggccaagggctcgacttactcccctcagacaccgccagaggagaacggacagatggaggcagagggatgccgccgggtccattaacaaaatcacagtcaagagccagccctacaggtttgcatggagctcagtgttcggcggcttcttggacctaaaccgcgatggtgaccctgctcgccttaaacaggctgggctgcctgtatttcaaaccccccaggaactggccgattggctgcagatgccaatcggacgtctcgcatggctcgtccaccgcttccacgaccaccaacggccagccactgtgaaactgagtcattaccactaccaatggatagcgaagaggtccggagatcgacggttgctcgagatccctaagccacagctcaaagcagcccaggagaagattctccgcgagattttggacctcgtaccgacccattcagccgctcacgggttcgtcaccggacgaagcattaagaccaatgccgaaccccacgtgggccagcgagttgtgatgaagtttgacctggaaaacttttacccttccgtaaagtatagtagagtcgttgcgatatatcggtccttgggatatagcagagaagccgccatctggctgggccggttaacaacgtctataacacctccactgggaacattaaaggacctagctaccgaagcggagtggataccatatgcaacccgtcatcttcctcagggagcacccacaagtcccgccttggcaaatttgagcgccttcgctctggatctgagactggcgggcctggctcggactttccatgccaactacacccgatacgcagatgacctgactttctctggtccggatcagttcctgaggagcctcagggtctttattccactggtgatgcagttaatcagacaggagcgctttcgtgtgaaattatctaaacggaaggtgatccggaactcccagcagcagcggatctgtggggtggtggttaacgagcagatcggtattcccaggagagagttcgacaggctgaaggctattctcacaaattgcgttcgcagagggcccgctactcagaatcacgagagacatcctgactttgctgcccatctgcgcggcaggatcgcccatgtgtcacaccttcactcggagcgtggcgcacggctactggatctcttcgaacaaatcgactggaattcttga

SEQ ID NO: 13144 - RNA, 1299 nt, synthetic construct
  source 1..1299: mol_type = other RNA
atgggactcttcaactggctcagatgttggttcctcggcaaaagaccacctgcaaccaatgacgttgtttctgaccaaggcgctgcccctcaacgacgaaaacgccggcggaagcactctcgtgcaaggctcgtcccactgcgtgcagctgccgctagggatgctcgtaggaggttcccagggttgaccactgcagagcggacaggggcagctccatatcgcttcgcgcgaccttgtgttcttggtggctggctagacttttcattggatggccagacagaacaactgggcagcgccggcctacccgtgtttgagacgccacagggactggccgactggcttgaattaccccttgggaggttggcgtggctgattcataggttcgagatcgagcagcaacctccagaccaggccaaggcccattaccatttctgttggctacctaagagaagggggggaaagaggctgatcgagagccctaaacccatcctcaaacgcatccagcatcgtattctgcgcgagatcctggacaaggttccgcttcaccccgccgctcacggatttgctgccaagcgctctatccggactaatgccgctccgcacgtgggtcagagggtgattctcaaaatggatctggaaaacttctacccctccgtcagatttagtagagtggtagcgatcttcagatccttaggctatagcagagaagccgcgctgtggctttctcggcttactacgtcttcacttccagccaacgccgcccagtggagtttatggtcccccgaactggaagcatatctctgccgacatttgccacagggtgcaccgacctcacccgctttggccaatctcagtgcatttagcctcgacctgcgcctggcagggttagctcgcacttttggagcccgatacaccaggtacgctgatgatctcacatttagcggggacgaacacttctccagatcgctggccgtgtttatacccctggcagagcagattattcgggccgagcgctttagaaccaacaaatccaagcggcatgtcgtgagagatcaccagcggcagcaggtaacaggtgtcgtcgtgaacaggcaccctaatgtggcccgccctgactatgaccggctgaaggctgtgctgacaaattgcatacggcgaggcccctccacccaaaaccactcaagggaggatgattacgcggcccacctgagaggctgcattgctcatgtggcattcctgaatcctagccggggagagaagctgctggacttgttcagtcagatagattggaaccgctga

SEQ ID NO: 13145 - RNA, 1293 nt, synthetic construct
  source 1..1293: mol_type = other RNA
atggggattttccaatttatacgtcgcctattgtttggctctagcccttcccgccctatcgctccagctgacacccacagcgctctgaagcagattaagccgtctaggcctagaagaaaaccgcgactccaaccactccgctttaacaaaaaaaagaaccgcgactcccccgacatggtcgatgtctccccacttccctacaagctggcaaggccatacgagctccttagataccgaagccagagtgaccactatctagacatgacccaggatgtagatcaccaaaagcttaggcagtaccatttgcctgcttttagtactcctgaagaaatagccaattggctcgaatatcccctgggcaaactggcatggctaacacacagattcaatcaggctgatcgccccgacgacgtaaatgaaagccactatacttatcattggctgcctaagcggaacggatataggctgatcgagagccccaagccctttatgaaaatggctcaacagcagatcctgcaggatattttgaacaaaatccccgcccatccaacagcccatgggtttgtgactggtcactctcaagtgacaaacgccgtccctcacacaggcaaaagggtagtcgtgaagtttgacctcgagaatttctacgcctcggttaagttctcaagggttatctcaatttaccggtccgtggggtactgcagagaagccgccatatggcttgctcgcttgactaccacggcgattcccatgtctatgcctttcccagatggatcactccggccgctgtatccatacctgagccggcatttaccacagggagcccctacctctcccgcactggcaaatctttcagccttcagtctggatgtgcgactgtccggcctcgcacggtcattcgatgcggagtacacgcgctacgcggacgacttgaccttttctggctccgatcaattccttaggtccttgcgggtgttcatacccttagttgagcagattatcagaagtgagagatttcaggtcaaccagagcaaacggcgtatcctgcgcaacaaccaacagcaaaaggttaccggcgtggtcgtgaatgagcatactaacgtgcctagaaaagaattcgatctgctgaaggccatcctcacaaactgtatccggaagggtcccgccagtcagaatcgagagggacacccggacttcgcaagccacctgaggggtagagtggcttatgtgcagcagctcaatccaaatcgagggcagcgtctgctgcagttatatcagcagattaggtggtga

SEQ ID NO: 13146 - RNA, 1269 nt, synthetic construct
  source 1..1269: mol_type = other RNA
atggggctgtttcagttcatcagacgtctgctatttggatcatccagcgggaggccagtgactcccaccgattcctatagtaaacagaacaagacacagcgagcttaccgcaagcccagactcaaaccttttagataccggcagaatcggcgcacagacacgaccgagctcgaagaggtgtcaagtcctccatacgagttagcaaggtacgccagccggacagggcactatttcgacatggcacaagacaccgattttgaaaagctggatcagtacaatcttccacggttctgcaccccacttgaactgagccagtggttggaattccctttgggaaagctcgcctggttgactcaccggttcaatcagttcgacagacctgacgacgtgaaggagagccactacgtgtatcattggctacccaagaggaacggcttccgtcttatcgaagcacctaggccgtttatcaagatcgcgcaggagcagatcctcaaagacctgctaaatcgaattcctgtacatccggcggctcacggatttgtggctggccacagctccgtgaccaacgctctgcctcataccggcaaacgcgtcgtcgtgaagttcgacctcgagaacttctatacctcagttaaattttctcgcgtggtttctatataccggagcattggctattgtcgcgaggtgtctctgtggctcgccaggctcaccacttccgctatccccatgagtatgccctttcccgatggtagcctgcgaccactgtatccatatctgtccaggcatttacctcagggggccccaacttcaccagccctggcaaacttgtcggccttttctctggacgtccggctgagtggattagccagatcttttgatgccgagtacacacgctacgctgatgatttaacttttagtgggtctgatcaattcctgcgagcattgcgcgtctttattccgctcgttgagcagatcatacgaagcgagagattccaggtgaatcagtccaaacggcgggtattgaggaacaatcaacaacaaaaagtcacaggcgtagtcgtgaacgaacacacaaacgtgcctcgtaaggaattcgacctgctcaaggctattcttacgaattgcattagaaaaggtcccgcctcacagaacagaaagggtcatcccgatttcgcgtcccacctgagaggcagggttgcctacgttcaacaactgaaccccaataggggacagcgccttctgcagctttatcagcagataaggtggtga

SEQ ID NO: 13147 - RNA, 1293 nt, synthetic construct
  source 1..1293: mol_type = other RNA
atggggttctttgattttatacgacagctgttcttcggaccagcacctgatcggtctgtggcaagaccggaaacctcagccaacgttaaaccttcaaaagctccccggatcttcagaaaacctagactgagccccctcaggtacaataaaaaaaagaggttcactccacccgagaacgccgacgtcggatcactcccgtacaagctcgctcgcccgtatgaattgttacgctaccgttcggaaaccgatcactatcttgatatgacccaggacggagacgccgccaagctatcccgcttcgaccttccagtgttttctactcctgaggacatcgctcactggttgaacctcccacttgggaagctggcttggctcacacatcgcttcaatcagtccgatagacccgacgacgtgaaagagtcgcattatacgtatcattggctccctaagcggaacgggtttaggctgatcgaagcgcccagaccatttattaagatggcacagcagcagattctgcaggaaatattgaatcagatccctgtgcacgatgcagcccacggctttgtcacggggcacagtccagtgacaaacgcgattccccacaccggtaaacgtgtcgtagtcaaattcgatctggaaaacttctatgcctctgttaatttcgcccgagtcgtcagcattttccgctccgtaggatactgccgggaggctgctctgtggttagccaggctaagtacaactgctatcccgatgaacatgcccttccctgacggctcacttcggcctctgctcccatatctgtccagacatctgccccaaggcgcaagcactagtcccgccctggcaaatttgagcgcattttccttagacgtgagactgagcggactagctcgaagcttcgatgccgactacactcggtacgctgatgacctgacatttagtggtagcgaccagtttttgcgatccctgagagtgttcatccctctcgttaatcagatcattcggtctgagcgctttcaggtgaatcagtctaagcgcagggttctgaggaataaccagcaacagaaggtgacaggggttgtagtcaacgagcacaccaacgtgcccaggaaggagtttgatcttcttaaggcgattttaaccaactgtatccgacaaggcccagtgggccaaaatagggagcaacatcctgattttgcctctcacctgcgcggccgtatagcctacgtgcagcagctcaacccaaataggggtcaacggctgttgcagctgtacgagcagattagatggtga

SEQ ID NO: 13148 - RNA, 1275 nt, synthetic construct
  source 1..1275: mol_type = other RNA
atgggcctctttgatttcctccggagaatttttttcggatctcctccgagccaaacagtttcccctgtggagagcgcaccagttcccgaggagacgagctcccgaaagcctcggcgcaaaaccactctggagcctctccgctacagttccagccactctagcagggtagagaacattgaggaagtagccgcccctccctacgagttggcgagatatggcgccaggacaggccattattacgacatgactcgggatggggacaccgagaaattggccagatatgagctcccactgttttcaacccccgttgaactagctgaatggctaaacataccactcggtaagttagcatggctgacacacaggtttacccagttcgatcgccctgatgacgcccaggactctcactacatctaccactggaaacccaaaaggagcgggtttagactgattgaatccccacggcccttccttaagatggcccaacaacagatcctgcatgaaatcctgaatcagatccccgtgcacacggcagcccacggtttcgttaggggcaggtccagtgtgactaatgccacacctcataccggaaagcgggtggtggtcaagttcgatctggagaacttctacacttcagtgaaattctcccgtgtggtcgctatatttcgcaatctaggttattgtcgcgaagcctcgctttacttagcgaggctgactaccagtgtgatcccaatgtcattgcctttcccagatggatcactgcgcccgctggtgccatatctgtcacgacaccttccacagggggcctctacctctcccgctttagcaaaccttagtgcatactccctcgacgttcgcttgagcggactcgctcgagctttcgatgctgattatacgagatacgctgacgacttgaccttctcgggctctgaacagtttttacgaagcctgcaggtgtttttgccactcgtcaaccagattattagatccgaacgatttcaggtcaaccacatgaagaggcggatacttagagagaaccagcaacagaaggtaacaggcgtcgtggtcaatgaacaccccaacgtgccccgtaaggaatttgacctgctcaaagcaatcctgacaaattgcattcggcaggggccgcggactcaaaatcgcgagaatcatcctgacttcgccagtcatcttcgtgggagagtggcgtacgtccagcagctgaatcccaagcggggacaaagactgctgcatctgtatgagcagatcaggtggtga

SEQ ID NO: 13149 - RNA, 1278 nt, synthetic construct
  source 1..1278: mol_type = other RNA
atggggttgttcgactttattaggcagcttttcggaagccctcctgatcggagtgggcaagctgccgccccagatcctgtgccagaaccagcacctcacgagcctccccagaagagacgccccgtgaggcttcatcccttgcgatatcctaagcgccgtccgcgaaccgaatacaatatagaggaggtgccagcaccaccatacgagcttgcacgctatggcgccatgactggacactactttgatatgacgcaggacacagatgcagcacagctcagccggcatgagctaccgcaatttgccacccctctggaactggctcagtggctggaaatcccattaggtaaactggcttggctgactcacaggtataatcactcagatggccccgaagacgtgaaggagtcccactatacctaccactggctacccaagcgcaacgggttccgcctgatcgaagcccctagacctttcatcaagatggcacagcagcaaatccagcaagaaattctctctcggatccccatgcaccattcggctcatggctttgtgagtgggcattcccccgtcacaaatgcccgtccccatgctggcaaaagggtggtgctgaaattcgacttagaaaacttctacgccaatgtcaagttctctagagtcgtatcaatttttagatcacttggctattgcagagaggcggctctttggctggctcgcctcacaacctccgccattcccgccaacctgccattccctgacggtacgctgcggccgttgcttccctacttatctaggcacttgccacaaggagctccgacctctccagcgctggcaaacctcagcgcgtattccctagatgttagactgagtggcctcgcccgaagcttcggagctgactacaccagatatgccgatgacctgacattttctggtagcgaggcattcctgcggtccctgaaagtttttatacctctcgtgcaacaggtaatccgtagtgagaggtttcaggtgaacctcagcaaacgcagggtcatcaggaacaatcagaggcagacagttactggggtcgtggtgaacgaccacactaatgtatcacgaaaagagttcgaccggctgaaggcgatactgaccaactgtatccgccagggaccagaaactcagaatcgggagcaacatcccgattttgccaatcacctccggggcaagattgcccatgttcagcagctgaaccccaacagaggtcagcgactcttgcacttgtacgagcagattagatggtga

SEQ ID NO: 13150 - RNA, 1278 nt, synthetic construct
  source 1..1278: mol_type = other RNA
atgttcattcctatcacaggaccactcccgtcaagcatcaagattcgcaggcccatctctatagtgacccccttgctgaaaccctcctcttcccaccggaccgagctggagggaaagcctcggctgaccccgttacgctatcgcccagttgaatcgcgtgcagaagcggccctgccagttgaccacctcccttatcgattcgctcgactcgccactaggcccggccagtactgggatctcagcagagacggtgaccccgatcagctacgaacccttgggctgcccgagttccacacgcctgaacagcttgctgactggctgcagatgccggtggggcgattggcctggctcactaggaggtgtgcagagactcaacggccagaaacagagcgggatggccattattactgcagatggatggaaaaacggagcggaggatggagactcattgaagctcctaagcccatcctgaaaagtgtgcagcagagaatcgctcgtgagattctgcagaacatccctccacacgaggccgcacacggatttgtgagaggaaggagcattgtcaccaacgcacaaccacatgtgggtcgcagagtcgtcttaaagctagacctggagaacttttacgcttctgtgcggttcgctagggtagtagccatcttcaggcgagttggttacagtagggaagcggccatatggctcgcccgcttaaccacatctgccgcgccttggtcattgtcagcccctgatgggagtgacgatacgctccggccctacactgcgtggcatctcccacagggcgctccgacttcaccagctttggcaaatttgagcgccttttctctggacgtccggctgacaggcatggcacggtgttttggggccgcctacacgcgctatgccgacgatctgacctttagtgggtcccagagactgataagggctcttcctaccttcctgcccttgataacacagatcattcaatccgagcgctttcgggtcaaaaaggagaagcgcaaggtgcttaggaataatcagcgacagactattgctggcgttgtggtgaacgcacatcccaacgtaacacgctccgatttcgatcgtctgaaagcaatcctgacaaattgcattagacatggccccagcgaccaaaatagagaacaggtgccagatttcgctgcccaccttaggggtcgtatcgcccatgtgatgcaactaaaccctcacagaggcgccaaactgctggcactttatgagcagatcgactggaatcactga

SEQ ID NO: 13151 - RNA, 996 nt, synthetic construct
  source 1..996: mol_type = other RNA
atgggcctgtggcagtggctgaaacagcttctcttcggaagcacaagtgtggaggtcgaaatccctactgaggaggagcgtcaggaacgtcgaccaacccccaaactgactcctctgcgttatcacgtttcttcatgggagaaccatctgccttggaaacgagagtttgtgagccagcgcccctatagatttgcatgcaatacggatgtctgggggatgtacaacgatggctatgttgacctaagccttgatgcaaactttggtcagctggaacgctgggggctccccaagttcagcaatccagaggaattggctgaatggctgggtcttccggtcggccgggttgcatggttggctgacagagtgcgcagaggcgactggcgaggagatagggccaccgaccactactaccggaaatttgtcagtaagcgaagaggtgggtggcggttgctcgaggcaccaaagcctgccactaaggctgtgcagtaccgcatcctttccgagattttggagagggtaccacctcatcctgccgcgcacggcttcgtaaggggaaggagtattgtgacaaatgcaagaccgcacgcgggccaagccgttctggtcaagttagaccttgaaaacttctacacttccgtgtcgtatgctagggtggtggctatattccggagactcgggtattcacgggaagccgcgatttggttagccaggttgaccaccacgcaagcacccgagaacctccaaccgccccatgggaaggctaggctggattggcgctataccctacggcacttaccccagggagccccaacatctcctgccctagcaaatctcgccgctttctctctcgatgtgagactgtccggaatggctcggtcatttggcgcccagtacacaaggtacgccgacgacctgaccttctccggtcccaaacgctttctgcaatctctggacacattcctgccactggtgatccagataatccagagcgaatga

SEQ ID NO: 13152 - RNA, 1281 nt, synthetic construct
  source 1..1281: mol_type = other RNA
atgttccgttggctactgcgactgctttttggggaggacgaaagtgttacacaaaggtcccaacccgaaaaaatcgcccccgtagagactgatgaagcccctaaggttcgggtgaggccaaggctggcacggtttgagttccgccgacgcagggggcatcattcgacctccgctgccactcggactaccgagaagccgtaccggttcgcactcccgaatggtgtgtctggtgaaacaatagacaggagccaggatcagaattttgagcgactgacccgttgggagttgccagctctgaccactcctgaggacctcgccgattggatggaggtgagtattggagagctggcctggttaactcaccgcactgagtccgcctatcgccctccctctctagaggccgcccactaccatttcaggtgggtgcataaaaagagcggaggctcaagactgattgaatcaccaaagcgcaggttgaagcacgttcagcagctcctgctgcggggcctgttagatagagtacccgcccatccagcagcgcatggcttcgtgcgtggccgaagcatagtcagtaatgcccagcctcacgtgggaaaagcagtcgtgctctcctacgacctggaaaacttttaccctgccgtgcggtataaccgggtggtagctgtctttagagggctcggctattcccgcgaagccgccatctggcttacacgactgacgaccagcgctttgcctccaagaatgcccttacccgaggggagaggggctaatcttatccgggcttatgctgcgcgacacttgccacagggagctccgacaagccccgcacttgcgaacctgtccgcattctcacttgatgtgagactaaacggcctcgcaaattctttcgaggccaactacacaagatatgctgacgatctcacctttagtggagacgaccgcttccgccgctcactggcaacgtttattcctctggtcaaccaaatcgttagaagcgaacagttcgtggtccacagggagaaaagaaaggtggtaaaacacggtcaacggcaactggtcacaggtgtggtggttaatgatagacccaacgtctctagggccgcgtacgacaggttgaaggctaccctgcacaactgcgttcggcagggccctgcaagccagaatagggatgaacacctcaatttcgaagcgcatttgcagggaaaaatctctcacgtgagacagctcaacccagcccgcgctgaaaagcttcagcggctgtttgaccgtattgagtggtga

SEQ ID NO: 13153 - RNA, 1275 nt, synthetic construct
  source 1..1275: mol_type = other RNA
atgctcaggtggctgttcagccttctgtttggatccagggacgatggaggtcgtcctgctccagcgcagagaagaaaaaggcccaagtattggaggatcggcaagattaagctgtccagatttcagtatggcagacgaaatcgaaagctccaacgggacgagttggttagggagaagccctacgcctttgctttcaggtatcctcttcacagcaaatacatagatcgctcaggctcaggagactccgagaaactggccaggttcgaactgccggatctcaggacacctgatgacatagctcagtggctagggatgcccctgggaagggttgcatggctgacacacattacagagagacagtttcgaccacagtctttgagcgaggcccactacacctttcattggatgccaaaaaagttcggcggtgcacgcctgattgaggcacctaagcccctcatgagaaaggtccagcatcagattctgcgcgggattctcgaccatgttccagcacatgatgccgcacatggcttcgtgaaacacagatctgtgctgactaacgccgctccgcacgtggggcaaagagtggtactccgcatggatctcgagaacttttatgccaatatccggttttcaagggttgccgcgatattcagagaactgggatacagtagagaagccgctctgtggctggcccggttgtgtacctctgggcttcccccacgtatgccactccctgaaggtcggggtgccaatttagtccgtaattacaccgcccgccaccttcctcaaggagctccgacttctcccgccctggcgaatttcagcgcatattcgttggacgtgcggctgactgggctcgcaaatagtttccatgcaaactacacacgctacgccgacgatttgaccttttcagggggcgaccgttttttaaggagtttacgcgtctttatccccttggtcaaccagattatcacccaggaacggtttatcgctcagcctgctaaacgccgcgtgatccgggacaaccagcggcaaaaggtaacgggcgtggtcgtgaatcagaaacccaactgcgatcgacgggaattcgacgaactaaaggctatcctgcacaacagcgtgcgcttcggacccgcctcccagaacagacacgaccacgaggatttctatgcgcacctgaacggccggatcgcacatattgcccagctaaatccacagcggggcgagaaacttcgatccatgttccgacaaatcaattgggctaacagcccttga

SEQ ID NO: 13154 - RNA, 1323 nt, synthetic construct
  source 1..1323: mol_type = other RNA
atgggcctgattgattttctgttccggatgttgggtctaaagagagaatcaaggggggaattacccacgagtgtaccgaccaaaccccgccctgccgctaaaacccaaaccaaaacctcctatccacgcctgcacccactgagattcaaacgggaaagatggtccaaagttaagaagtcatcccagaaactgtctgcttctacccgccctttcagtgtcccagatgccaaaacagagcgaccctatcccctggctaatcaggacgtcaggtatggaggatatcttgatctgagccaggacagcgacccagtgcagttgcgagaattggagctgccccagtttactaatcctcccgagctggcagagtggttaggaattccagtggggcagcttggctggctgacataccagtttgacgagggacaccggcctctcactcagagagccggtcactaccacctccgttggcagccgaagcgtaactattcggtgcggctaattgagtccccgaaacctctgctgaagcaagtgcagcgtaagatcttgcgcgagatcctggaccatgtccccgcgcattctgcagcccacggatttgtctcaggcgaaagcattctgacaaacgccaaacctcactgtagacagagggtcatcgtgaagttcgaccttgagaatttttaccctaggatcaggttcagaaaggttaccgccatatttcgggccatgggttatagccgagaggcagctatatggcttgcgcgcctctgcacttctaacatcccagttgacaccaagctgccttcaatggatcccgaagtaatctttttgtacacgccccagcatctcccacaaggcgctccaaccagccctgctctcgcaaacctggcggcttatggcctggatgtgcggctcgagggacttgccaggagtttcggcgcaaattacacacgatacgctgacgatctgacattcagcggggatgacaagttcctccggtcccttaagattttcattccgttagtggaacaaatcataagagagactggctttagtgtcaacaaagagaagaggaaggttatccgggataaccagagacaggcagtaactggggtggtggtgaaccagcatcccaatatgaacaggaaagactacgataggctcaaagccattctaaacaattgcgtgcgccacggggccgaatctcaaaatcgagatcagcatcctgactaccaagcccacttacgggggcgcgtggcacatctgctgcaactcaatccaaagaagggcacaaagctccagagattgttcgaacgcatccagtggtga

SEQ ID NO: 13155 - RNA, 1317 nt, synthetic construct
  source 1..1317: mol_type = other RNA
atggggttctttgacttcctgctcaggttgctcggcctgaagtccaagccgcaggctacaatggcaccagctgcggggacccagttcaagaagaccacttcacctaagcggaccgaccggaagttggaccccttacgctttcagcgcgagcgctggagtaaagtagcaaaatctccccagcagcaaaccaccacatctcgaccgttcagcgtacccgctgtgaaggtcgagcaaccataccccttcgcccatttcagcccaatgggtgacggatatctggacctgtcccaagacggtgattctgtccagctccaagaactggagcttccagaattctcgaatccgcagcagatggcagattggctgcagatgcctgtcgggcagttagcatggctgacttgccaatttgaggaaggctacgctcatgcaacggaaaaagcggcccattaccacttcaggtggcttcctaaacgtaattttggctgtcgtctgatcgagagtcctaagcctctcctaaaacaggctcaacggaaagtgctgagagagatcctcgacaacgtccctacccaccaagccgcacacgggtttgtccagggaagttcaatcctaacaaatgcgcagccacattgcggtaaaagagtggtgctcaaatttgatcttgagaacttttacccacacgtgagattctcaaaggtggtagccatattccgttccatgggatatagcagagaggccagcatttggctcagtcggctatgtatgtctagactgcctttggattgcaagcctcccacagcaaatcccgaagctctgtggatttatcaaccaacacatcttccccaaggagcccccacgtcgcctacccttgccaatctcgccgcctacgtgctggatgttcggctggatggcctggcgcgaagcttcggtgccgactacagcaggtatgccgatgacctgacattctctggcgatgctcagtttctgaggtccctcaaatccttcatcccatttgttgagaagataattagagagactggctttaaagtgaataagaacaagcgcaaagtgatccgcaataaccagaggcagtcagttaccggagtgactgttaacgaacaccccaacattaaccggaaggagtttgaccgactgaaggctatcttacacaactgtgtgaggtacggctccgaaagccagaatagggatcagttgcccgactttcaggcacaccttcgggggcgagtcgcttatttccagcagttgaacccaactcgcgccgccaagttgaaacaggtgttcgaacagattagatggtga

SEQ ID NO: 13156 - RNA, 1263 nt, synthetic construct
  source 1..1263: mol_type = other RNA
atgtcactctggcagctgcttaagaatttactctttggagggactgctgcgtcctcaaatcccgccgtccgcaatacagagcatgagcgacgcagggggaggcctaggcttcaacccctgaattatagccagcattcccgcaaccgacagccctcccggcaggttagcgagaagccgtatctgtacgcccgaaaagatacctacagacaggacgggtggtacgatctgcgggagggtggcgacgcagagtttctgcagcaagaggggctgcctctgattgagagccctgccgagctagcagattggttagaccttaagcctggtcagttagcgtggctcactcactttttctcacctggcagtcgcgccgagagtgtggaacaatcccactaccactatcactgggtaagcaaacgttctgggggagagcggctgatcgaatctccgaagcccatgctcaagcaagtccaaagcaagatccttcagggcatcttgaaccaagtgccggtgcataggtcgtgtcacggcttcacgagggggagatctatactctccaacgccgaaccacactgtggtcagcgactactcctgaagtttgatctgcagaacttctacccatcagtgagcctcaatagagtgatagctatcttccggtcgcttggctacaacagggaagtggccatatggctgggtcggttgaccaccaccgcaatcccctccagtattccattccctgaagaaggccccaaaggcctgcgtgattatctcgcagaccatttgccacagggcgccccaactagccctgctctggcaaacctgtccgcctttagcttggatctgagattgcatggattggcaaatagtttcggcgctaactacacaagatatgctgacgacattacatttagtggacccgagactctgctgaaatctctaaaaaccctgattcctctggtggaagccgttatccgcgatgagcgcttcacggtcaacaaggccaaacgcaaagtaattcggaataaccagagacagacagtctgcggggtcgtggtgaatgaacaccccaattattccagaaaagaatttgacaggcttaaggctatgctgttcaattgcatcaggttcggaccagactcacagaaccgtgagggacatccaaactttcgggagcacttatggggccggatttctttcgttaagcagctcaatcccgcgagaggagccaagcttgaagctctctggaaccagatctcttggtcttga

SEQ ID NO: 13157 - RNA, 1296 nt, synthetic construct
  source 1..1296: mol_type = other RNA
atggaccaacgctggctggggattctgatagtggtcgcagcttggatcgtcgtaaggacattatttggaaagaggagaacccagccacggagctctcgcagcattcacaaagaacgatatgagcagcaaagggttaggcccgcaattcgggagaagcgccctctgattgtcgggcgcaacaaatcgccactgctggccgttgcaagtcctcctcactctttcgcccatcgcggacttaaacccggtacatggtacgatttgtcccaggacggccgcaatgatgagctcgtgagacgtggcctgcctgttttccagacccccgatgaactcgccgcgtggctgaatgtcccggtgaatagactggcctggctagcgtacagatgtacacgggggaaccttccaggcgtgtcacagagtcattatgtgtatacatggaagcccaagcgcacctatggctatagactcatcgaatctcccaaagcaagcctcaaaaccgtccagcgacagattctgaccgagatactagatcaccttcttgtgtcagaggcggcccacggcttccggaaagagcactcaatccttacgaacgcccagttgcacgtgaatgctgcagttgtggttaagttcgatctgagcgacttttacttgacagtacgcagtggccgaatcactaatttgttacgtagggtgggctacagccgcgaagtggcgatctggctgaccagattgactacgtcaactattcctggaaacctcccaccgccccccaccaaccctatcgtgatgtggaactaccggcaacggcacctgcctcaaggtgcaccaagctccccagcactggccaatttagtggcttacaggctcgaccagcgtctcttgggtcttgcaaagtccttcggggccaactacactaggtatgccgatgacctaacattctccggtgatgaatctttcgccgcagctctcagggcctttatcccgcttgttgaggctatcatcaggcgcgaacggtttcagtccaataatgccaaaagacagatactgaggagacaccagagacagatcgtggctggggtcgtagtcaacgaaaagccaaacttttgccgaaaggactttgaccggctgaaggctatactgcatcgatgcgtgactcagggacctgctgcccagaacagagatcagattgaggacttcgctgctcatctgcggggacggattgcccatgtacgacagctcaatccccaaagagccctgaagttagagagtctgtttcaacgtatcgactggcggaggtga

SEQ ID NO: 13158 - RNA, 1266 nt, synthetic construct
  source 1..1266: mol_type = other RNA
atgatgtggtatctgattttgatcgccgtcgtaactggcattggtgtcatggttgccagatccagagtgaggggagctagtaggtcacgaccacccggagattctcggtggcgtcgacttagacggcccttccagcatccacccaccccaaggacatctggggaagtggtccggcaacccccttacgctttcagctatggtgcaggggggaaagggcgtttttgcgacctgtcacaggatctcaatctagaccgcctgaccacgtggaagctcccggtgctgcgcactcctgacgacatagcccagtggcttggactgcccgtgaatcgtcttgcctggctcgcacataggtgcaggagaggccgcccagaaggtgttcagcagtcccactatcactaccgctggctccctaaagcctcaggcggcatgcggttaatagagagtcctaagcgtgaactgaaagccatacagcggcggattctgaaggagattctgcaagccgtgccagttccagcggcggctcatggtttcgtgcgcggaaggtccatcaagacccatgccgtattgcacgagcggatgcatgtattagtgcggatcgatctcagggatttctatgcaagcgtaggcttcaaccgggtggtggcaattttcaggacgattgggtacccacgcgaggccgctctttggctggcaaggcttactaccgccgctttgcctacaaacttagctgggccccctgaagaccccggagctgtttggagatacagaagaaggcaccttccacagggagcgccgacaagccctgctctagccaatctcagtgcctactggctcgacaagcgtctgactgggctcgcccgagcatttggcgccaattactcgcgatatgctgacgacctgaccttttctggagatgacgcgttggaccccaagctccgggttctgatccaactgatcgaacaggtggtcagagatgagcgatttcactcccatagaaagaaaagacgcgtgctgcgaaggcaccagaggcaggtcgttacaggcgtcgtggtgaacgacaaacctaacgtgagccggagagattttgatcagctaaaggctgtgctgcacaactgtgtgcaatttggcccggcttctcagaatcgcgagggccatgcacacttcgctgcacacttgcgcggtcggatcgcccacgtccagcaattgaaccccagcagaggagcaaaactgctggccgtctacgggcagatcgattggggccgctga

SEQ ID NO: 13159 - RNA, 1452 nt, synthetic construct
  source 1..1452: mol_type = other RNA
atgatagcgccaatccttaattggaacccagtctacggaggctctactgtcgacagaataaggaaccgtcactggctgtgtgacccagctgtcgacacgctaggcaattcaatgcagactatgcattgccagggaaaggacgtgtttatgggactgtggtcctggttttggtcatggtggaggcccacagggagtaaccacgcactcccaagctctccgccagctaatagagcgtccgggcagaagcggcaatggattggcagtacgaccaccccgaaattgcctaggctgcgttaccgctcacctgaaatggtccgccaatggagaatcgagggccgaggaacccaggttgatcagttgccctacgtttatgctcgttatgcacgtactcgccgacggaaacagttcctgaatctcctgacagatacccgcgtagatctgttacagcagcacaggttgccagtgctcacaactctggatgagctgagccagtttctcgggctgcctataggccggttagcagggcttatccacctggcagaccacggacggcctccaaccgagaagaagtcccattactggctgaaatggattcgaaaaaagagatccgggcacagactcatcgaggctccaaagcccgctttgaaaaaagtccaggagattattctgcgccagattcttgatctagtgccagcacaccccgctgcacacggattcgtgcccaactgcgacattcttagcaacgcccagctgcacgcaggtagggctgtggtagtaaagttcgaccttaaagacttttatccctccgtgacattcagcaaagtcgttgccatcttccggagcctcgggtatagcagggaaatggccctctggctggcccgactgacaaccagtgccctacccatcggtatggctttccctgataagaatccttactccatcatgcagtttacgcggcgccatcttcctcaaggtgcgcccacatctcccgcgctggctaacttggcagcctattcgttggacgtgagactgactgggcttgccaggcgctttggagccatctacactcggtacgccgatgacttaaccttctcgggcgaccatcgattcctgaagcagttgaagcgattcgtgccgctgaccgaccaggtgattgtgcaatgcaggtttcatagccagcctgccaagaggcggattctcaggcagtctaaccgccaaactgttacaggtgttgtggtcaaccagtctcccaactgttcacggagagattatgatcagctcaaagccatcctgcataattgtgtaagacacggccaccaaacccagaatagagatcaacaagtggattttagggcccacttacagggcagagtggcccatatacggcatctcaatcctgacagaggcgtgcgcctgcagaagatcttcgaaaagatcaactggaatagttga

SEQ ID NO: 13160 - RNA, 1293 nt, synthetic construct
  source 1..1293: mol_type = other RNA
atggggttgctgaattggtttttctctttgctatttggatccccaaggagggctgccagtcctccgactgctatgagtcagactagcggggctcgctcaagcgcccaaactcacgggcgcgtgcgcttaaaaaaggaccgtccccggcagtggagcaacaggttccggtccacacgggttgtggtgcctaagaagccctatccatttgccaggaagtcaattaccggcagaggctacctcgacatgtccaccgacggtgatgaccaagccttgatagccgccggcctccccgtatttcaccatccccaagagctggcagactggttgaggctgcccctgaaggaacttgcgtggctgacaaaccacttcagacacggccggcccatagatcctcagcgtgcgcattaccactttagatggatagagaaaagaagaggcggatggcgactaatcgagagcccaaagcgcctgctgaaagctcttcagtcaaggattcttgacgaaatcctctccaggatcgccacacacagtgcggtgcacggcttcgttcttggccgttcgattctgaccaatgccgaaccacatgtcgggcaatgcgtcgtcgtgaaacttgacttagagtctttttacccttctatcaggctggctagaattgcccgtctcttccgaggactggggtatagccgagaggcagctatctggttaggacggctggtcacgtctcggttacctctcaaccagccgttcccaaccggaaaatccggcacatctagtctgacgctgtggccatacttccctgctcatctccctcagggagctccgacatctcccgcactgtccaacttggtgctttcgcgactggacgccagacttgccggtctggctcgcaagttcggggctacttacaccagatatgcagatgatctcacattctccggcccagagaggttcgcagcaagcctggctgtgtttatcccactagccaagcagatcattaggcgggagggtctgagagtgaaccgcggaaaaactcgcgtcctcaggcaggccggaagacagatcgtaaccggtgttgtggttaacgagcggcctaatatcgatcggcgggcatatgataccctcaaggcgattctgaccaattgtcatcggcatgggcccactagccagaaccgcgacaatcacccccagtttgcactgcatttgcgagggcgaattggccacgtgtcattgctcaatcctgcacgcggtgccaaactgctagccatatttgaacagatcgattgggaaagatga

SEQ ID NO: 13161 - RNA, 1281 nt, synthetic construct
  source 1..1281: mol_type = other RNA
atgggcttcttcgatcgcattaggagagcattgtccggagagcccccccccacttcaaaagcgggcgaaactggcgagcggcctcaagagtaccgcagttttcccagagtgaaacctgttcgaactgttgcccggcatctgcccgtgtgtcaaccagacgctttggtgcgcgtcgagaagccctacgcctttgcccgtaggtcgccgctcacaggtgagtatctcgacaggcgggtgggaggaaaggtcgaaagattgaggaagttccggcttccagagttcggcaccccggaggaactggcgacatggatggggcttcccgtgaagacaattgcttggctagctgattttcacaaccgcaacgccggcgaaaaaaccgccaaaaagcagcactatagatacacatggcgacgaaagcgtggcgggagagggtggaggctgatcgagagcccaaaacctgtgcttaagctggtccagcaacgtatcctacatgaaatactggatagagttccagcgcacggggccgcacatggttttgtcaaaggcaggagtattctcaccaatgctgcatcccatgccggaaagtatgtggtagtccgttgtgatcttgccaacttttatccgtccatcagcttcaaaagagtgcgggccgtttttgcggggctggggtataattctgagatcgcgtggtggttggctaggctatgtaccaattgcaccccagacacgctggaaggcccttctggaggagcactgggcaggtttgcagccggtagacatttgcctcagggcgcacctacttcaccagctctcgctaacctcagtgcatgggcattagatgtgcggctgagcggtttggcccgacgctttaatgtggcctacacacgatacgctgacgacctgacgttctccggtgatgagaagtgcttaaatgggctgaccatggcacaccttctggcctacatcagggggatcattcgcgacgaaagattcgttttccaccctactaagcgcaaactcgtcagacgcgggggaaggcagatcgtaacaggcttaaccgtgaaccggaaacctaacgtccctcggccatacttcgacaagctcaaggccaccctccacaactgcgccagacatggaccctcactgcacaatcgagagaacctgcccgatttccgcgctcacctggaaggccagatagctttcgtaaggagcgtgaatccacagaaggccgctcggctgcagcggatttttgaccggatagtgtgggagggttctggatga

SEQ ID NO: 13162 - RNA, 1287 nt, synthetic construct
  source 1..1287: mol_type = other RNA
atgggactggggttcttgcggcggctgtttgggggtggctctgacaagccgccgtcaggacggaagacaaaccctaaaagacgtgcactcaaacccactgtggtacctggcgctcatgctccagcgccaaccgctcatccgcttcccgtctttgagaagccttacgccttccccctgttcgcgccagatacacaaaaggagtctcgggcacgctttctggacgggcgcgttggtggaaagcctgaccgccagaagggttggaacctgccccgtctggagactcccgaggacttggctaagctgtgcggcgtgccacttaaaacccttgcttggctctgcgactaccacaggaggaacgcggatgaaaaggttaagaaaaagcagcattaccactacgtgtggaagcagaaaaaagccggaggctggcgattgattgaggccccaaaacctctgctcaaacactgtcagcagcgcgtgctcagagagatcctagatagggttccccctcatggcgccgcccatgcttttcgtgccggaagatccattaagaccaatgcagcagcccacgccggtaagtatgccatcgtgaaggctgacctgagttattttttcccatcgataaggttcaaaagggttgtgagtgtgttccgaggactggggtacaatctggaattagcacgatggctcgcccggttgtgtactaacagacttcctcccgatctctccatccccggaacaaacaatacctgggctttatactctgtgctaggccacctggcaacgagccttggacggcatgtcccacaaggggccccaacttcccctgctttggccaatctgtgtgcctgggcaatggatgtgagactcaatgggcttgcgaggaagttcggcgctgtctatacccgctatagcgacgatctgacgttttcaggatccgcagaactcatgggtaagcgaaggatcaattatttcgtgagatacgtgcgcggcattgtgaggaatgaacggttcaaatggcaccctaaaaaagtcagagtagtaagacggggcagccgccagatagtcacaggcctaacagttaacgagaagcccaacgtggggagggccgatttcgaaaccttaaaggcgatcctccacaactgcgtaaagcaggggcccgctagccagaatcgatcaggccacgcagactttcgcgcctatctgtctggcaaactggcctttgtcaagagtgtcaacccacaaaaagcagctagactggagcgggactttgccaagattaaatggtga

SEQ ID NO: 13163 - RNA, 1257 nt, synthetic construct
  source 1..1257: mol_type = other RNA
atgggtttgagctttctcaaaaagctatttggcggctctgaatccgagaggccttccgggaaaaaaggcaagccaagtcaacggcttcctaagactacactggcccggtacaagccaaaaccttacgttccaagcctgagggtgaaaggggctaagccatatcccttcgctcagcctgcgtgtcctggattccttgacgggcgcgtcggagaagatgcagcacgactgcagcgttacggcctgcagaggctccaaacacccgaggagctggccgcgtggcttaaaatccctctgaaaaccttggcttggatggccgactatcaccgtaccaactacctggaggacgttaagaagaagcagcactaccattacaaatgggtcaagaagaggtcctctgctggataccgactcattgaagctcccaaaccgatgctgaagatgatccagcggcgcattcatgaggaaattttgtccaaggtgcccccacatccagcagcccatgggttcgtggccggcagatctataatctccaatgccagccagcacgccggaaagtacgtcatactcaagattgatttacaggacttctatccgagcatcaaaagaaggagagtgttggcggtttttcgcggcctggggtacggagtggaggcttcacattggttaatgaggctttgcgttaactgcatcccctcgaattgtgacgcccccgatgattcttcaaaggcttttcactggatcattagaggtatgtacgtgccacgccacctgccacaaggtgcaccgacttctcccgccctggctaatttcgcggcatgggccttagatgtcagattggccgggctggcaaagaagtttggagtgacctatacacggtatgccgacgatctaacgttcagcagtgatagtaagctcatgaagggaaaaagcatgaccatgctgatccggtatgtccgcggcatcgtaaaagacgaaggcttcaggtggaatgcatcaaagaaagctgtggtgcgacgggggagtcgacaggtcgtgactggcctcacagtgaacgcaaaacctaacgttgcccggaaagagtttgacgcccttaaagctattctccacaattgcgccaaaaaagggcccgcatcccagaacagatcaggcgtcgcggacttcagggcacacctgcagggtcgcataggttttgtacgtagcgtgaacccccctaaggccgccagactgcaaaaggtatatgagaagattgcttggtga

SEQ ID NO: 13164 - RNA, 1299 nt, synthetic construct
  source 1..1299: mol_type = other RNA
atgggcattttcgactggctgtttgggaagaaaaagaaagccgcgtatggagcagactgggacactactcagtctgctccctcatatcagggtcctgcaaatcagcctgcgcccgagcagagagagccgtttataaatgcacccgctagaaggacgaaacgcacccgtacatggggcctcaagtggcggcagcaacgatccaagcaccctctagaaagcgtcccgaacgaagaggagcccttctcgctatggagcaatccattcaaacatcacgccctttatgggggcaccgaagccaaaccatccaaaggtggatccgccgccaggattgaggcactgggcttacctaatttggagaatctggatgaactggcagccctcctcggcgagacgagaaacaacctcctgcattacatcatccgtgatcgacctggcgataggcattatgtggcccgagacttacccaagaaatcaggagggacaagaatgcttctcgtccccaagccaagactcaaagctatacagcgcaagctcaatgcaaagcttatcaggcgactgcctttgaacccggcagcacacggcttcaggagaagccacgacgttctgagtggcgcttctgtgcatgtggctcggtccgtggtaatttccgtagacattgaagcctttttcccatctcttacatttcgcagggtcagtggctttctgcgatctatcggttacagcaggggaatcgctaccgccctggctaacctgatgacaatccggccttgtaatgtggctggcatcgggaggacagctgacactaggtacccacaactgccccaaggtgctcccaccagcccaggaatcgctaacgccatctgctggagaatggacaagcggttgtcagccctagcccgcaaattcggcggggattacactaggtacgccgatgatctgaccttctcagggttcgatgagatggccaaaggagcggggcggctgttacagttggtgcggaagattgttaaaactgaaggactggccctgaacgagaagaaaacacgcattatgcggaaggggagacaacagcgtgtcaccggtgtggttgtcaatcagcagaccaacgtgagtcgccgtgaatttgataagcttaaggcgattttgcacaactgcatcaaacatgggcctggcggacagaaccgggaaagcgtgccagacttcaaggagcacctgcgcggacgcatagcacacataagtcacattggccccgagagaggtagaaagctcaaggccatgtttgaccagatccggtggtga

SEQ ID NO: 13165 - RNA, 1212 nt, synthetic construct
  source 1..1212: mol_type = other RNA
atgggaattctggactggctgttcggtaggaaacggagactgcccgctgaaccagaagtttttgtccctaggcctgtggaggtgcccgattctcccaacgctcgggaaccctttctgaaccatcccatgccccggagcaagcgcagatggtattatgagcgcaccgctaatctgttctggagaaatggacgaagtaaagagccaaagtattctacttcaatcgaacctagcccaagtaggatcgaagccctcggcctgcctgacctccgagagttaagggacctggcagccctgcttggtgtagcgttgaaagacctgaagcagtactccgcccgtcctaaccacgccaatgggcattaccttcccctgtacattacaaaaaagaacggcaccaagcggctacttctggcgccaaaaccacggctcaaagctatccagagggccctacaccagaagctcgtcagaaagttgccgttgaacgaggctgtgcatggttttcggcgtggacgagactccctctcctcagcctctgcccacgtgggaagggacgtggttatctgcatggatatagaggagttctttccgtcgttcgatttccggagagttagcggatttttcagggcagtgggctattctagggaagtagccgtgatgctggccaacctgacaaccgtggcaccagatgacgtccctaatgcagagagcagatactgtcgagatatcccacaactgcctcagggcgcacctacaagtccggggttagccaatgctatttgttggagaatggacaagaggctggcagcacttgcgcaccggtttggagccgagtacacacgatacgccgatgacctcacgttttccggtcacgatgatttagctgatggggctaacaagttcgtcagaatggtgcgcgagattttgctctcagaggggttgtatgtcaatgaagataagactcgtatcatgagaaaatccagacagcaacgtgtgaccggcgtagtcgtgaacgagcggactaacgttagccgccgggaattcgaccgcctgaaggctatactgcacaattgcgcgaaacatggacccggcggccagaatcacgaacgccatgaggactttgcaggccacctacgcgggaggattgcctacttctgccatatagggcccgagaggggccgcaaacttatgcgcatgttcgaactcatcaactggtga

SEQ ID NO: 13166 - RNA, 1203 nt, synthetic construct
  source 1..1203: mol_type = other RNA
atgtgtgtcgcaaacaaacccaatccaaaggaaccgttcctgtcctcccccgaacacaccctcgaccgaaggcacaggaaaagatgggctgggcttgcctataggcgaaaacgatccaaatggcggatttcacctgtggctgatcagtcaatcgaaggctgtgactggcgcgataagctgggcaatgtcagcgcggacagagtgccgcaaggagttgccggaagagtagcaaccctcggattgcctgctataaattccgtggaagaccttgctgcactgatcgggatcacgcctaaccagttagctggttttgctctccggggggatgggcaaaggagccattacgtgggcagacccatcccaaaaaagtccggtggtgagagacggttgctcgtgccactgcctcgtctgaaagccgctcagcaagccctgcacaggaagctgatctcgctgctacccctacagccttgcgtgcacggctttcggctgaaacacgacgtcctcacaggaagtagcgttcatgttggaaggcaaatcgtaattggcatggatattgcagagttcttcccttcatttacatttcgccgcgtcagtggctatttccgtgccttagggtacagtagagggattgcaatcgcccttgcaagtcttaccattacatcttgcatggacgttcccgactataccccagaggcctactctaaccactcttacaccgagctgccacaaggtgcgcccacttctcccgggatagccaatgcgatctgttggaggatggataagcgactaagcgccctggcgcggaagtttggcggcgattacactagatatgctgacgatctcactttctcaggctttcaggacatggccgataacacaggccggttgctgcggattgtccgccagatcattgaaacagaggggttcgtggtaaacgagaataagactcggatcatgaggcgtggaagccagcagcgagtcacgggtgtggtggtgaacgagaagaccaacttgcctaggcgcgagttcgacaaaatcaaggccataatacacaactgcattaaacacggcccagctactcagaatcatgcccagcatgaaaattttaaggaacatctgcgcggtagagtggcacatgcacagcacattggaccggagcgcggacagaagttaaaggccatgttcgatagcatcgtgtggtga

SEQ ID NO: 13167 - RNA, 1380 nt, synthetic construct
  source 1..1380: mol_type = other RNA
atgggatttctggattggctgttcggcagaaagcggttcctgccaccgcacacacctccttcacccgtcggacccaggaatcccaatatccccaccatctccgaatccgggactgctcccgtaagaccgccagctgggggacaatcccagtcaggtcagcacagcctggggagtcgatacaatccccgcatcctgcgtccccgcagaaggagatctagccggcctagagagattgatgccgggaaatccgagcatctggaccggtggccacacgatgaattagacaggcctgaccctgccagtttaaccctgccagcacctcgagcggactgggttccgttgggcgatcagagcgccctcgctgctctcctgggaatccagcccactgacctcaagtactggctagtaggccatcatctggatgaaaactatatactccgcgaaatccctaaaaagagcggtggaacccgattgctgatggcacctatgccaaggttgaaggcactccagagacaactccaacaggcactggtgtctcggctcccactgtcaccgtcggtgcatggcttcaggcgacgccatgacgtccttaccaatgcagcggtgcatgtggggaaacgggtcgtggtttgcatggatatagcagacttcttcccaagcttcgacctgagaagggtgtgcgggtattttcgctggcttggctatagtcggagtgtcgccctgtccttggctagtctcacaaccgctgactcattcaacgcacgactggccaaaggacgcggcaggacaggcctttcctctgattggacagagcggaacgaggtcgaaaatcggtgtcaaagcgtgaacaagatccatcggactagcccacttcgttaccgcggatatagactaccacagggcgcccccacttctcctgggattgcgaatgccattgtatggagaatggataagcgtctgtctgctttggcgcggcggttcggaggtgattacacgcgctacgccgatgacctcacattttcggggtttgagaaattagccaagcacactcgtatgtttattaaacttgtggagaagatcgtgcacacggaaggcctagctataaacagaaagaagactcgcatcatgcgttccggcagacggcagagggttaccggtgtcgtggtgaaccgccagaccaacttagctaggagagactttgacttgcttaaagccatcctgcacaactgtattaccaaaggcccctctacacagaatcgaagcaatcaccccaacttcagggagcacctgagagggagggttgcccacgccctccacattggtcctgagaggggcgccaagctgcagcaactgtttaaccagattgattggtcaaggtga

SEQ ID NO: 13168 - RNA, 1164 nt, synthetic construct
  source 1..1164: mol_type = other RNA
atgagaatgcttaagccccgttataggcggtcaaaagatccaaaaagcatcgaagggaagcaaaacgaaccgattggctactggcatgaacagatgggcgggacagttaaggacccggtgaaaggtggaaatccatcacgaaccgctcagctgggcttgccctctatcccccatgccgacgcactcgcgtctctgcttggtatatcgacaagagccctggaggggtggattggcgggctacttaatgagcaaaactacgtagtgcgcggtatagccaaaaaatcaggcggaacgaggtacctcatggcccctatgcctaagctgaaggctttgcagcgaacactgagaaccagcttggttgataaactaccactgaacgcctgcgtacacggcttccggcgcgatcacgacatcctgtccaacgggacagtgcacgtgaacaagagggtggttatttgtatggatgtgttgcaattcttcccttccttcgatctgcgcagagtttgcggatatttccggtggttaggctacagtcgcgggatcgctctgtccctggccaagtttactacggccgacagttttaatggtcagttagtctccgcatccggacgggaggggtttgctcagagcaccccagcctacgtagccctgaaaaatcagtacaggcagcctcaattgccccagggagcccctacttcacccggcatcgcaaatgctattgtctggagaatggacaagagactcaccgcacttgctcgtaagtttggcggcgattatacacgctatgccgacgacctgactttctctgggttcgagaagatggctaaacatgccaaattaatcgtggctctggtggagaagattgtccacactgaaggacttgcaataaataagaagaagaccaggatcatgcgtaaaggtcgccagcagagggtgaccggagtcgtggtgaataaacaaactaatgccagccgggagcagttcgatctcctcaaggcaattctccataactgtgcgaaaaagggccccagcacccagaaccgatctaaccacccaaactttaaagaacacctgcggggacgagtcgcgcatattgctcacatcggccctgagaggggggcgaaactgaagaagctctttgacgcaatcgactggagtagatga

SEQ ID NO: 13169 - RNA, 1401 nt, synthetic construct
  source 1..1401: mol_type = other RNA
atgggcctatttgactggttgtttgggcgcaaaaagaaagacccccctacctataggaatccatacccccccaaagtgcactcattcagcgagttctctgccgactctaccttgcccgcgcctaggcagcaggctcgtaggaacaagcccactcgtcgcaaactgcagccatttgctccgcagtcctacaagggccatagaacactcggcctgtcctggagaagagaacgcagtaaggaaccagttgatcgagttcctaatagctacctgagtgtggcccattttcagcacttcggagggaccccatcaagcataccagagggcggcgatgccgcaaaattgctcaatgtcggtctacctgtcctgcgccattttaacgaacttgccgctctactggaaattgattctactagtctttacaaactcgtcgtgaggactagcgcccagcattatctttttcatgagatcgctaagaagtcgggcggaatccgtctcttaatggcgcccttgccacgcatgaaagctgcccaaaggcgacttctccaggcattagtaagcaaggtcccgttgcacctggctgcccacgggtttcgagaaggacaggatgtactgacgaacgccggccctcacgtaggaaagccaattgtcatatgtatggacattagtgacttcttcccttcttttacattccggagagtctccggcttcttcaggcacctggggtatccacgtgggatcgcggttgcgctggcaaatctgactacttggtcaccaagaggccagttccagctgccgcaaacaaccgggcggaacctgcgatccgtggactacaaagaacgcaaggtgcagcttgctcgggccgagtggctggattcaggcggaaacgagatcccttcccggatgtggccccagttacctcaaggtgcccccactagccccgggttagccaacgctatcgtgtggaggatggacaaacgactttctgcactggcccgcaagttcgggggagactacaccagatatgccgacgacctcacgttctctggttttgagaaaatggctgagcatagcagaaccctgattagcttggtggagaaaatagtgaagaccgaaggactcaccattaacgtgaataaaacaagggtgatgcggaagggcagaagacaaaaggtgacaggtgttgtggtcaacaagcagaccaacgcctcacgggaacagtttgatctgctgaaggcaatcctccacaattgcgcaaaaaaagggccgagtacacagaatcggtccaaccatcccaatttcaaggagcacctgaggggacgggttgcacacattgctcacatcggccctgagcgcggtgcaaagctgaagaagctctttgatcaaatcgattggtcccggtga

SEQ ID NO: 13170 - RNA, 1188 nt, synthetic construct
  source 1..1188: mol_type = other RNA
atgagttttcggctgcgtcgcagcaaagagcatataggacctgtgaaggacctgacactctctggtagccgtaatcctatgaccggggaagcaagttccgtgggagcaattggcaatatcggaggtagcgcaaggcacccagatatcgggtttgactccgctaccatccgctcactggggcttcctgagattgaacacctcgatcagctggcccaagtgctgcagatcgaccggaaccagctagtttggttggccgcaagacctgccttctctgaaaatactgatgcccactatacgctgaaagcgatccccaagaaagccggcggcaggagattgctcatggtcccgctgccactcctgaagcgggcacagcagagactcctcgcggaactggttagaaaactgccagtgcatgaggccgctcacggatttagggttcagagaaacacacttacaggagcttccattcacgtgggtaaggacgtggtgatagggctggatattgccgatttctttccctcattcacatttagaagagtgtcggggtacttccgctcacgaggctacggccgagggatctctgtagccttagctaatctgactactaacaggctgcttgacactatcaccaaggacggaaaaaggtggaagtatcctaaacggaatgcgtttcccgagctttttgaacatccccctcacccaatattaccccaaggcgcccccacgtctcccggtattgccaacgctatctgttggaggatggacaaacgcttggcagccctggctctaaagtttggcggcgactatacccgctacgccgacgacttgaccttcagcggattcggggacatggctaggggcgctgagaggctgattaagctcgtacggaaaattgtcgagactgagggtctagctcttaacgaaaagaagacacgcgtaatgcgccagggacggcaacaacgggttaccggcgtcgtcgtgaatgatcagaccaatgtgagtcgacgagatttcgatcgactgaaggccatcttacataactgcatcaaacacggcccacacgggcagaacagagagaacgtcccagatttcgagcagcatttgcgggggcggatcgcacatgtgtcccacattggaccggaacgcggcaggaagctcatgagaatgttcgagcagatacgttggtga

SEQ ID NO: 13171 - RNA, 1371 nt, synthetic construct
  source 1..1371: mol_type = other RNA
atgggctttttcgactggttgttcgggaagaagaaagacccttatgggggcaaattgcaaaagggctattcatccccacgagcacagccacagccggccaaaacctaccaacaccagcctcagggctacgggggacctgtaccaccacctacaccccagcagcaacgtgccgtaggtgtgaggttcaggtttctcaagtggcgcagagcaagatctaaagatccactcccccctctgcccgaccaaaccattagcggtggcatagaccccatgaccggagcctataccgagccgggtgccatcgctggattgggagggactgcgcaacatccagacccacactttaagcctgatcgggtgagagccgctgggttgcccgagattccccatttggacgcgcttgctgctttagtcggagtcggtcgtaatactctggtgtggcttgctgggaaacctctggctagtgagggctgtgattcccactataccgtcaaagccatcgataaaccgagcggaggccaacggctgctgatggttccgctgcctaaactcaaggccgttcagcgcgcacttgtggaccgcctgattaataagctcccagttcatgatgccgcgcatggctttcggaagggaagagacgtgctgagcggtgcaagtgtccacgtgggcaaggacgtcgtgatctctctcgacatccgcgatttctttccaagcttcaccttccgacgggtgtcgggctactttcgcagtttggggtacggaaggggaactgccgtagctctcgcaaatctgacaaccgcgagacttaacgacgcccaggtcaaacagggcaaaaggtgggtgtacgctgctcaggtacacaagttacggacatactcccacccagaactcccccagggagctcccacatcacctggaatctctaacgcaatctgccgacggatggacaagagactggccggtctggccagaaagttcggcgccgactatacgcgatatgccgatgacatgacgttttccgggtccgatgacctggccttccacgcacccaaatttataggccttgtgacaaagattgttcagtcagaggggctagcactaaatgataagaagactcgcgtgatgaggcagggcagacagcagagggtgacaggggtcgttgtgaatcataagactaatgtgtcaaggcgcgattacgatcgtctgaaggcaatcctgaacaactgcatcaagaggggcccccacggtgaaaacagggagaaccatcctgatttccggggatggttacaggggaaaattgcccacgttagccatattgggcccgaacggggccgaaaactccaggctctgttctctcagattagatggtga

SEQ ID NO: 13172 - RNA, 1338 nt, synthetic construct
  source 1..1338: mol_type = other RNA
atgggcttcttcgactggctatttggcaaaaagaaggacccatattcaggcaacgtccagaaggactataccagtccaaggcaaagaccccagacggcccagacatatccacagcaaccccacggctacggttcacctgtaccgcccccgaccgtgcagcaacagcagagtctgggcatccgtgatcgctacctgagctggcgccggaatagaagtcgagctcacgtaccacctgtggctgatcagacccttggcggcaacgaacatctagggcacttgggaggtacttccagacaccctgacaggcaccagaatgccgcggctttgcaagcggctggacttcccctcctgccccaccttgacgctctggcagcaatggtgggggtggagctgaagacactggtgtggctcgcctcgaaacccgtcgcttccgatgaatgtgaatcccactataccatcaaagcaatcgataagccttccggcggcaagcgtctgctgatggtccctttacccaaactgaaggccgttcagcgagccctcgtcgagaaactcgttaacaaacttcccgtgcatgaggccgcacatggcttcaggaaaggaagagatgtgctgacgggagccagcgtacacgtgggtaaggatgtagtcatttgcgctgacattcgggacttttttccatcattcacttttcggcgcgtcgcagggtatttccgctctttggggtacggacgcggaacagcagtggccctcgccaatttgactactgcccgaattaatgacgccctggttcggcagggagacacatggacctacgcggcagaagtttacaaggtccacctctgggggcatccagaattgcctcaaggcgccccgacttctcccgggatagccaacgctatctgcagacgtatggataagagactgaccggccttgcccgcaagttcggggcagattataccaggtacgcggacgacctgactttttctggtggggatgacctggccttccacgcaagcaagttcctcgggctggtgcgccagattgtgcagacagagggactaaccttgaatgacaagaaaacaaggataatgcggcagggaaggcagcagcgagttacaggtgtggttgtgaatgataagacgaacgtgtctcgaagagactacgacaggttaaaagccatcctgcacaattgtgtgaagaggggccctcatggtgagaaccgggataaccatcctgattttagaggatggctccagggcaaaatcgctcatatcagccatattggtccagagcgggggaggaaactgatggctttatttcaacagatacggtggtga

SEQ ID NO: 13173 - RNA, 1335 nt, synthetic construct
  source 1..1335: mol_type = other RNA
atgggctttttcgactggctgtttggcaaaaaaaaggacccatacggtcccaggcgggatccctatcagcagcaacccaaagcctatgggggacccgtgcccccaccaactgctcaacaggcttctgcaattggcctgaggaacatcttccttagctggcgaagacggcgttccaaaggccctgtcccagcccaaccggaccaaaccattcgcggtggattgaaccctcagacaggagcttgggtggaccctggagccatcagctccatcggcggcacacgtcagcatcccgatccatactacgatagtgcaaaggtcagggccgctggattgcccgacttaccccatatagatgctatggcggaggtgcttcgcgtcgataggcggaccctggtgtggctagccgcgaaacctgttccgggcgacagcctggatagtcactacacacttaaggaaatgcctaagtcgagtggcggtacccggctgctgatggtcccactgcctaagctgaaggctgtgcagcgggccttggtggaaaaactagtcaacaaactacctatccacgaggcagcacatgggttccgcaaaggtcgcgacgttctgagcggggcctctgagcacgtcggaaaggacgtggtaatctgcgctgacattagagattttttccccagcttcacctttcggcgggtttccggatattttcgctcattagggtacgggcggggcacagcggtggcattagccaatttgaccaccggtagactgatggatgccagagtccagatgaacggaaggtggcagtacgccgctaagctcaagcatccagaaacgcacgcacgatatcacccggaactgcctcaaggggccccaacctctcctggaattgcaaatgccatctgcaggcgcatggacaaaaggctcaccgggctggctcgaaaattcggcgccgactacactcgttatgcagacgatctgacattctcagggggcgatgaccttgcctttcacgcgtcaaagttcctcggtctggttaggcagatagtgcagactgagggccttactctcaacgacaagaagactaggatcatgcgacaaggacgccagcagcgcgttacgggggtggtagtgaatgataagacaaatgtgtctcggagagattatgacagactcaaggcaattctgcacaattgtgtaaagagaggaccgcatggcgagaatcgtgataaccacccagacttcagggggtggttgcagggcaaaatagctcatgtgtcccacattggtcccgagagagggcgaaagctcatggccctctttaaacagatcagatggtga

SEQ ID NO: 13174 - RNA, 1335 nt, synthetic construct
  source 1..1335: mol_type = other RNA
atgggaattttcgactggctgtttgggaagaaaaagaaagatccttatggtgggggcggcctgagcaaggattatggtgctcctaagccatacagtgatatgcccaggcagtaccagcggccatcagaccctgctccaccacgtaccttcgaaccggacaatcgcgagataaatctgtcgtttcggctgggacgatccaaacaacccgtgaccccactgagggaccagacagtagggaggaatgctaagccgggtacaaccaacttagaccatctgggcggcaccagggataaccccgatccttatacagacgtcatgaaactccgcagtaacggcctcccagagatcgacagcctggatgctcttgccgaactggtgggatccactcgcgagtcactgctctttctggcagccaggtctggatgggataggcccgcccattactccctcaggcagattccaaagaagagcggaggcacccggttactaatggcgcctatgcccaagctgaaggcagtgcagagagcactacatggcaaactggtgcagctccttcctgttcacgaagctgcgcatggcttcaggaaggggcgagacgctcttagcgcagcaacccctcacgttgggaaggacgtagtcatatctgtcgacatcgagaacttcttcccctcttttactttccgtagggtggctgggtacttgcgaacactgggatacggtcggggcgtcgcagtagccattgccaacttgacaactgccagactcgccgacggcaaatacaaagagggctcaagatgggttcctggacacaacctccgccaccccgatatggccggacgctaccaccccgaattacctcagggagcccccacatcccccggtctagcaaatgccatctgcctccgcatggataagagattggacgctcttgccagaaaatttggcgcgacctatacgcgatatgccgacgacttgactttttctggctatgatgacctggctaagagtgccgggaacctgttgcagctgatcagacaaatagttcggacagagggtcttcgcctcaatgaacagaaaaccagaatcatgaggggaggtcggcagcaacgagtcactggcgtggtggtgaaccagaaaacgaatgtgccaagacgcgaatacgggactttgaaggccatccttcataactgtattaaacacggaccagcggggcagaatcgggataatcacgcagatttcaaggagcacctgcgggggagaattgctcatgtgagccacatcggtccggagcgtgggagaaaactgatgcgtatgttcgagcaaattcggtggtga

SEQ ID NO: 13175 - RNA, 1356 nt, synthetic construct
  source 1..1356: mol_type = other RNA
atgggcctgttcgattggttgtttggcaagaagaaggacccctatgggactaagccaggccaggactatggagacaaggatcacgcccccaaaccctacaatgaccagcctaaacagtaccagtcagcacagaagccctaccaagctcctccaaagtcatacggtgctccaccaccgaaacctggcgagaggacggagaagctttcattccgacaggcccgttccaacaaacccgtcgatccgctcgccgatcagaccatcaagacacctcggagagggcccaacttggcccaccttggcgggactagggaaagtcccgaccctcatacagatgttattaagctgcgcaacaacggaatgccagaaatcgcccacctggacgatctggctgacttagtgggcgcaacaagaaatgagataattttcctggcctctcgcccaggatggggagaaccttcccattataccctgaaagagcttcgcaaaaagagcggcgctacacgcatgctcatggtgcctatgcccagaatgaaagccgtccaaagggctctaaatgctaaactcatctccaggctgcctgtacacgaagcagcccatggcttccggaaaggacgtgacgtcctcaccagcgcaagcccgcatgtggggaaggatgtggttatatccgtggatatcgaggacttcttcccatcctttaccttccggcgggtcagtggctactttcggaatctgggttatggcagaggtgtgagtgtggctcttgccaatctgatgactgcacgcctgagagacggtgcaaccaaacagggaaacaagtggaaaccggtcgcgtatggaagccatcccgatattggaaagcggtaccaccctgagatcccccaaggggctccaacctctccaggactggcaaatgccatcagccgccggatggataagcgactgcacgcgttggcccagaaattcgcagccgactacacacgatatgccgacgatttgactttttctggcaatgatgaactggcgaaatcggttgggaacctactccaaattgtgagacaaattgtgcgaaccgaagggctccgtttaaacgagaaaaaaacaaggattatgcggaagggtaagcagcagcgcgttacgggggtggtagtaaacaagcagactaatgtgtcaagacgggaatacgacaaactcaaggctatactgcacaactgcattaagcacggcccaaccggccagaacagggagaatgtgcctgactttagggaacaccttagagggaggatcgcgcatgtctctcatatcggtcccgagcgcgggcgaaagttaatgagaatgtttgagcagatcaggtggtga

SEQ ID NO: 13176 - RNA, 1359 nt, synthetic construct
  source 1..1359: mol_type = other RNA
atgggcctctttgactggttgtttggcaaaaagaaaaaggatccttatgggggctctttcagacaggattatgatagcggacgctcgtataatgaccaaccagtcgagcggtaccagagcaaagctaccagaaggcctccagccgtcgaatcccccagacagaaacataggactgggaaattaagctttcggcgcctgcggtctaaccaggcccttgatccgctacccgaccagaccttagacggccgcaacccgaacaccggccaactgacaggttccccactgtcacaccttggaggcacaaggcaagctcctgaccctcacacggacgctcagcgactgaggaatcacgggctgccagtagtggagcacctggatgacctggcagaactgctgggtaccgctcgggatgaactggtgtacttgagtgcacgacccactgttgaggaacctacccattacacgttgaaggaactcccaaagaagagcggagggactcgtctcctgatggtgcctatgcccagacttaagtcactccagcgaactttgaatgcaaagctgatttcactcctgcccgtgcacgactgcgtacatgggtttcgtactggacgcgacgttttgtcgtccgccagcgctcacgtctccaaagatgtgctagtatccatggacattgaagatttcttcccctcatttacattcaggagggtggcaggatatttccgcagtcttggctacggccgagggacatgcgtggcactcgcgaacctgacaaccttccgtctcgctgacgcaagtgtgaaaagaagtaacaggaacgcctggaagcttgcgtccgtccatcatcacccagacgcaatgaggagatggcatccagaacttcctcagggggccccgacatctcccggaatagctaatgctatcgcccggagaatggataagcggctgcacgccctcgccctcaaattcggtgccgattacactagatacgccgacgatttgaccttttctggcggcgaggagttagccaagggcgttgggcgacttctgatgctagcgagaaagatcgtgaagacagaaggcctcgccctgaatgagaacaaaacccgcataatgcgcaaaggacggcagcaacgcgtcacgggagttgtggtcaatcaacagaccaatgtgagccgcagggacttcgataagttaaaggctatcctgcacaactgtatcaaacacggtcctgggggtcagaatcgggagagcgtgcccgacttcaaagagcatctgagaggcaggatcgcgcacatttctcatattggacccgagcgtggtcggaagctgaaggccatgtttgagcagatccggtggtga

SEQ ID NO: 13177 - RNA, 1008 nt, synthetic construct
  source 1..1008: mol_type = other RNA
atgcccgcccttccgcatctggatgccatggcagagctgttgggcacccctagaagcgaactacagtggctagcgcaccggcccgtgcaggaaatagcaaaatctcatgtgcactataggctctttgaagtgcgcaaaaagtcaggcggcacacgccttttggcagcacctctcccacgccttaaggctgtccagcaccagttgttagacaagctgatctcccgattacccgttcatggggccgcccatggtttccgacggggaagaggaattctgagtggggcaaacgtgcacgtagggaaggatgtgctcgtatgctttgacatcaaggatttcttcccaaccttctccttcaggcgtgtctcagggtattttagatggctcggctacggcaggggcattgcaaatgccatcgctctgctgaccactgcggcacttcacgaggccacaaccgggggaaaggggcagtggactcccgcttacaacacaaggcaccccgacctggtgagacggcatcacccagaattgccgcaaggcgctccaactagccctggccttgccaatgccatttgctggcgaatggataagcgcctgagcgcgctggcttctaaattcggaggtgattatactaggtacgctgacgacctgacctttagtggtggtcaagatctcgctcgccatgccgataacctgatcaagctggttcgcaaaatcgtgcggaccgaggggctggagttgaatgagcagaaaacgcgtgtcatgagaaaaggacggcagcagagagtcacgggagttgtggttaacgaaaagacaaacttatccaggcgggattttgacaagctgaaggccattctgcacaattgtgccaaacacggtccagctgggcagaatagagcagaccatcctgacttcaagggacacctccaaggacgtgtcgcccacgcgatgcatatcggccctgagaggggcgccaagctcaaagctatgtttgacaaaatagtgtggtga

SEQ ID NO: 13178 - RNA, 1350 nt, synthetic construct
  source 1..1350: mol_type = other RNA
atgggcctgttcgactggctattcggaaagaaacgggacgaatatggcgcaggcctcaatcgcagctatccaccttcacagccccagcaagtacgcccagtccccagtcaagggggccctgttccttcagccgggactccacagaatggcaagagaacatcctaccttagctggagacgaagacgctcgcgggagagcgtagtatctgtgcgcgatcagacactggggggatctgttgatccacaaactgggcgacattcagaggctggcgccataggcaatttaggtggaagtcctagacacccagacccctatttcgacgctggtcgagttgcctcccatgagctgcccgctttgcctcatctggactcccttgcagccctcgtggaaactccactcccggaactcaaatggttgagcgtgatgccacccttcggggataagatgtggggccactattgccttttcgaggtcaagaagaagtctggaggcacgcgacttttggccgcgccattacccaggctgaaggccgtccagcgcagaatcctagataagctggtgagtaggctgccggtgcatggtgctgcacacggcttccgccgaggtaggggaatcttgagcggcgcgaccgtacatgttggaaaagacgtccttgtctgctttgatattaaagactttttcccctcctttaccttcaggagagtctctggcttctttcggtggttggggtacggaaggggtattgcgaacgccatcgccgctttgactacagtgcgtctgaccgacaccaaccgccgtcgcgaagggaagtgggaacaccctgggctggcaaagcatcctgacatgctcaaaagaagacagccggaattaccccaaggcgcccccacttcccctggattagcaaatgccatctgttggaggatggacaaacgtcttagtgcactggcacggaagttcgggggagattacacaagatacgccgatgatctgacatttagcggcggggaggactttgctaggcacgctgccaacctcattaaactggtgcggaagatcgtgcggacggagggactggccctcaatgagaagaaaacccgcgtgatgcggaaagctcggcagcagagggtgaccggtgtggtcgtgaacgaaaagaccaatctatgccgtcgggattttgacaagctgaaagcaattctgcacaactgtgcaaagcacgggcccgctggacagaacctggagaaccaccctgattttaaggggcatctgcagggtagggttgcccacgccctccacataggcccagagagaggcgcgaggctcaaagctctgtttgataaaatcgtgtggtga

SEQ ID NO: 13179 - RNA, 1143 nt, synthetic construct
  source 1..1143: mol_type = other RNA
atgcgcgaccagacgttgggtggcgcccgtaacccgcaaacaggagctccatccgttgccggggcaattagcggggtagggggaactccaggacatcccgacccctacttcgatgcaggcagggtcgcatctcacgaactcccagctttgacccacctggatgcactggccgaacttatcgaaactcccagaaacgagctcctgtggctggcagtcaagccccctttttctaataagctctggggacactatcacctattcgaggtgaggaagaagagcggtggcactagattgttagctgcgcctatgcctagactgaaagcagttcagcggaagctactggacaaacttgtgtcaagactgccggtgcacggagccgcccatggtttcaggagaggccgagggattctcagtggcgctaatgtgcacgtcggcaaggacgtcctcgtgtgtttggatatcaaggattttttcccctcgtttaccttcaggcgtgtatccggttactttcggtggctgggatatggccggggcatagcgaatgctatcgctgccctcactactgcccggctcacagagacaaaccagaggcaaggaaccacatgggctgctgcccatacgggaatgcatccagatatgaaccatcgccgacacccagaacttccccaaggggctcctacctcaccagggctggctaatgcaatttgctggcgcatggacaaacgactgtccgcgctggcccggaaattcggaggtgattataccaggtacgccgatgacttaaccttcagtggggggcaggacatggcaagacacacagacaacctgataaaacttgttcggaagattgtgcgtagcgagggcttgcagcttaacgatcctaaaactagagtgatgcagaaaggtcggcagcaacgagtgaccggggtggtggtaaatgaaaagaccaacttatctaggcgcgagtttgaccgcctaaaagcgatcctgcacaattgcgtcaagcacggccccgccggccaaaacagggagaatcatacagatttcaagggacatctgcagggccgcgttgcccatgccatgcacatcgggcctgagagaggcgccaagctgaaggccatctttgacaaaattgtgtggtga

SEQ ID NO: 13180 - RNA, 1386 nt, synthetic construct
  source 1..1386: mol_type = other RNA
atgggctttttcgattggctgttccgtaggaaaaaagacgattattccaaagggctacagcggggataccagcgaccctcatctcatcctcaaccgttgccacctcagccggcgacaccacctcagagagctggaacccccccagaacccgcaggatggggatctccacctcccccaccaccgtggaagaatagaacccaccgcagctggatcaaccggcgatctaggactcctccagagccccagaggagtgagccgattccaaagggacggcctggtgaacttcgccacctgggcggtacagccaaacatcccgaccctcattttaagcccggcagagttcaagagctggggttaccagccataccccacctggatgctttggctacactgctcggaacaaccatttcgaaggtggccggctttgcagtgcgacctcccagcaccgctatgaattgggtgcattacttcctccaccctgtgcccaaaaagtccgggggcactagactcctcatggttccttgccccgagcttaagcggttgcagagacgactccatgaagtcctcgtgagaaagcttcctctacacgaggctgcccacggttttcgggctaggcgtgatagcctgtccaacgccaccgcgcatgctggcaaagcagtcgttatatgtatggatatcgcggattttttccctagcttcgactttagaagggtgtgtggctatctgaggtgggcagggtacggaagaggagtggccattgctttggctaatttgacgaccaactcccggaatgaatgcaagatgcgccgcaaacccgacgtccagaaaggggccggaacactgctgtcagcctggaaatgcgtcccgaagcaccccgacttactcgcaggctcactgccagaattaccccaggggagtcctaccagtccaggccttgcaaacgccatctgtaggcgcatggacaagcgcctcgcagcgttggccagaaagtttggcggtgcatatacccggtacgctgatgacctgactttctcagggggcgaagaaatgtcccgcagggccggtcgtcttatgcaactggcccgaaaagtaatcactagcgaagggctagcagttaatgagaaaaagacacgtgtgatgcggcgcggtcgccaccaaagagtaacgggcgtcgtggtgaatgagaagccaaacctgcctcgagccgagttcgacaggctgaaagcgatcctgactaattgtatccggcatggacccgcctctcagaacagggagcagcacgccgacttcagagcccacctccacgggtgcgtagcttatgccgcacatattgctccagccagggggggcaagctggtgaagctgttcaacgagattcggtggtga

SEQ ID NO: 13181 - RNA, 1092 nt, synthetic construct
  source 1..1092: mol_type = other RNA
atgggcctgggaaacttcttcagaaaactgttcggggggggagatgactatcagcgacggcccgggggtggtgattatcgcaagccatcagttggcgcaacgcacgcttcacctgccgcccatggtggaccacctccaccacctcctgccgcatcgcgtgtacatgccggcgatccggcttacagaagtcctcaatccggccaggccataaacgacagggaaatcactgatgccctgaagcacccctaccgaaggaaaaggcgcagcaagcaccccctgcaggggcatattcacgaaactggcagcagcaactggttttctccagatagaactaccaaccctgtgagacttaatgccctgggcctaccagtgctgtctactcctgtcgagctggttcccctgctcggcgaagagctcaaaaggctttatgattttgcttacgcaaatgatagggattccgaggacagccactacgcgtatcgacttgtgccaaagaaacgcggggggtggcggtttatagaagcccccaagccccgccttaaggctgttcagaagcgcattaaggagattttcgttgacaagctgcccgtctctaatcatgctcacggctttctccggaagagggatatggtgtctaatgcaaccccccacgtgggaaaagcctgcgtgatctgtgcggacatctccgacttcttccccacaatcggattcaaccgggtagccggctttttacgcagttgtggctacggtagaatggtggctgcagctctggctatgctcacgacaaatgcccattgggccagtgcggacgtgttgattggtgatgaggtcgtgaaaaacaaagacgcaaggaagcgggcccctgaggtattcaaatataccggggcgtacagacgtaccccacaaggagcaccgacatccccgggattggcaaacgccatctgctggcgtatggacaagcggctcgccggcttggccaagaaatttaatgccgtgtatacccgatacgcagacgacctgacattttcagggggggtcgaactagctggaagagcaggcgctttcttaaggtacgtggctcggatcgtctga

SEQ ID NO: 13182 - RNA, 1146 nt, synthetic construct
  source 1..1146: mol_type = other RNA
atgggattcttcagctggctgagggggatgctctttccacctgccacacccttaccgcctggaatgacgagagccgaagcacgtaggcgacgccaacccgattttttaccaaggccacgccgacgaagaccaagaaggcaccgttacggcagaccagaggccactttcagaccagctgaactggctcggtttgacctccccgcgcttgctactgtggaagatcttgcagcagcactgggtgtcacaacgggcaagcttcgatggctgacatggccctgccgcgatcggacctgtgaccattatgtgcggcgtcgggtgcccaaaaagagtgggggtgagcggttgctctgtgcacctaaagcagaaacccgcagggctcaggactggatctttcacgaaatcttggcccgtgtcccggtatcatcagccgcgcatggctttatccggggtcggtctatagtgtcaaacgcctccgcacatgtcggaaaacgggtggtggtgtccatggatctagaagattttttcccctccgtcagtatggccaccgtcgttggcctcttcgagtggctcggatacagcaaggaggttgcctggcacctctctatgctgtgtacctgcgcctatgggagacgcagagccttacctcaaggttcgcccactagtcccgctatttctaacctgatatgctggaaaatggaccggcgcctggctgggctggctagaaaattcggcgccacttatactcgatacggggacgacctgacctttagcggacacttccagcgccctgacaggcctggtaggctgatcggaattgcccgagcgattattagcgaggagggcttcgaggttgcccgccacaagaccagaatcatgaggcacaacaggcggcagtctgttacaggcttggtagtaaatgagaggaccggaatcggccgcgatgaagttagaaggctgcgcgccatcttgcacaattgcaaggtgcatggggtggagagccagaatagagagggcgacgagctattcaaggagcggcttagggggaagattgccctggtgaaaatggcgaaccctgaccagggagctaagctgctcgctgcatttcatgaagtggattggggcgcaacagcttccccaaaggggtga

SEQ ID NO: 13183 - RNA, 1152 nt, synthetic construct
  source 1..1152: mol_type = other RNA
atgtcttggatgtactttctgctggctggggctgccgtgctgctactcttggcactctccattccgcgagccgagcaacctgccgttgcagagcccaaatccagaagggggccacgcagaccccttccaggatcacgctggaggacccagcaccctggcgattctgaccgtttacgatctctcgggttgcctgaattaagagatacaagagatctgctgcggtggctgagactgtccttgcgggagctggtgccacttgctgaccacgccaatcgtgccacgagagacagaaacaactatatagagtggaccgtgcctaaaagacgcggtggcaagcgcgtgatcgcagctccaaagaagcgcttaaaggctatacagaccagaattcttcgcgagattctggacagggtccctcctagcgcagccgctcatggctttgttcgggggaggaacatcgtgagcaatgccgcccctcatgtgggtagggccatcgtggtaaacttcgacctcgtggatttcttcgaacacgtccattttccccgagtaatgggcgtgttccgccgcctgggctatagcaaagaagtggctcgctggttggcctacctgtgtacacataggccccttctagttgcgggagatggacacgggccactagcggctgcaaggcatgctgtccagggtgcccccactagtccagcggttagcaacctggccgtacataggcttgatgccagactcgcaggcctggctaggcgttttggctgcacttacacaaggtatgccgatgacttgactttctcaggcgacgaaccgtttaagagatctctcaagcgtttcgtccccctggttaggcgcatcgtatccagcgaacggttccgacttcacgaaggaaaaatgcggttcctgcgggcaggaaggcggcaagaagtgaccggggtcgtggtcaatagaaagatcaacgcacgacgcgaggagtatgaccggttgaaagcgattatccacaatgctcgtaggtccggaagtctggagtcgcagaatcgggagggtcggccccactttagggcctacctcctcggacgggccagtcacatcgcaatgctgtcaccggagcgaggccagcgactcatgagagaaattcggcggctgacatga

SEQ ID NO: 13184 - RNA, 1131 nt, synthetic construct
  source 1..1131: mol_type = other RNA
atgacagtgctggtcagcattggcctggcggcaatcgtcatcgcctttaccgccttgataatggctttaagtgcacttgatcggtctggggcccctcggtcacgtcctttgccaggagcccgggtgttcccacaagctggcggaaacatcgcgaagctaagagatcttaatctacccgagctcgactcgacacacgacttgctgcgttggctcaggcttgaactggtgcagctgcttcccctggcaaatcatgctaaccggactgagagatcaaattacgtggagtgggccgtgccgaaaaaatctggcggtcttagggtcatcgccgcccccaaaaagcggctgaaggctatccagctgcgcattctgagagaaatcctcgataatgtgccacctagctcagccgcccacgggtttgttaggggtcgcgacgtgctttccaacgccactcctcacgtgggcaaaacactggtggtgaatttcgatctcgtagacttcttcggacacattgcgtacccccgggtagtcggcgtcttcaggcgaattgggtacgggaaagaggtaagtcgctggctagcctgtctctgcacccatcaacctaagccccccagaggtcggggccatgatagagagggaaggcgccggcacgctgttcaaggagcgccatctagcccagccattgctaatttggcagcctggcgcctggacgcacgtttatgcgggttggctaggcgctttcagtgtacctatactagatatgccgatgacctgacgttttccggcgacgagcccttcaagaggtccctgagacgttttctgcctctcgttcgaaggatagttgctgcagagcggtttgccctgcatcgcagaaagatgcgattcgcaagagctagcagacgccaggaagtgacaggagtggtcgtcaaccgaaaaaccaacatccgccgggctgattttgacagactcaaggcaatactgcacaacgcaaggcgagccgggtccctggagagtcagaacagagaacagaggccacacttcagggcctatctgctcggcctggcagctcacgttgcgcatttaaatccgcagcgcggtgaaaggttgcggcgagaaattctcgctttagagtga

SEQ ID NO: 13185 - RNA, 1251 nt, synthetic construct
  source 1..1251: mol_type = other RNA
atgctcgcgttggctcctacgacctgggcctgctacgggattcctctcggcgtattcctctcggtcgccattttcctccggtatgcctatcgacgggctgggagcgagtccgagaaatgggacagcctcggtggccgtagatggaggtgcgaaagaaagggggatggagttggtgagctcagggaacgggtcacgcgcgagagagtgtggctgccaggatcaaagaggttaccccaaaaaccctccaacgcccagaaactaggagacttgggcataccagtgctgaaggataccgcagacatcctcaggtggcttggcgtcgacctgaagagcctgctgcctctggccaatccggaacgaagggttagacctgggaaatctaactacgtggagtggaccgtcaaaaagaggagagcaggccttcgggtcatctgctcaccgaaaccaaggctgaaggccatccagaggaaaatcaaggctgagattcttgaccgagctccagtgcacatggcagcgcacggattcgtgagaactcggtctattgctaccaatgcagccggacatgtgggaagaaagcttgtggttaacctggacctgcgcaatttctttgagcatatacgcatccaacaggtttacggcgtatttcgtcacctgggatatggttcagaagtctctcgttggctggcacgcttgtgtacacacgcaccacagttgggcgaagcgagtcgcgggctagacggacagtgggagatgcagaggatacgtagacatgccgttcaaggcgctcccacatcccccgctttagccaacctggcttgtctgcgcctggatcgtaggctcactggcctggccaagaaatttgatgccgaatataccagatacgccgatgatttgacattctccggtgacgagagatttaagcgcgggatgaagcggttcctcgatcacctgcacatgattatccggctggaaggttttagtgagaactacgtgaaacgacgctttatgagaagtggccagagacaacaggtgacaggggtggtcgtaaaccagcgggtaaatgtggcacgggacgagtacgatcgacttaaagctatcattcataatgccaggaagactgggctagacgcccagaaccgggatcaccggcctgacttccgcgcgtatcttttaggcagggccgcacatgtggcacagctgaatcccgaacgcggtcggaagttggtggaggctatccgagccgtgagctga

SEQ ID NO: 13186 - RNA, 1248 nt, synthetic construct
  source 1..1248: mol_type = other RNA
atgtcttactgggcatgggggatacttgttgtggttgccatagtcgttatttttattgcacgggtcactcagaggaagctacctagcggtttttggcggcccggatacagttgcggatttgccccgggcgcttggaaacgatgtgacaaacgagagggagccgacgcgggcttcccaagagctaaagatgctgagagactgaagcctctgcccggttttaaaaaacatcgacaggcaccagccgaccgtggcagattagtggctagcgggcttcccgtgctggagtccactgacgatgtgctggcctggctcggcctggacttacgcagcttcctcgcgctggctgatccaggggatcgaatccgtcctggcaaaacgaattacgtcgagtggacagtgccgaagaaaaggcatggggtaagaatcatctgttcgcccaagccaagattgaaggccgtgcagcaccgaatcaaagacgaaatactcgaccacattgtgccgcacgaagccgcacacgggttcgtgatcggccggtctattgtgaccaacgcagagcaacacgttggccgggccctcatcgtgaacctggacctgcgcaatttcttcgactatgttaggtatcaccgagtaatcggcgtgtttaggtggctaggatactctcttcaggccagtagatccttggctctgctatgcactcaccggcctaacctctccgctctccacgaggacccccctgaagcctatgtccggcatgtcttccgccatgcggtccaaggggcaccaacctcacccgcactggctaacctcacagtataccggctggataggagggtagctggcctcgcaagaaccttcgatgcgcggtatacacgctatgccgacgatttaacatttagcggagatgagcctttcaagcgtgggatgatcaggttcttgtcactggccaagcaaattattgccgaagagggctttaggcttaatatgcgcaagatgcgcttcatgaggccaagtcagcgccagcaggtgaccggagtgatagtgaataagaaggttaatgtccggagagaggattacgaccagctgaaggccatcgtgcataacgcccgcaaaattggttcattggaatcccaaaaccgtgaaaatcaccccgattttcgggctcacctgcttggaagggccgctcatatcagacagttgaacgcggcaagaggtcagtctctgatcgatcgcattcatgccattgcatga

SEQ ID NO: 13187 - RNA, 1323 nt, synthetic construct
  source 1..1323: mol_type = other RNA
atgatgcccgccttgcagattggggccgtggccataatcggactgctggtcgcagtgtttgctattgttgtagtgctgattattgttgtcaatatcgtgaaccaggcaaggagaggaggaccaggtggcgcacggttagaattgggcaccgatggtcttagagttagcgtggggggaaggtcacgagggaaaatcctgggctctagagcacccatcgtcctcggcaattcccctacatcctcatatcgagagagagacgacaaaatgcggcagctgcaccctcaatctatagacaggcagcggtccctgagactcccggttctggagaaacccgacgacattgtcgccttcttacagctgagggatttccgcgagcttgtgcacctgtgcgacactggcaggatgcagggcctacgcaacggaccaggcaagctgcggaactacaccatgcgcacgattcccaagcgtggcgggggacagaggtttctctttatccctaagccccggttgaaggcagcgcaacgcagaatcttgcacgaaatcctggataaggttccggtgcatgaagccgccaaaggatttgtgaggggtagggacgccaccgatcatgctcgccctcacattggcaaaccgataattgtggctcatgatattgccgacttttttccgagcatccgatatcgaagggtgtgttcttttttcatgtggttagggtacccccactcagtggcccggattctgtccctgctttgtactaccgcctctcttgcgagtctcgcacgcgtccttccacaaggggctcccacttcccccgccctagcaaatgctctttgctatcgtctcgactgtcggttggctgggctggccaagaaattcggagctacatacacacggtacgcggatgacctggcatttagcggtggagaggatttcaagagaggtctgaatcgcttcgtgccattggtagagacaatactcaaaagcgaacgtttccatcctaagaaagccaaacgcaggttcatgcgccggggaagacagcagaacctcgtcggcttaaacgtgaacgacagactctcagtcggccgggctgaaatcgatagactgtgcgccatcctgcataacgctagtaaggccgggtcgctcgagagtcagaatcgagatagaatccagaatttcgctgaccacctggggggccgtatcgcttgggtagagaggttccaccccggcaagggggccaagctacgaagccagtggcggcaactgatcggtgcaccaccagcccctccacctcctgatctcccagcagcgcctcccccagagtga

SEQ ID NO: 13188 - RNA, 1311 nt, synthetic construct
  source 1..1311: mol_type = other RNA
atgctgctactcgtggggatcttggtgctcgccgtggttgccgcgattctgattgccgccgccgccgttaaatctgggggtagccctcagacgcctcatccagctcaggctggaggacgggcaccaggtgcagtaccggaggcttccggaaatagattcgcagcaccacccggcgccaacttcacagggcctttcgacaagaagaagtggcttatcaaccctgactggagagaggctgacccaaaggcagcttcccgctatccacgggccgaggatcgtcggaggcaatggtctttgcctattctggacaatccagaggacgtggtgcgatttctagatttggggggcttcggcgtgcttgtcaatctttgtgatcccaatctgtggtcgtcagccgctggccattcagttcccaacccggccgccaactacaggtttagaagcattccaaagaggggaggtggggtgcgtttcatcgccgctcctaaaccgcgcctgaaagccgctcagcgccggatattgagagagatcctggataaggtgcccgtacacgatgcagccactgccttcagacccaggcggtcagttgcggatcacgctaggccgcacgttggccgacagctgattctggcttacgacttacaggactttttcccccgcatcagacacggaagggtcgctggactgtttaggtggttggggtaccccgcttccgtcgcaaggtgcctcgcactgctctgcacatgcagcgattccatggccgtctctacccaagcccgccatctcccacaaggtgcgcctaccagtcccgcaattgcgaacctgttatgtttccgcctggattgtcgtcttactggcctcgccaagaagttcggcgcgtcatataccagatatgcagatgacctggcatttagcggagacaatgagttcaaaaggggaatcactcggtttatacctctcgcagaaaaaattatccggaacgagggcttcgtcctcaacaagcagaagcgtcggtttatgcgccatgggagatgccagcggctgacagggctgaaggtgaatgacagcctcagtgtgggcagagaagaaagcgatctagtgaaagccatcctgcataacgctaaaaaggcgggctctcttgaaagtcagaataggcagcagcgaggcgactttgaggcacaccttcgaggcagaatctcctggatcagtcagtttcaccccgcccgaggagccaaactgttggctgaattagacaaagtaaccgggtttcaacgccgcgctggtccacctgccataacacctcccgattga

SEQ ID NO: 13189 - RNA, 1530 nt, synthetic construct
  source 1..1530: mol_type = other RNA
atgagcgaaaagctctctagacagcaaatttacgaccggattagagccacgtccaaggatagctatgtcttggaggaaatgcagaggctaggattctgggaatcgagtgatacgcctagtctgtcagaggtgctgataaagagggaagtcgcagctaatcaggagctgaataatttgcttgcacaggataggaagtatcagaatcaggaagccatgctcaaggagatgaggaaggcgcgtatgaagttagccaaggagaagagagaacaaaccaagcagaaaaataagcagaaaaaagacgacaaagcagaggcgtggaaggacactcagcagcagcagatcgtgtacctgggggagggtgtgtcaggcggcttgaatgagatcgaatccgccatagagtctttacagcgctttaacttgccagtatttgaaaacctgagtgatttcgccagcgctctgggaacagacctgtccgcgctccggtacctgttataccagcgtaaggtgagccggatcaaccactaccacgcattccaaatcccaaaaaaaagcggcggtaaacggaccatcactgctccgaaacaaaagctcaagaggctccagctgtgggtgttggagaatgtactgaaccgaattcagattaatcaccacgtccacgggttcattaaggaaagatctattgtctcaaacgcccgacctcacctccaaaaagatattgtcatcaatgtggacctgaaagattttttccccagcatttcatacaaacgcgtgaagggcttttttcataagctaggttatagtgagcagctctccacaattttcgctctgatttgcacctacgccgaaaccgagaaagttgagatggatggtgtgaactattatgttcagaagggaaaccgctttctacctcagggaagccccgcttcacccgctatctctaaccttatcgcctacaagcttgacaagaagatccaggggcttgctgcaaaattcaattttacctatacacggtatgcagacgatctcacattcagtacatccaaagagaatgagaaaaacatcgcctctctgctgtttttcctgaaaaagatcatagaggtggagggatttgctattcatccagccaagacccacatcatgagaaaagggaatctccagaaagttaccggcatcgtggtaaaccaaaagctgaatgtgcagcgagtccagctgcgcaaatttcgcgccctgttacatcagatagagaaagagggctggaaagatcaaaagtggggcaacgcgaaatatctcatcaacgcaatagagggatacatcaacttcgttaagatggtgaacgaatccaaggccatggtattcaaggcacaacttacttccattttggccaaacatgggcatcctccagtcgagcaagccgttgttgaagaagaatctaagataatcgctgaagaaaaggccacagaggtgaagattgaaactcccctgaaaactgacaccgaggctaaacagtacgactggtggaacgtgctttga

SEQ ID NO: 13190 - RNA, 1530 nt, synthetic construct
  source 1..1530: mol_type = other RNA
atgtcagagaagcttagtagacagcagatctacgataggattcgtgccacctcaaaagagtcttacatcttggaagaaatgcagagactggggttttgggaaagtagcgacacccccgggctccctgaagtgctaatccatagggagcttgtggcgaaccaggaattaaacaacctacttgcacaagaccgcaaataccagaatcaggaggctatgctaaaggagatgcggaaggcccggatgaaactggcgaaggagaagcgggagaagacacgccagaagaacaaacagaagaaggaggatcaagcagccaattgggcaaatatacagcagcagcagatcatctatttaggcgacggggttagtggcggactcaatcagaccgagagtgacgtggaaactcttcagaagttcaacttgcctgtttttaaccagatagttgacttcgcttctgccatcggagtcgatctctccacactgcgatatctcctgtaccaacgcaaagtttcaagaataaaccattaccacacattcgagatcccaaagaagaccggcggtaaacggttgatatctgcccctaaatctcgactgaaggccctgcaactgtgggtactcgagaatatcctgaaccacatagaaattaacgaccacgttcacggattcattaaggagaggagcattattagcaacgctcagccacatctggagaaggatatcgtgatcaacgtggatctgaaagacttttttccaagtatctcctacaagagggtaaagggacttttcaataagctcggctacagcgaacaattagcaacagtgtttggtctgatttgcacatatgccgagactgagcacgtcgagatggatggggtgagctattacgtacagaaaggcaatcgagtactccctcaggggtcacccgcttcacctgctatttccaatcttatagcctttaagctggataagaagattaaaggactggcttccaaattcaatttcatttatacccggtatgcagacgatttgtctttttccacgtcgaaagaaaatgaaaagaatatcgcatccctgttgttctttctgaagaagatcatcgaagcggagggtttcactatgcaccccgagaaaactcatattatgcgcaaaggaaacttgcaaaaggtcactggcattgtggtgaatgaaaaactgaacgtgcaacgtgacaggctgagaaagttcagagctttactgcataatatcgagagcaacgggtggaaagaccaaaaatggggcaacgccaagaatctgatcaacgcagtggaaggctacattaatttcgtgaaaatggtcaacaagtctaaagctgccgcctttaaagcgcagctcgagaacatcgtcgctaagcacggttacccagtgatcgtggaagaagtcgtggaggtcaaaacggaaaccatcgtggccgaaattgttccggaggtcaaactcgagaaccccataaagcccagctccgatgccaaacagtatgactggtggaatattctctga

SEQ ID NO: 13191 - RNA, 1527 nt, synthetic construct
  source 1..1527: mol_type = other RNA
atggaggagaagctgagccggcaacaaatttacgatcggatacggagtacgtctaaagagtcttacatcctcgaggagatgcagcgcttagggttctgggaatcgagtgaaaccccatcattatccgaactgctcataaagcaggaaaccacggccacccaggagttgacaaagctgttggagcaggacaaaaagtacaacgatagggaggccatggttaaagaaatgcgcaaagctagaatgaaactagccaaggagaagcgttctgaaaccaagaataggaataaggagaagtcaattgacaaagcacagaagtggaaggagactcaggaacgacagatcatttacctgggcgagggcgtcagcgcgggtcttaatcacactgagtccgacaaattgaatctgcagaaactcaacttacccgccttcgatcaggtgacggacctggcctcagccatagggctgagcctcgcggaacttcgctatctgctgtaccaaagaaaggtgagcaagatcaaccactatcataccttcgaaatccctaaaaaaagcgggggaaaacgggtaatatccgctcctaaatcgcgcctgaaggcacttcaattgtgggttttagaacacgtgctgaacaatatatccatcaatgacgtggctcacggcttcatcaaaaaccgttctatcgtcacaaatgcaaccccacatctggccactgacattgtgatcaatgttgacctgaaggactttttcccgactattaactacaagagggtcaagggtttgtttcataagtttggctatagcgagcaactcgctaccctgtttgccctcatttgcacatacgccgagacagaggtagtcgagatggatggagtgtcttactacgtgcaaaagggcaacagattccttccccagggatcccctgcaagtccggcaatttccaatctcattgcatatagactcgataagaaaattcagggactggcgtccaagtttaacttcacttatacaaggtatgccgatgatcttagcttttccaccagcaacgaaaacgagaagaacatcgcgtcactcctgttctttgtcaaaaagctgattgaggcagagggctttaccctacaccccgagaaaacacatatcatgcgaaaaggtgccttgcagaaagttaccgggattgtagtgaacgaaaaactgaacatccaaagaagtcagctgcagaagttcagggcccttctacacaatattgaaactaatggctggaagaaccagaagtgggggaaggcaaaaaacctgatcaatgctatcgagggatacatcaatttcatctcaatggtgaatgctgaaaaaggagccaaatttaagttgcagcttaaggatatcgtggccaaatttggttatccaatcgtggaacaggagacagctgaggtcaaaattgaaaccgctaagcaggaaatagttgagcctcccaagagtaagctcgagactccagaaacagcttctaaacagttcgactggtggaacatcctgtga

SEQ ID NO: 13192 - RNA, 1563 nt, synthetic construct
  source 1..1563: mol_type = other RNA
atgtcagagaagtctacacgtcaacagatctacgatcgcattaggatgacctcgaaggattcctacattctggaggaaatgaagagactggggttctgggattcttcagacgtgccctccctgagcgaaaccttaattaaacgggagtcagaggtgaataaagagctcacgagtctgttagagaaggatagaaagtatcgcaatcaagaggctcttctgcgggagatgaggaaagaacgcatgaagaaagctaaggagaaacgcgaagagacaaaactacgcaacaaaaaaaaacgactggacaaagccgctaagtggaaatctatgcaggaacatcaagtaatctacttagggaaggacgtgagcgcgggactgaataacaccgagactaatgaggcattgctaaacaagaataacctgcccgtgttcaagtctctaactgatctcggccagtccatgcagctcgaattgtcaaatctgcgatatcttctctttcagcgtaaggttagtcggcagactcactattataacttcgagatccctaagaagtccggtggcaaacggaaaatcagcgcacccaagaggaggatgaaagccctccagctgtgggtgcttaataacatactggacagaatagctattggtgaacaggcccacgggtttattaagcagaggtccattgtaaccaatgctggacctcacactgggaaagacatcgtcattaatatcgaccttaaagactttttcccctccattgattataaaagggtgaagggcctgtttcataagctcggctatagcgaacagatggcgaccatattcgccttaatctgtacacaagcagaaaccgagacggtggctatggatggagtgacctactacgttcagaagggtaagaggattcttcctcaggggagcccagccagtcccgcaatttctaacctgatagcctataagcttgacaagaaggtcaagggcctcgccgacaagctgggctttcgctacactcggtacgccgacgatttgtcttttagtaccgataaggggaatgaaaaaaacatagcgagtctcctccatttcgttggaaaaattatcaagtcagagggtctgaccatcaatcctgagaaaacacacatcatgcggtccggcgcacagcagaaagtgacagggatagtcgtaaatgagaaattgaacgtcgagagaaagcagttgcacaacttcagagccctgctgcataacatcgaaactaacggatggaatggccagaaatggggaagagccgataacgttatgcactctatcgaaggctacattcatttcattaagatggttaacccagagaaaagcatcagatttggtgagcagcttacgcgaatcgtcgaaaaacacggcttgcccctggtcgaagagaagacatgcacaaaacaagacatcgctccgaagcaggtggtgcaagtggaggaacctctgaagccagaaccaactatccagccgggacagaagcaagaggatagcaacaagaagacctccagcacagacgactggtggaatatcttctcgtga

SEQ ID NO: 13193 - RNA, 1539 nt, synthetic construct
  source 1..1539: mol_type = other RNA
atgtctgagaggagcactcgacagcaaatttatgatcgaattcgggcggctttcaccaaagatagttacattttagaggagatgaagcgcttggggttttgggactcgaatgttgacgcccccacactgcctgagagactgatccagcgagaggccgagattaatcaggagctgaacaaattgctcgctcaggatcgtaagttcagaaaccaggaagcaatgttagccgagatgaggaaagcccgcatgaagcaggcacgggaaaagcgggtactgaccctggagaaaaacaagcagaagaggttagacagagcagccaggtggcggtccctgcaacaggaacagattatctatctgggaaagggggttagcgccgggctcaataatacggatactaatgtccagtctttgcagaagtacaatttgccagtattctccagcctcacagagctcgccaactctatgaacctcgacctggcgaagctgagatacctgatctttcaaagacaggtgagcagacatacacactaccacacattcgagattccaaagaaatcaggagggaagcgtaaaatcagcgcccctaagcgacaaatgaaagctctccagcgctggatactcgacaccattctgagtcccatatcaatggatgagcacgcacatggctttattaagaacaggtccatcctaaccaatgcccagcctcatacaggcaaagagatcgtcatcaacgttgacctgaaggattttttcccttcaatcgacttcaaacgcgtgaagggcctttttcacaaactaggctattctgagcagatggccatcatctttgcgctaatttgtacccaggctgagactgaaacagtggaaatggatggcgtaaggtattatgtgcaacgaggtaaacgcattctgcctcaaggctctccggcttctcccgcaataagtaacctcgtcgcttacaagttagataagaaggttaacggactggctgagaaactgggtttcacctacactcggtacgccgatgatttgagcttctcaacctttaggaggaacgaaaaaaacgtggcaagacttcttcactttcttgggaagatcatcgaatccgaggggctggtcatgcaccccgacaaaacgcaagtgatgcgcaacgggggtctgcagaaagttactggaatcgtcgtgaatgaaaagctcaatgtgcagcgggaacagttgcggaaatttagagccctgcttcataatatcgaggtgaatggttggaaggaccaacgctggggacatgctcacaatcttatacactccatcgagggatatatccagttcgtgaagatggtgaatccccgtaagggcgacaaatttcggaagcagctggatcagataataaaaaagcacggctgcccgccaattgacgaaaccacattctacaaaaagactgtcgaaacgagtcagccttcccaacccattactagccagaccattgaaccagaaaaacatgcaaccccaaagggcaacgactggtggaacatcttctcctga

SEQ ID NO: 13194 - RNA, 1521 nt, synthetic construct
  source 1..1521: mol_type = other RNA
atgtcagagaaactgactaaacagcagatctatgatcggatccgagctacgtccaaagatagttacattctggaagagatgcaacgccttggattttgggagaaagcagactctccccagataccggagattttcatagagaacgaaactagactgctccaagagttgaatcagctactggataagaacaagcagtactctgaccaactctccatgctcaagagtatgagaaaagtgcgtatgaaaaacgccaaggagaaaagagaggttaccaggcagaataacaagctcaaagcgctcgaaaaagcagagcggtggttgaagctgcagcaggaacaggtgttatttctcggcaaggaagtcagcaaaggattaaataataccgagcccaatgttaactcgctgaagaagtttaacttgccagtgttccactccgttgtggagttcgctggctatatggagacagatctcccgtcgctgcggtatcttttgtatcaacggaaggtgtcaactattaaccactaccatacctttgaacttcctaaaaaatccgggggcaagcgaaagataagcgcccctaagtcaaggattaaagccctgcaactgcaggtactggacaaaatcctgaagaatatcccagtcaacgattacgtacacgggttcattcagggaaaatctatcgtctccaatgcccagccacatgtgaataaagacatcgttatcaacatggacctcaaggacttttttccttctattgagtacaaacgtgtcaaaggtctgttctataagcttggctattccgaacagattagtacgatgcttgcactggtgtgcacccagtccgacacctacgaggtgaatatggatggtgtaacctaccacgtgcaaaagggagcaaggttcttacctcagggctctcccgcttcacccgccatcagcaacctgatcgcatacaaactggacaagcgcattaagggcctagccgaacgcctgaacttcacctacactcgatatgccgatgatttgagctttagcacaacaaacgagaaccagaagaatatccgccagttattgtttttcgtcaatcagatcgttgtggaggaggggttcaaggtgcacccagaaaagactcatatcatgaggaaagggaacctgcagatggtgacggggatcgtggtaaatagaaagctcaatatcgagcgcaagaaactgagaaattttagggctctgctgcataaccttaatctcaatggatggaaggaccagaagtggggaaacgccgtgcatctaatacacgccgttgaaggttatattcggttcgtcaaaatggtcaaccctgaaaaaggtaaggaattcgcggagaaacttgctactattattaagaagcaaggctacccagaaatcagctgtcaaaaatacaacagcaacgatacaaccgaaaagacaacagctagtattaccaagcccgagacaaaccagaaggaggaaaatgactctcaggattggtgggacatattttga

SEQ ID NO: 13195 - RNA, 1515 nt, synthetic construct
  source 1..1515: mol_type = other RNA
atgtcagagaagttatctaagcagcagatctacgatcgtataaaagcaactagcaaggattcatacatccttgaggaaatgcagcggctggggttttggcagtcgggtggtcagccaacactgtcagaaatcctaatcaaacaggaagccgctattgagaaagaactgaatgagctactggcccaggatcgcaaattttctaatagggaggcaatggtgctggaaatgcggaaggcaagaatgaaggctgccaaggaaaagagggtagagactaagctgaagagagagcagaagcgactcgataaggctgagaactggaagctgcttcaggagaaacagattctttatcttggtgaagaggtgtccaagggactgcactacaaagaggccgccgtcaatctcctcgaaaaatataaccttcctgtgttcgaagacgcactcgcgttggcaaaatctatgaatatcgacctgaaagccttacagtacttggcttacaatcgtaaggtcagtaagataaaccattatcacacgttcgaattggagaaaaagtctggaggcaagagaaagatcagcgcccctaaacccaaactgaaagaaatccagacctggattcttgagaatatcctgcatcagattccgtacactattgaggctcatggctttgtcaaagagcgcagcatcgtgaccaacgcccaacctcacgtgaataaggatatagtcgtgaacgttgatctgaaagatttcttccccactattacatacaaacgggtgaagggtctgttctgcaaattgggctacagtgaagaggtggctacgatcctctccctcctttgcacttatagcgagattaacgaaacgactctggacggggtcacctattatgttcaatctggcgagcggaagctcccacaagggtcccctgctagtcccgcaataagtaatctcattgtgtataagctggacaagaagattaacggcttagcgcagaaattgaattgtagctatacaaggtacgccgacgacatgtcatttagcaccacccaagagaactcctccaacataagcaagctcctgtacttcaccaagaagattattgcttctgaaggcttcattgtgcacccggagaagatccacgttatgaggaagggcatgcaacagaaagtaacagggatcgtggttaacaacaaattgaatatagaccgaaaccagctaagaaaatttcgcgccttgttacacaatatcgaaaagaatggatggaaagaccagaagtgggggaaggccgtgcatgtcattaatgcaatcgagggatatatcaattacgtaaacatggtcaaccccgaaaaggggaccctgtttaaggagaacctgaagaacatcatcaaactgcatggactccctcacattgagaaaatcattatcccagagaaagtaacacccatcgcggtgtcgctgccagaagaaaaagaagagacaaccgttaaacagcaatccgagaactggtggaatatattctga

SEQ ID NO: 13196 - RNA, 1515 nt, synthetic construct
  source 1..1515: mol_type = other RNA
atgtccgagcagcttagtaaacagcaaatttacgataggatccgggctacatcgaaggattcttatatcctggaagaaatgcagaggctaggattctggcagtcaggagccgagcctacgctatctgagattttgatcaagcaggaagcgaagatcgaaaaggaattgaatgacctgctcgcgcaggatcgaaaatactccaacagagagagtatgattttggagatgcggaaggctcgaatgaaggctgcaaaagaaaaaagagccgagactaagctgaacaatgaaaagaagagacgtgagaaagccgaaaactggcagctgcttcaacagcaacaaatcctgtacctgggtgaggaggtcagcaaaggtttgtattataaggagtcaaacctcacgttgttagagaaatacaaactgcccttctacaaggacgctctggccctggccaagtcaatgcaaatagatttaaaagccctgcagtaccttgcctacaatcggaaagtgtctaaaatcaatcactatcacacctttgagttagaaaagaaaagcggaggtaagagaaagatcagtgcacccaaaccaaagctcaaagaaatccagaattggatcctcgagaatatactgcaaaaaattccgtacactaccgaagcccatggtttcatcaaagagcggtctatcgttactaatgcacagcctcatatcaacaaggacatagtggtgaatatagatctcaaggatttttttcccacagtcacctataagcgggtaaaagggctgttccataaaatgggctacagcgaggaagtggcggtgattctgggcctactctgcactcatagcgaaattaatgagactatcctggacggcgttacatattacgtgcagtccggagagaggaagctcccgcaaggcagtcctgctagccctgctatttctaatctgatcgtctacaagatggataagaagatcaacggactggcaaaaaagctcaacttcaactatacccgttatgctgacgacatgtcattcagcacaacacaggagaactccaagaacgtgtcccgccttctttacttcaccaagaagatcattgaaaccgaggggttcgttattcacccagacaaaattcacgtgatgaggaaagggatccagcagaaagtaacaggaatcgtggtgaacaagaagcccaatatagaccgcaaccagcttagaaaatttagggccctgctccacaatattgaaaaaaacggctggaaagaccagaagtggggcaaagccatacacgttattaacgcaattgaggggtatatcaattatgtacgcatggtcaaccccgagaaggggatcgtgtttcgccagaatttgaaggacattattaagcagcatggcctgccatacgttgagaagatatccatccccgagaaaatcacccctatcgtcattcctgtcccagatgaaaccaaggaaattccaattgagaagaaaccagaaaactggtgggatatattttga

SEQ ID NO: 13197 - RNA, 1518 nt, synthetic construct
  source 1..1518: mol_type = other RNA
atgagcgaacaactttctaagcagcagatctatgatcggattcgggccacctctaaggactcatacattctcgaagaaatgcaaagactgggcttttggcagagcgcaacagagcctactttgtcagagatcctcattaatcaggaagccaaaatcgaacaggaattgaacgagctactcgcaagggaccgaaagttctccaacagagaagccatggtcctggaaatgaggaaggcacgcatgaaagcggccaaagaaaagaggggggaaaccaaattaaatcaagaaaagaagcgtctggagaaggcagagaattggaagcagctacaagagaaacagattctgtatctaggtgagacggtgtccaaagggttgaatagcaaggagacagatagcaaaattctggaaaagtacaatctgcctgtatttgaggaccttttggcattggccaaatctatgcagcttgacttaaaagccttgcaatatctggcttacaaccggaaagttagtaaaattagccattatcacaccttcgaggttgagaaaaagtccggcggaaagcgcaagataagtgctccaaagagcaagctcaaagagattcaaacatggatcctggaaaacatcctccataagattccacataccatcgaggcccacggtttcataaaagagcgctctattgtcacaaacgcccagcctcacatcaataaggatattgtggtgaacattgacctcaaagattttttccccactgtgacctacaaaagagtgaaagggctgttccacaaaatcggctacagcgagcagatagctacggtgttatcgctgctttgcacttattctgagatgaacgaaacctccctggatggaattacatactatgtgcagtcaggagagcggaagctgccacagggatccccagctagtcccgctattagcaacatgatcgtttataagctcgacaagaagatcaatggtctggccaagaaactcaacttttcctacacccgttacgctgatgatatgacttttagtgcgaacgagaaaaattctaagaacgtatcaagactgctgtactacaccaagaagatcattgaatcagagggctttgtgatccatcccaacaaaatccacatcatgagaaaggggatgcagcagaaagtgacaggcgtcgtggtcaataagaagcttaatatagaccgcaatgagttaaggaagttcagggcgctgcttcataacatcgagaagaatggctggcaggaccagaagtgggggaaagcaatccgagtcataaatgctatcgagggttacattaactatgtctatatggtgaacccggagaaaggaactacgctgaaacaaaatctcaaaaacatcatcaccaagcacggccagcccactataaccaagctgtccattccggaacagactgtacctatcccagccagtgtgcccgaaaagaagaaagaaacaatagttcccgacgagaaacctgggaattggtggaacatcttctga

SEQ ID NO: 13198 - RNA, 1515 nt, synthetic construct
  source 1..1515: mol_type = other RNA
atgtctgagaaactgtcaaaacagcagatctacgatcggatcaaggctaccagcaaggattcgtacattctcgaagagatgcagaggttgggattctggcagtccggtgccgaaccgtcccttagcgaaatactgatccagcaggagactactatacagaaggaactgaacgccctgcttgcccaggacaaaaaatttcagaacaaagaggccatgctggtggaaatgcgaaaagctcggatgaaggcggcaaaggaacggagagtggagacattacaaaagcgggagcagttaaaaatcgaaaaggcgcagaaatggaagttgacacaggaaaaggagattatatacttgggcgatcaggtttctaagggcctcaatatccaagaaactaacgcggccctcctggacaactacaatctgccggtgttcgaagatgttctcgcactcgcacagagtatgcagattgatctgaaggctttacaatatctggcataccaccgctctgtttccaagatccatcactatcatacctttgaagtcagcaaaaagtcaggtggcaagcgtaaaatctctacgcctaaacctaaactgaaggagttgcaaaattggattctagagaatatcctccataaaataccacataccgacgaagcccacggcttcataaagaagagaagcattgtgacaaatgccaaaccccacctcgagaaggacattgtgattaatattgacctcaaggatttctttcccaccataacacataaacgcgtcaaaggtctttttcacaagatggggtacagtgagcagatagccacgatcctgagtctgctttgcacttactcagaggttgacgagatcgatctggacggagtaacatattatgtgcagtcgggcgagagaaagcttccccaaggagctcccacaagccccgccatcagtaacatgattgtgtacaagatggacaagaagatctccggactggctaaaaagctgaactttacttatacccgctatgcagatgatatgacattcagcacctcaaacgagaatgctctgaacgtctccaggctcttgtacttcatcaagaagatcattacgtccgaagggtttatcatacatccagacaagatccacatcatgaggaatggcatgcagaagaaagtcaccggggtagttgtcaataagaagcttaatgtagaccgactgcaactgagaaaattcagggccgtcttacacaacattaaccaaaacggatggaaggatcaacagtggggcaaagctatccacctgatcaacgcagtggaagggtacatcaattatgtggcaatggtgaatcccgagaaaggggcccagttcaagaaaagcctagtcgctatcatttctaagcacggtaaacctgagattgaaaaacctactccaattgagaaggagaaattgatcgtgcctcctgtgctagaggagccaaaaaccattgtggaagaccagaaaccagggaactggtggaacattttttga

SEQ ID NO: 13199 - RNA, 1014 nt, synthetic construct
  source 1..1014: mol_type = other RNA
atgtccggcaacctaaccagacaacagatctacgaccgaatcagggctgccagcaaggattcctatatcctggaagagatgcagaggttgggcttctgggataattccgacgtccccaccctgtctgagacattaatcaggcgtgaggttgaagttaataaggaactcaatgaacttctggccaaggaccgaaaattcagaaatcaagaggctatgctttcggagatgagacgcgagcggatgaagaaggcaaaggagaagcgagagcagactaagcagaagaacaaacagatacggctcgataaagcagcccggtggaagaaagcacagctcgaacagattctatatcttgggaaaggcgtctctgagggactgaacaatacagactacgatgcagaactgttgcagaaatataacctcccagtatttgatagtgtgaaggcgctggccgagaacatgggagtggaattggcctctctcaggtacctgttgtatcagcgtagggtgagcaagaatactcattactacaccttcgagatacccaaaaaatccggtggtaaacgcaaaatctcagctcctaagcatcgcatgaaagaactgcagatgtgggttctgcaaaatgtgctggataatattcctcactgcgacaccagtcacggcttcataagagaaaagagcattctgacaaacgccgagccacacgtagggaaagacatcgtcattaacgtggacctgaaggatttttttccgaccatctcttataaacgggtgaagggactcttcagaaactttgggtactcagagcagacggcaatcatttttgctctcatatgtacacaagccgaaacagaaactgtcgagatggacggcgtgacttattacgtgcagaaaggggagcgcttccttccacaaggaagccccgcttcacctgcgattagtaacatcattgcctacaaactggacaagaaggtccagggcttagctaagaagttcggttttacgtatacccggtga

SEQ ID NO: 13200 - RNA, 1392 nt, synthetic construct
  source 1..1392: mol_type = other RNA
atgatcaaaaaggaggcgagcctcagccaggaactgaacactctggtggctaaagataggaaattttctaatcaggaggcgatgcttaaggagatgagaaaagcgagaatgaagctggccaaagaaaagcgcgaacagaccaagcaaaagaataagcagaaaaaacttgacaaggccacatcatggcagcaaacacagctggaaaacataatatacctgggtcccggcgtgagtgccggactgaacaacaccgttagtgactcaaccattctgcagcaattcggactcccagttttccctaacatccccagcttggccaacgccatgcaagtcgatctagccacactccggtatcttctgtatcaacggaaggtgtcaaggactaatcactatcacgtgttcgaggtgccaaaaaaatccggaggcaaacgacgcatctccgctcctaagaagcagcttaaaaagctccagctctgggtgctgaacaacgttctctgccatctgccaaatgaaacagtcgctcatgggtttatccgacaacgttctattgtcacgaatgcagcacctcacgttggaaaggacatcattgttaacgttgatttgaaggatttcttcccaaccataacttatgcacgggtgaagggcgtatttaaaaaactggggtattctgagcagcaggctattattttcgcacttatctgtactcaggcagaaacggaggaagttgagatggacggcgtgaagtactacgtgcagaatgggaaaaggtgcttgccgcaaggatctcccgcaagccctgctattagtaacataatcgcctacaagctagacaagaagatccaggggttagcagccaaattgaatttcgcctacaccagatatgctgatgacctcactttttccaccactaatgacaatgcgaaacagattaccaagctactctatctgatcaagaaaatcgtcacagccgagggtttcgaggtacacccaggtaagacacacatcatgagaaaggggggccagcagaaggtgactggcatagtggtcaataagcaattaaatgtggagaggagccagctgcgcaagtttcgggcactgttacacaacctccagatgaacggatggaaggaccagcagtggggcaacgctaaacatctggtcaatgccgtagaggggtacatcaactttgtcaatatggtaaatcccgtgaaggccaaactgtacaaaacccagttggaaaagattgtggccacacatggctaccccctggtggacaacacaatgcccaagcctactgtaaccaccgtggtggccgaggtcaaagaaacgcttattccgaccgtggctaaagagaaatccgctgataagacagattggtggtcggtcttttga

SEQ ID NO: 13201 - RNA, 1533 nt, synthetic construct
  source 1..1533: mol_type = other RNA
atgacgttgaaactgaccaggcagcaaatctacctgagaatcaagtccagctccaaagactcatacgtcctcgaagaaatgaaaaggcttggtttctgggacaaggagcagcctactttgcccgagaatctgatcaaaagggaaaccgagattaataaggagcttaccgagcttcagaagctggacaagaagttcaagaatcaggaggcgctcctcgccgagatgcgaaaggaccggatgaagaaagcaaaagagaaacggctgcagactaaggaggctaataagaaaaagaggctggaaaaggccgctaactggaaactgctgcaagaaaaccagatcatatacctcggaaaggacgtcagttacgggctcgataacacgaaaagcgacgtggagagtctaaccaaatacaagctcccaatctataagaacatactacatctggcacagagcatggaaatctctctatctgagatccggtatctcttgtaccatagaaaggtcagtaaaaagacccactatcatacttttagcatcccaaagaagtcaggtggaactcgaattatatctgcccctaaaagcaaactgaagcgactccagtattgggttttgcacaacatattagaagttattcccccaggcgagcatgcccacggctttatcgccgggaaatccattcaaactaacgccctgccccacgtcgggaaagatgtggttattaacatagacctgcagaattttttccccacgatcacatttaagcgcataaagggactgttctctaaacttggatacagcgagcagctggcaacaatcttcgcgcttatttgcactgaaacaccttgtgacaaagtgcagatggacggcgtagattactacgttcaaaactccgagcgcgtcttaccccagggatctccagcctcgcctgctatttctaacctgattgcttggcgcctggataagaaaatccaaggtttagcttccaagtacgactttacctataccagatatgccgatgatctcacattctcagccgcggcaaaggctgaaaaaaatatcgccgggctgctgtacttcctcgagaagattattagaagcgagggcttgactattaatccagaaaagacatccatcatgagaaaggggcgccagcagcgggtaacaggtatcgtggtgaatgaaaaattgaacattccccgtgataattatcggcgctttcgtgctcttttacataacatcgaggcaaacggctggaaggatcaacactggagccactccaaaaatctgccgctgtcggtgaaagggtatattagtttcgtgaagatgattaaccccgataagggcctaaaattcgaagagcagctgaccaggatcatctccaagcacggctttccggaaatggaggtgaaaaagaccatcagctcaatccaggaacaaaaccagagtattgaacttgagaagcctattcaggaggtgaaatcttcaaaggaagacaaacagacagaggataataattggtggaatatattgtga

SEQ ID NO: 13202 - RNA, 1515 nt, synthetic construct
  source 1..1515: mol_type = other RNA
atgtctcagaacctgtctaggcaacagatttacgaccggatcaaagagtcctctaaagacagttacattcttgaagagatgaagcgtctgggtttttggcaggagacatctacaccatccctcccagagcagctcattaaaagggaggccgtgctgcagcaagaactccaagagctgctggccaaggacagaaagtatggaaatcaggaggccatgctgcgcgaaatgaggaagcagaggatgcaggaggcgaaggctaaacgggaaatcacaaagcagaagtcagaaaagaaacagcaggagaaggctgactactggaagaatctacagcagcagcagattatctacttgggcgaaaacgtgtctaagggcctccacaagagtgattctgacacagccaaactgctgcaatttagtctgcctgtctttgagaatgtcttagattttagccagaagtcaggatttagcctaagcgtgatcaaatacctggccttccatagaaacgtgagcaaaaagtcccattatcatgtgtttgagatccccaagaaaagtgggggcaaaagaaaaattagtgctcccaagcctcaactgcggtacctgcagcactggatccttgagaacattttgaataagatcccagtcggcgagatggttcacggcttcgctatcgaaaaaagcattgtgaccaacgcagaaccccaccttaagaaagacattgtcataaacatcgatctccaggattttttcccaagcatctcctataagcgcgttaaggggttgttctcaaagctgggttacagcgaacagctgtccacaatatttgcattagtctgcacgcaggcccacaccgaggaagttctcctggacaatgtcaaatacttcgtacataaaggagaacgcttcttaccgcaagggtcacctgcgagcccggccatatcgaacatcatcacttataagcttgataaacgacttcagggactctcaaagaaatatggcttcacctatactagatacgccgacgacttgaccttttccgctgcccaagataatgagcacaacattaacacactactgtactttgtgaagcaggtgattaaccatgaagactttaccatccatcccgataaacttcacatcatgaaacggaagcaccagcagaaggtaaccggcatagttgtaaatgagaaactcaatgtcgagcgaaagaagttgaggaaattccgtgcattactgcataatatcgaggtgaatggatggcagaaccaaacttgggggaaagcattccacttgataaatgccatagaggggtatatcaatttcgtgaacatggtgaacccccctaaagcactggcgttcaaagaaaagctcaatacgataattgcaaagcacggtaagccagtggttgagatccgcaaaactgctcccgagatcgctgaaactattaaggtgtccgaagatcaagaggaaattattacccctgccgaagagaagaccgattggtggaacatcttctga

SEQ ID NO: 13203 - RNA, 1515 nt, synthetic construct
  source 1..1515: mol_type = other RNA
atgagtcagaacttgtctaggcagcaaatttacgaccgcatcaaagcgtccagcaaggactcatatattcttgaggaaatgaagcgactgggcttttggcaggaaacctctacccccagcctccccgagcagctgatacagaaagaggtcgtgctgcagaaggagctgcaggaactccttgcaaaggatcggaaatacgggaaccaggaggctatgctgagagaaatgaggaaaaaacgcatgcaagaggccaaagctaagcgagaggtaactaaacagaagaatgagcagaagcgcaaagacaaagctgatcactggaaaaagctgcagcaggaacagataatctacgtcggtgaagatgtgagtaaagggctgcattgcaccgattccgacgtcgaaaagttactggaattctcgttgcctgcctttgaaagcatcagtgatttctctcagaaatcaggattcggcctcccgcttatcaaatacctcgcatttcacagaaaagtgtctaataagacgcactaccacatctttgagataccaaagaagtctggaggaaaacggaggatcagtgctccaaaacctcaactccgatattttcagcagtggatcctggaaaatattctgaacaagatctcagttggcgaggtcgtgcatgggtttacagcgaaaaagtcaattgttacaaacgcagagctgcacttgggtaaggacatcattatcaacatagatctgcaggacttctttccctcgattagctatcgtagagtgaagggactgttctccaagtttggctactccgaacaattaagcactattttcgccttagtgtgtacacaagcccacaccgaggagattttactggatgacgtgaagtatttcgtccataagggcgagcggtttcttccccaaggatcccctgcctccccggcaatcagcaatataatcgcgtataagttggacaaacgtctaaaaggcctggcccagaagctagggtttacttataccagatatgctgacgatctcactttcagcgcaaaccaagacaaggagcagaatattaacaaactcctgtacttcgtgaaacaaatcattaacgacgagaacttcacaattcacccagataaactccatatcatgcggggaaggcatcagcaaaaggttaccggcattgtggtaaacgaaaagttgaatgtggagcgcaagaagctgaggaagttccgggcccttttgcacaatattgaggtgaatgggtggcagaatcagacatggggtaaggctttccatcttatcaatgccgtagaaggctacatcaactttgtgaacatggttaatcctgtgaaggctctcgtcttcagagaaaagctgaacacaatcatcgccaaacacgggaaacccatagtggaggtcaaggaagttgtgcaggaaattgtcgagacggtagcagttaccgagatacaggaggagatgctagccccaaaggaggaaaaaactgattggtggaatatcttttga

SEQ ID NO: 13204 - RNA, 1515 nt, synthetic construct
  source 1..1515: mol_type = other RNA
atgtctcagaacctgtcccgacaacaaatctacgaccgtattaaggctagctctaaggactcatacatattagaggaaatgaagcggctcggattctggcaggagacttccactccctccctgccagagcagcttattcagaaagaagtggttctgcaaaaagagctccaggagcttcttgcaaaggacaggaagtacggaaatcaagaggctatgctgagggagatgaggaaaaaacggatgcaggaagccaaggcgaagcgcgaagttacgcgccaaaagaacgagaaaaaaagacaggaaaaggccgatcactggaaagaattgcaacaggagcaaatcatctacttgggtgagaatgtctcgaaaggcttacaccagatgcagtctgacacagaaaagctggatcagttttcactaccggtgttcgagaatatactggatttctcacagaagtctgggttctcactcagtcaaatccggtacctggcgttcaatcgcaacgtcagtgagaagagccactatcacacatttgaggtttctaaaaagagcggaggcaaaagaaaaatcagtgcccccaagccaaaactcaaactgttccagcagtggatattggaaaacattctcaataggatttccgtgggggaggtggtccatggcttcacacctaacaaaagcatcgtcactaacgctgcccctcacctaggcaaagatatcgtgatcaacattgatctgcaggactttttccccagtataagttacaaacgtgtgaaagggctgttttccaaatttgggtattccgaacagctatcgaccatttttgcattgatttgcacacaggcgaacaccgaagaggtgcttctggacggggtaaagtattttgtccacaagggagaacgctttctcccacagggctcaccggcctctcctgctattagcaatagcatcgcctataagctggacaaacgactccaggggctggccaagaagtttggctttgcatataccagatatgctgatgatttaacctttagcgccggacagaattccgagcaaaacataaaccggctcctgtacttcgtcaagaagataattaaggatgagaacttcaccatccacccagacaaactgcatattatgaggcggaagcatcagcagaaggtgactggcatcgtggtgaatgaaaagttgaatgtagagagaacaaagctgcgaaagttcagagccctgctgcacaacatcgaggttaacggttggcagaatcagacctggggaaaagcataccatttgatcaatgcaatcgagggttatatcaacttcgtaaatatggtgaaccccagcaaggcctccgttttcaaagaaaaactcaagaccatcgttgctaaacatggcgtccccttcgtggaagtgcagaaggtgattcctgatgtggtggaacttcccgaagtccttgagccagagcaggacgctgtaacgcctaaggaggaaaagactgactggtggaatattttttga

SEQ ID NO: 13205 - RNA, 1515 nt, synthetic construct
  source 1..1515: mol_type = other RNA
atgtctcagaatctcagccgccagcagatctatgacaggattaaggccagctcaaaggactcttatatcctggatgaaatgaagagattgggattctggcaggagacatctactccttccgtgcccgaacagttgattcagagagaagctgttctgcagcaggagctccaggaactcctggccaaggatcggaagtacgggaaccaagaagctatgctgcgcgaaatgcgtaagaagcgcatgaatgatgcaaaagccaagagggagattaccaagcaaaaaagcgagcagaagagacaggacaaggctgactattggaaaaatttgcaacagcagcagatcatctatctaggagagaacgtgtccaaaggcttacacaagtcggactccgacaccgagaagcttttacagtttagtctgccggtgttcgaaaatgtcctggacttcagccagaagtcaggctttggcctttctgtgatcaagtaccttgcatttcacagatcggtgagcaagaaaagccattatcacgtgttcgagataccaaagaaatccgggggtaagaggaaaatctcagcacctaaaccccagttacggcacttccaacattggattcttgaaaacatactgaacaagatacctgtgggcgaggtcgttcacgggtttacgatcaaaaaaagtattgtcacgaacgccgagagccacctaaagaaggacatcattattaacatcgacctccaagattttttcccttccatcagttataaacgtgtgaaggggctgttttctaagctggggtactcagagcagctgagcaccatctttgccctggtatgcactcaggctcacaccgaggaagtgctgttggatgatgtaaagtacttcgtgcacaaaggtgaaaggtttttgccgcaaggaagtcccgcttccccagccatctccaatatcatcgcttacaagcttgacaaacggctgcagggcctggccgccaaatacggtttcacttacactcggtatgccgatgacctaaccttctcagccggacaagataacgaacagaacataaataagctcctgtactttgtgaagcaagtaatcaatgctgaagactttacaattcatcccgataagttgcacattatgcgacggaaacatcagcagaaggttaccggtatcgtcgtgaacgaaaaactcaacgtcgaaagaaagaagctgcgaaaattcagggcactcctccataatattgaggtaaacggatggcaaaatcagacctggggcaaagccttccatcttataaacgcggttgagggctacattaacttcgttaatatggtcaatccaagtaaagcactggtgtttaaagagaagctctctgctatcatcgcgaaacatggaaaaccaattgtggaggttcgcacaactattcccgagatagcagagacaattaaagtctccgaggataaggaggagattatagcgcctaaagaggaaaaaacagattggtggaatatcttctga

SEQ ID NO: 13206 - RNA, 1515 nt, synthetic construct
  source 1..1515: mol_type = other RNA
atgtccgagcagctgacacggcagcagctctatgaccggatcaaaagctctagcaaggacagttacatactggaagagatgaagcgcctgggcttctggaagtcaaagggacagcctactctggaagagacactgatagagaaggaggcgagcttgcaacaggaactttcaactcttgtggccaaagaacggaaattccagaaccaggagctcctactgaaagaaattcataagcaacgcatgcagaaggcaaaggcaaaacgggaggaaactaaggagaaaagagcaaaagaaaaacaagagaaagctgcgcgctgggaggcccttaggacaaccgaaataatttatcttggcgagggggtttctaaaggcctgcagcctactgcctccaacgggaccctgttggcccagtacaacttgccgtactttgataccgtggcacaactggccgatgctatggggattagtacaaagatgctcacctactgggcgtaccacaggcctgtgtctcttaccagccactactatactttcgagattgccaaaaaaagcggtgggaagaggaagatcgcagcaccaaagaaaggactgaagaaactccagaactggatcttaactagtatcctgtctaaaatcgcccttcaggacgaagtccacggctttacgtccaaaagatcaatcgtgtcaaatgcccaaccacacatcggcaaggctgtagtggtgaatatcgatttgaaagacttctttccatccgttcactataagcgagtcaagggtttgttctcgactctaggatacagcgaacagatcgctagtatcctggcattattatgcacacaggcagagacaaagcaggtgactctggataacgtgttatactacgtgcagcagggtaatcgggtcctgccccagggatccccagcttctccagccatttccaacctcatcgcctacaagctcgacaaacgtatgaagggactggccaagcgatatggcttcacatacaccaggtatgcagacgatctcacattcagctcacatacggccaccgataaagatattgctgccttgctgcactttgctaagaagatttccaccagcgaggatttcactgtacatcctgacaaagtccatgtgatgaaacagtcgagacaacagaaggtgacgggagtagtggtgaatgaaaagcccaacattgaccgtaatagactcaggcaatttagagccctgctgcaccaaattaagaataaggggtggcaggacaaacagtggggcaaatctaacaatgtctatgcggccattgagggctatatcctattcgtccacatggttgctcccgagaaggctctcgtctttcgcaagcagctggaagatatagttgctatccatgggaccccaccccctacggaggtacaacccgtgccccagccggttaccgaagagaagacaatagttcctgagaataacagtaaggccaacgaagaggacacaaccaattggtggaccaccttttga

SEQ ID NO: 13207 - RNA, 1506 nt, synthetic construct
  source 1..1506: mol_type = other RNA
atgtctgagcaactgaccaggcagcagttgtatgatcggatcaaggagtcctctaaagatgggtacattctggaagagatgaagcggcttggcttttggaagtcacaaggagagcctactctcgaggaaaccctgatccagcgcgaagctaacttgaacaaggaactgactgctctggttgccaaagagcggaaatttcagaaccaggaaatgttgctgaaagaaatacataagcagcgaatgcaaaaagcgaaagctaaacgtgaggagactaaacagaagagggagcagaagaagcaagatcaggccgctagatggcaggagattcaagagaaagagataatttacctgggagatgacgtgtccaagggactgcagcagacggagagcaacaaagatctgcttctgcagaacaatctacccttttttgagaacgtgctccacctggctgaatccattggtacgagcactaagaagctgacttattggtgctaccatcgcaaggtgtcaacgaacagccactactataccttcgaaattccaaagaagagcggtgggaaaagaaagatctcagcacccaaaaccggactcaagaacctgcaaaagtggttactggacaccctactcagcaaaattacaatggcagaggaagtccacggattcaccgccaataggagcatcgtttctaacgccaagtcccatatcgggaaggaagtggtgatcaatatcgaccttaaggatttcttccccagtatacatttcaagagagtgaaaggcctcttcaaggccctcgggtactctgagcagattgcctccatcttcgccctgatcagtactcaggcagaaaccaaagaggttttgctcgatggcgtcaaatattacgtccagtccggcaatagaatcttacctcagggctcccctgcttcgccggccattagcaatctgattgcctacaaacttgacaagcgcttaaaaggactagcacagcggtatggctttacctacacaagatatgcagacgacctgaccttcagtagcgaggagaataatgctaaaaattcggcagctcttctctactttgccaagaagatcattacctccgaagactttacagtccaccccgacaaaatacaccttatgaaaaagtctaggcaacaaaaagtgacagggatagttgtgaacgagaaaccaaacatcgaccgcaatcggctgaggcagtttcgagcgttgctgcataatattagttgcaatgggtggaaagatcagaagtggggcaaagccaagaacatctacaatgcgattgacggttatatcttgttcatccacatggtacagcccgaaaaggcaattgtattccgtaagaagttagaggaaatagtcgtgaagcacggcaagccaatcacaaaatgttcaactccgctcccagtggaaacacagaagaaggaagagacactctcagagaaagaaaattcatcttctcctagtaactggtggagcaacttttga

SEQ ID NO: 13208 - RNA, 1512 nt, synthetic construct
  source 1..1512: mol_type = other RNA
atgagtaaggtgcttagccggcaggaaatctatgatcggataagaaactccagcaaagactactatattctggaagagatgaaacgtctggggttttggaaggaatcaagcgtgccaactgtggccgaatctttgattcagagagaggccttgcttaacaaagagctgcaggagctaattgctaaggacaagaagtatcaaaatcaggagctgatgctgcgtgaaatgcgaaagaaacggatgaaggaggcaaaggaaaagcgcgaagagacaaaacagaagaatgaacgagcacgcatcgagaggagtgagaaatggaagaaaattcatgcagcacagatcatttatctcggggacgattattctgcgggcctgaacaattcagcgccgattaacagcatcaatgccctgctgcccaccttctctgatgtccaggatctggccgccaagatgggcatcgatctctccactctaagattcctgtcattccaccgaaaagtctccaagaattgccattaccactcctacgagatcaaaaagaagagcggtggaaccagaaacatatccgtccccaaggggaagttgaaaaaggctcaacactgggtgctccagaacatccttaacaaaatcgaaatcaacgattcggcccacgggtttatcaaagggaagtctattgttaccaatgcccagcagcacgttaacaaggccgtgatcataaatctcgacctgaaggatttctttcctacgatccactataagcgcgtgaaggggctgtttattaagctgggctaccctgaacaactggcaattatattctccctcctctgtacccatgcccacacagaagaagtattcttggacggcatacgctactacgtacaaaatggcgaaaggttcctgcctcaaggatcgccagcctcacccgctatcagcaacttaatatgctacaagttagacaagaggttggatggcctcgcaaaaaaatacggagccgtctattctaggtatgccgatgacattacttttagtctcgacgacaatgagaacatcagcaagctgctcttttacgctcacaaaattatcgagggtgaggatttacagatcaacaaggctaaaacgcacattatgcgcaaaaatgctcagcagaaagtgacaggaatcgtggttaatcagcagccaaccgtagagcggaggattcttagaaaattccgggcacttttacataacattcttaagaatggctggcaggagcagaaatggggcaatggatctaatctgctgcatagcatcgagggatacattaattacatccatatggtgcacccaacaaaagctcaatcatatagggtgtccctaaaaactattttggagaagcatggtactcccgagatcaaggttaacatacccataaacatcgtccctcctccgcagatcgctagtaccgaggaagacccaaaagacagtgcgcccgaacaaaagaaagaggagacagactggtggaacctgttttga

SEQ ID NO: 13209 - RNA, 1512 nt, synthetic construct
  source 1..1512: mol_type = other RNA
atggcactcacgaggcagcagatttacgatcgaattaagagctcttccaaagatagctatatcctagaagagatgaagagaattggcttttgggagaattccgagatcccgagcgttccagagcagctgatcgccgaagaaaccgcattacagaaaacactcaaccagcttttggctcaggacaaaaaatattcagaccaagaggccatgttgagagccatgaggaagcagcgaatgcaggagagcaaacagaaacgcgatatcaataaacagaaaagagctcagaagatcatagagaagtctgagaaatggcagcaggtcaatcaaaaacagatgatctacctgggcgagtcagtgtcaaaggggctgcagaacgagcagcaaaatccgatccttctatccaagttcaacctggattttttcgaaaactcttacgacttcagtgtccaaagtggattcgacttgcccacgcttaagtacctggcctacaatcggaaagtgtctaaaagcacccattatcatgtattcgagataccaaagaagagcggcggaacccgcaagattactgcacccaaaacaaaactgaaggccttccaactctggatcctcgaacacatccttaacaagatcgtcgtagcacctatggtgcacggattcgtgcagaataggagtattgtgtccaatgcgaaccagcacgtacagaagaacgtggttctgaacttggatttaaaggacttctttccttctattagctataaaagggtcaaaggactgtttcggatctttggatattcggaatccatggctacacttttagcgctggcatgcacaacttgtgacatcgaaaagattcaaattgacggcgagacatactacgtgcagaaggggcctagatacctgccacaagggtcccctgcttcacccgctattagcaacctgatcgcctataaactcgacaaacgtctccatggcctggcctctaaatatgggtttacatacactcgctacgctgacgatctgactttttccggcaacgaggaagccgcacaatacatgggtaaattcctctgctttgtgaagaagacgattaagagtgaggacttcgaagtgaacaatgataagacttccattatgaggccttcgaatcagcagaaggttacaggtatagtcgtcaataagaagttgaacatcgaccgcaagcggctgagacagtttcgtgctcttctccacaatattgatcagaacgggtggcagaaccaaacttggggtaaggctatacacctaataaacgccgtggaaggctatattcagttcgtgaagatggttgatgccgccaaaggtgccaagttccatcaaaccctgctgaatatcatcgccaaacacgggcggcccatcatcgagagtaaaattatgcaggtgtcaaaggctgcgatccccgaagcgccaatagttgagaagaccatatctaaagcaaccaccgacaagcagaccgattggtggaatctgttttga

SEQ ID NO: 13210 - RNA, 1464 nt, synthetic construct
  source 1..1464: mol_type = other RNA
atgggtgaacgtgccacaagggagaacacccctggacgaagcgtgccagtggagaagcagcccttggaggaaatgaagaggcttggtttttgggagcagcctctgccagccttccctgaagagctcaaccagcgggaggatgacctggcccgggaactgaatgaactcttggccaaaactgggaaggagaataaagagaagggagaaatgttattgcgccagcgcgctagacagaaaaaactcgaaaaagctgcacggcgaaagttggcgcgacccgagacaatcccttatctgggcgaggaggtttctaccgggctcagagaaaccgagacgaacacggcactcctacaaaagtataatctccccgtttgtacttctttcagggaactcggagagcagatgaactgcgacttacctaccttgcagtatctgctttacaatcgaaaagttacctcttccacccattactacacattcaagtttcccaagaaaagcggtgaaatgagaacaatctccgctcccaaacagaagctgaagaggctgcagtactgggtaacggagaacatcctgaatagactgccagtctgtgatcaggtacacgggtttgccaaagaaaggagcatattgactaatgcctccccgcaccttggcaaagacattgtggtgaacctggacctgaaggactttttcccctcaatcagctacaaaagggtgaagggcctatttagaaaattcggctattctgaacagcttagtatcctgttggcgctgatctgcacagaagcccaaacccggcaagtcgagctcaatggccaaacttggtacgtgcagacgaatcgccggagtcttccacagggctcacctgctagtcctgcgatttccaatctgattgcatataccctggacaagagattagaaggagttgccaagaagtacaactttacttatactcgctatgcagatgatctgacattctcagcttataaagagcaggaaaggaatatcacaaagcttctctactttattcgcaaggtcataagagaggagcggttcacagtacatcctgaaaaaacccagatcatgaggaagaacaggcaacagcgtgtcaccggcattgtggtcaaccagcggcccaacatagatcgtcagcagctccggcgatttagagccctgttacatcatattgaggtgaacggctggcagcaacaacaatggggacacccatccgggtacctgccccacagcatcgaaggctacattaactttattcgcatggtgcacccgcataaggccaaaaagttcgaggagcagctgatgaagatcgtgttcaagcacggatacccggcaggtccagcttccagtcccgagacacgcatagataagtcaggggaaaaaaaagagccagacagccctagcacttcgtctttcgaggtggactggtgggggctaccactgaccacttga

SEQ ID NO: 13211 - RNA, 1500 nt, synthetic construct
  source 1..1500: mol_type = other RNA
atggccgagcagctaaccagacagcaattgtatgacaggattagagaaacctcgaaggacgcttatatccttgaggagatgaaacggctgggattttgggagaactctagccagcctactttgtctgaggctctcatacagcgcgaggcaactttgcagaaggagctgaatgagttgttggataagcagaggaagtacaactctagggaacagctgcttcgagacatgaggaaacagaaactgaaactttccaaagaaaagcaggcggagacgaagaaacgccaggaagagaagcgccaactgaaggctcagaagtgggtggaaagcaaacagaaagagatagtctacctcggggagtcagtatccggtggacttaatgagaagaccagcaatcaggcattgcttgccaagtatcagctttccgatttcgcctccgtgctcggcctggctgaagccatgaaggtgtcgctggcccagctgcgtttcttggcttttcaccgggcagtaagtaagacctctcactatcacttttacagtgtacctaagaaaagcggaggcaaaagactgatttctgctcccaaaccattactcaagaagtgccagcactggatcctggaaagcattctgtacaagatcaccccctctgaacatgttcacggtttcgtccctaaaaaaagtatcgtgactaacgcaaaaccccatttacagaaggacatcgtggtcaatctcgacctgaaagacttctttcccagcatttcctacaagcgggtgaaagggctatttgttaacctcggctattcagagcagctggcgacagtgctggccctgattagtacacactacgaaatggataaggtgaacgtcgatggagacgtttactatgtgcaaaaaggggagagagttttacctcagggctcaccagccagcccagccattacaaccctcatcgcctatacaatggatcgacggctgcaaggcctggcgaagaagcttgggttcacttacactcgatacgcagatgatctcaccttttccacagatgctagcaacgaaggcaatatagcaaccctcttatacttcaccaaacaagtagtggaagacgaaggtttcacggtccatccagacaagactcatgtgatgcgtaaagggagtcagcagaaagtgaccggggtcgtggtgaatgacaagctaggcgttgacaggacgattctccgcaaattccgggcctttctgcatcaagtttcccagttcggctggggaaagaataagtggggtaacggcgataacccgagacaatcagctctggctttcgccagctttgtcatgatggtggacaaggaaaagggaactaagctgatgaaccagatcaaggccatcgcagactcctctgtggtcaccgagaaaaagaaaacagtctcacaagagccccagaaacaagtgccggaggagaagacaaatactagtacacctgcctcacaggattggtgggatatcttttga

SEQ ID NO: 13212 - RNA, 1599 nt, synthetic construct
  source 1..1599: mol_type = other RNA
atgagcatgacgcggcaggagctgtacgatcggattcgaacaactagcaaggaagcatatatactcgaggagatgaagcgcctcggcttttggggcgatagtgaaaagcccactctcgcggaggagctgataaacaaacaagcccgtttgcagaaagagctctccgaactgaatcagaaacagcgccagtacaactcacgtgaggcaatgcttaaggaagttagacttgagagaatgaaggccagcaaagaaaagcaaaaggaaactaaggctagaaatgaagagaaagtaagacttaaagctgaaaagtgggctgagacgcagaagactaatatcatttatctaggtcaggaggtgagcgagggcctgaacaataccacttctgataaggagaaactggaaaaactgaagctaccttatttcgagaacatcgtggaattctctgagaagattaacaagccaattagtgaactcaggtttctcgccttccaacggagcgtctcgaaggtcaaccagtaccataactactacgttcctaaaaagtccggaggtaagaggttaatttccgcgcccaagccaaaattgaaacacacacagaactggatcaagacaaacgtcttggacaaaatcgaaatcaatgagaacgtccacgggttcgtgaaagaacggtctattctgacgaacgcagagccacaccaaaataaaaatctggtgatctctttagacctgaaagattttttcccgtctatcagttacaaacgcgtgaaagggctgttcctgaagtttggatattccgaacaacttagcaccttgttcggccttctgaccacacacaatgagactgataagctgaatgtcgatggagagatatattacgcccaaaaagtggataaagagacaggaaagactaataggtttttacctcagggctcaccggcctccccagctataaccaccctgatcgcctacaagatggacaaacggctcgagggactggccaaaaagatgggtttcacgtatacccgctatgcagatgacttgacctttagcagtgacctggacctgaaaaaggacaccaaagctacaaataagatcatcggaagcctgctctactttgtgaagaaggtggttactagtgagggtttcgaaatccatcctgacaagactcatattatgaggaaggggaaccagcagaaggtaaccgggatcatcgtgaaccaaaacaccgaaaataagctaggcattgacagacagactttacgaaagtttagggccttcctccaccagacagctaaaacagggtggaaagtggacaaaaatgcaaaggacaaaaagtggggcattcatcccgatcccaagcaggccgcccttggcttcgcttcatttattaagatggttgatgcggagaaaggggagaagttcatccagaaaatcaagtccatacccaccgcagaggactacctccagaccgacgatacaacattggtatcccagaagaccgaggagaagaccctgaaacaggtggaaacaaagtcaaaagagtcagaacaggaaattgaaaaacaatcggatgaatctgactggtgggacattttttga

SEQ ID NO: 13213 - RNA, 1536 nt, synthetic construct
  source 1..1536: mol_type = other RNA
atgagtcagcacccgaccaggcaacagctttatgatagaattagggcctcctccaaagacagcgtgatcttggctgaaatgaaacggttaggcttctgggaagatagccctcagcccactctccccgagactcttatcgcccgggaagccacactccagaaggagctcaacgatctccttacgacagagaggagattccagaactcagagcaggtcctggtagacatgcggaaagaccgcatgcgcaagagcaaagaaaagcaagcagagaacaaggctcgaagactcgaggagaggcgacagaaggcagagcagtggcagcagacgaagacccaggatattatctacctcggagagggtgtctctgccggcttacaggcagcgccctcagacctggagcgtctacaaagcttgggactgccaatattcgagaatgtattggacttagcccagcagatggggatccctcttcctaagctgagatttctggccttcgagaggaaaatagctaaggtgtgtcactacagctactttcagctgccgaagaaatcaggtggactgcggagaattgcggcaccaaagccactgctgaaacaagctcagcagtggattatgacacacatcctctatcagatccccaataaggattgcgtacatggcttcgtgcccgagcgctctatactgagcaacgcacagccccatctgggccaggaagtggttattaatcttgacctgaaggacttcttcccatcaatcagttatgcccgcgtgaaaggactgttcgtgaaactgggatatagtgagcagttggccactatccttgcactactgtgcacacatgctgaaaccaaggccgttaccgtggatggtgagcagtttttcgtgcaggaaggcgaacggcggcttgtccaaggatcccccgcttctcccgcgctctctaatctgatcgcccacaagttagataagcgactggaggggctggcggccaaatatgggtttacatacacacgctacgcagatgacttgactttttccgcccctaaagctgacgagcctgctattagcgccctgcttgcttatgtaaagcgcgtggtcagggaggaaggcttcgccctccacccggacaaaactcacctaatgaggaaaggggcacaacacaaagtcaccggggtcgtggttaatgaaaagccttcggtcgacagaaaacagttgcacaagtttagagccctcctccaccaaattgatcaaaccggctgggagggcaagcagtgggggaacacgccaaacatcgttcattcggtgcaaggttacgccaattttgttgcaatggtgaaccccgaaaaaggccagaagtttgtggcgatggtgaaggcactgatagctaaacatcccgcccctccactggttttgcgttacaccccggccccagaacaaccccctgctgatgaaactcattccacccagccagccgcaccaacatctccagctagtcctcagaagcctgaatccgactggtgggacgtgctggatctatga

SEQ ID NO: 13214 - RNA, 1515 nt, synthetic construct
  source 1..1515: mol_type = other RNA
atgagcactcagcttaccaggcaacagctttatgaccggatccgcacaacctccaaagatcagttcgtactcgaagaaatgcagcgcctagggttctgggagaagaaagagcaacctacactgtcagaaacattgatcaagcgagaagctgatctgcagaaagagctgaatgagctgctgaccaagcagaacaaatacaataaacgcgaggccatgcttctcgaaatgagaaaggccaagatgaaggcctctaaagaaaagcaggcggctacgaaactgcggaatgagcagaagaggaaagacaaagccaagaaatggcaggaatcacaacagaacgacatagtctatttaggcgagggagtgtctgcagccctgatccaaaaggagaacaatctggaaaacttgcagaaatacgaattgcctctctttgagaatatgcttcagctggctgaggctatgcagatcccgttatcaaaactgcgctttctggcttaccaccggaaggtgagcaaaatcacacactacaatcacttcacaattcccaagaagtctggagggctcaggaccatatcagcaccaatgccagatctgaagaaagttcagcagtggatccttgagcacatcctgtacaagattaagccaaaggctcaagttcatgggtttgtccccgagaggtcgatcttaagcaacgccacccctcacatcggtaaggatatcgtgattaacctcgacttaaaagatttcttcccctccatctcttataagagggtcaaaggcctgttcgtcaaactcggctattccgagcaaatagcactcacgttggcacttttgtgcacatatcacgagactgaaaagttgaatgtggataacgagatctactacctacataaaggagagcggtatctgccacaaggcagtcctgctagtccggctataacaaccctcatcgctcacaagatggacagcagactgcagggcttggccaccaagtatggtttcacctatactcgatacgcagacgacctgactttttccgccaataaagacgccgaggaaaacatcaataagatgctgcttttcgtgaagaaagttattgaaagtgaggatttcgaactacatcccgacaaaactaaaattatgagaaagggaagccagcagaaggtgaccggaattgtagtgaaccagaaacccaatgtagatcgtcagcagtttcgtaaattcagagccctgctccatcagatcgagcagacagggtgggagaacaagaaatggggcaacaaggacgcccatattgtgtacgcagttaagggttttgccgaatttgtgcacatgattaatcccacaaagggggagcagctcaagaagaagattgcggagatactgactaaataccctgcaaccgtgcctgccaagccccaaaaagaggtcgcgtcccagacgaaggaggaaaccccaaacattcaaactaatactaacattcagccaaccgaatggtgggatatttttgaaaactga

SEQ ID NO: 13215 - RNA, 1380 nt, synthetic construct
  source 1..1380: mol_type = other RNA
atggccaatcagcccagcagagaggacatcagaaagagggtcgctgaatctactaaggacgccgtaatactggaagagatgaaacgtttcggcttttggaaagaggagttttcacccgaactcgaggatatccttcaaaaacaaaaagaaaccgagactgagctgaacaccctcgtgcgaaagcagacgcgttacaggaatccagaaactctgcggaaagagatgcttaaagaacgtatgaaggcgagcaaacaaaaacggcaggaggccaaggagcgcaaagaacaaaagcggctcgctcgcgcagaaacctggaaaaagaggaaggagacagaggtactgtacctaggcgaagacgtgagttccaggctgtccgagacagaacccaacctggaattccttgccaagtggaacctgcccaatattgagaatcctttggctttagcaaacgccctttcattagagctgtcccagctccggttcttgacttacaacagaaaagtaagtttggtgaaccattataagcgcttctacataccaaaaaagatggggggcaagagacttatcagcgctcccatgccgcttattaaatcagcacaactgtggatactcaacaatattttgtatctgatcccacacaccgaccaggcccatggatttattcctcagcgctcaatcgtttctaatgcagcacagcacgtgggtaaggagttagtgctgaacctagatttgaaggacttctttcctagcatcagcttctctagagttaaaggactgtttcagagctttggctatagcggacagatctccacacttctggctctcttgtgcacagaagccgaggttgaacaggttgctatagacggcaagaaatattttgtgtccattggtgaaaggaccctgcctcaaggatcgccttgctcaccagccatttccaacttaattgcctacaagctcgataggcgcctacagggaatagcgaataagtggggcttcgtgtatacgagatacgcagacgatctctcttttagttgtgggtctgacaacctcgataactttcagcagctcctgtggagtgtccaggaggtcgtgaagtccgaaggctttactgtccatcccgaaaaaatccacatcatgcgcaaagggagccgacaggaggtcaccgggctgatcgtgaatagacagattgggatcgagcgaaaagagctgcacaggttccgggccttgctgcagcagattgaaaagaacggtccagctggtaagacatggaacggcaatccgaatctggagaattctatgcgggggtacgcgagtttcgtgatgatggtgaagcctgagctgggaattcgattcatgaagaagatcgattcgatcttctga

SEQ ID NO: 13216 - RNA, 1521 nt, synthetic construct
  source 1..1521: mol_type = other RNA
atgacacgccaagaaatctacaatcgcatccaggagctgggcagtaaacagtcctacatcgctgccgagatgactcgcctaggcttctggaaccaaggtggagagcccaccattccagctgaactgacccagcaggccaccgctctgcagactgaactgaatcagttgatggaacggcaaaggaggtatcagagtagacaggcaatgctgcaggaaatgcgtcaagctaggatggctgcagccaaacagagacgattggagacaaaggtacgtagggaagcggcacgcttagcaagggcagaaacttggaaaaacaaactcgctactactgtgccttatctgggtgatgaggtatctgccggactcaaaaataccaccagcgaccctgccagactcgcctactttgggctcccacatttcgacagtcctcttgccctggcacaggctatgagcctccctcttagcgagctgagatttttagcctacaatcgggccgtttccactgtaagccattataagagattctatctggcgaagaaatctggaggaaagcgtctgatctctgcccccatgcccagactcaagaaggctcagctgtgggttctggagcatattctgcacaaagttcaaccgactgagttcgcgcacggttttgtgaccgatcgaagcattctgacaaacgccacacctcacgtggggcaagacgtggtgatcaacgtggatctcaagaacttctttcccaccataggatatccccgagttaaagggctactcacaaagcttgggtactccgaggccatcgccacaatacttgctctactgtgcacagagccagacaccgaggctgtgcagatggatggcaagacatatcacgtcggtaatggggagaggacgttgccacagggagcccctacgtctccagctatcacgaacctgctagcctaccggttagaccggcgcctccaaggcatggcagcgagattcggatacgcctataccagatacgcagacgaccttaccttcagtgctaccggcgcagccgcaggtaaggctaaccaggtcttgtgggccgtggaacagatagtgcaatcagaaggctttactgtccatccagataaggtcactgtaatgcggaaaggcgatcagcagagggtgacagggatcgtcgtgaaccagaaaccgtcgatcgatcgcgcgaccttgaggcagtttcgagcgttgcttcaccagattgggcagtcgggctgggagtccaaaacctggggcaaccccaatccgacggcagatatccaaaatgtcgtcatagggtacgctaatttcgtgatgatggtgaagcctgacttaggacggcagctgcgggcaacaattgctggcctcattagcaagcctccgaccagctcctccgcctcatctatgcccactattgccgatgacctgtctcccgtgtcagcccccattaccacaccactggttcctccaacggcacccccagcctcaaaggactggtgggacgttctgtga

SEQ ID NO: 13217 - RNA, 1500 nt, synthetic construct
  source 1..1500: mol_type = other RNA
atgacaagacaggagatacaaaagcgcatcgaagagctgggtagcaaacagcagtttatcattgccgagatgactcgactggggttctggacccagcatggagaacccatcccagcagagctcgttgcgcaggatgccgccctccaaaaggaactttcccagctgctggaccgccagagacggtttcagtccagggatgccatgctgaaggagatgagacaagcccggatggctgccgctaaacagcggaggatcgaaacaaaacagcggcgagaagctgcgcgtaaagcacgcgcggacgcttggcaggcaactcttgcaacagatgtaccctacttaggtgaaggcacgcctgccgcactggccaatcacacagctgacccagaccggttgagacaggtcggtctgccccagtttgaaagcccattggccttggctagagcgatgggtctaagcctcagcgagcttaggttccttgcctataatcgggccgtttctacggtgtcacactataagcgattccacttaattaagaagtccggtgggaaacgcctgatttcagcacccatgccccgcctaaagaaggcccagctgtgggtactagagaatatacttagcaaggtccaaccaaccgaacaggcacacgggttcagggccgaacgcagcatactgaccaacgctcaacctcatgtgggaaaagatgtggtgatcaacatagatctcaagaacttctttccaaccgtgtcttatgggcgagtgaagggccttctggcaaaactcggctatagtgaggctctggccactgtcctcgccctgctttgcaccgagcccgatacacaggctctccaggtagacggaaaaacatactatgttggaaacggatccagatacttaccacaaggcgcccctacctcacccgcactgactaatttgctcgcctaccgtctcgacaggcgtctgaacgggctggcgcaagcatttgggtacgtgtatacccgatacgccgacgatctcacgttctctgccagtggcagcggggctggcaaagcgaaccaactgatttgggccgttgaacagatcgtgcagggagagggtttcgtcgttcaccctgataaaatctccgtgaggagaaagggccagcagcagagagtgaccggaatcgtcgtgaaccagaaagccagtatcgacagggctaccttgcggaggttccgcgctctgctgcatcagattggccagaccggatgggagggcaagacatgggggaatccggcgccggaggcagatatccagcaggtggttttaggctacgcacattttgtgcaaatggtcaagccagagttgggccggagtctggtggcctctattagggcactaattcagtcacgccctgacgcagccttggctcaaccggtggaacctgtgccagctactgtctcttcgactgctactaattccgctcctgtcgccagacccgtcaaggagtggtgggacgtactgtga

SEQ ID NO: 13218 - RNA, 1050 nt, synthetic construct
  source 1..1050: mol_type = other RNA
catcgaccagtaagcactgtgaatcactacaagtcattctacctgccaaagaaaagtggggggaaaagattgatatcagctcccatgcctcgtctgaagaaagcgcagttatggatcctggagcacctgctgcagaagatcacccccaccgaacaggcccacggtttcacgaccggacgctcgattgtgtccaacgcccaaccccatgtggggcaggaggtggtcataaacgtggatctcaaggatttctttcctaccatctccttcccgagggtcaaggggctgttcatggcccttggatttagtgagcaactcgcaactctgctggccctcctgtgcaccgagttgcctacctatgcagtgtctttggacggcagaacatactatgtggccacagatgagaggcggttaccccagggagctcctacgtctcccgctatttcaaatctgatcgcgtaccgccttgacaggaggctgcagggaatggccacccgttttgggtatgcatatacaaggtacgcagacgatcttactttttcagcaagcgatactgctgtgaaacaagtcgagcaggtgttgtggagcgttaaccagattgtagagagtgagggattcactgtccaccccgacaagatctccgttatgcggaaaggcagccagcagcgcgtaacaggtgtggttgtgaatgacaaaccgggagttgaccgggccacacttagacgatttagagccctcctgcaccaaatctctctcacagggtgggctggcaagtcttggggtggcaccgccactaatcatcaagctgatctgcgcaacgtggtcatgggctacgccaattttgtggccatggtcaagcctgaacagggccaggcgctccgggaacaaattaacaagctcattggcggtacgaacttatccgtgaatccattgctgagcgaacagccagctcccgataacgcaccagtcgtaacaggcgaatccactctaggaaccctaagtcagaaaccacctatcctgagccagaataaagactggtgggacgttctttga

SEQ ID NO: 13219 - RNA, 1488 nt, synthetic construct
  source 1..1488: mol_type = other RNA
atgacgaggcaagagatatacgacagaatccggggcctcggatccaaggattccttcgtcttggccgagatgaaacgcctcggattctgggaacccaccaccgacatgcccggactgcccgaacagctcattgagagacaaggtcagctgcagcgcgagctaaatgagctcctggagaaacagcgtaggtatgaaaacaggaaagctatgttggcagagatgcgcaagacccgcatggcagagtcgaagcggaagcaacaagaaactaagcagagaaatgagcagaaacgccaagagcgagccgctcagtggaaaaggcagcaagaacagacgattgtgtatttgggcgagaatgtttctggaggtctgcagagcgggaccgccaacaatgatcagctgcgacgatttggattgcctgatttcgattctcccttggccctggctcaggcagtcggagttaccctgtcccggcttagattcctcgcctatgacaggccggtgagtaccgtctcacattataagcgattctacctgctgaaaaagtcaggaggcaagcggctgatttcagcacctatgccttaccttaagacagtgcagtattggatcctggaacacatacttcgcaagatccagcctactgagcacgctcatgggtttacaatagatcggtctatcgttacaaatgcacagccccatactggtaaggacgtggtggtgaacctcgatctaaagaactttttcccttccattagctaccgaagagtaaagggccttttcgtcatgatcggttacgccgaaacaatcgccactatcctggcgcttctatgcactgagccagattctgatatgattgagttggatggcaaaacctactacgtggccaaaggaagcagagtgttaccccagggcgctccaacctcaccagcgttgacaaacatgattgcctaccggcttgaccacagactgcgcggtgtcgccaacaagtttggatacatttatacccgttacgctgatgacctcactttcagcgcatccgacgaagcggcagggcgtgtaggacagctcctctggtctatcaggcaggtgatcgatggggaaggctttgtcctgcaccccgacaaattacaagttatgagaaaggggagtcagcagcgggtaactggcctagtggttaatgaccagctgggtattgacaggaccactctgagaaagtttagggccctcctgcaccagatcgaacaaagcggctggcaagggaaaacatggggcaaaggccaaatacagaacaccgtgctgggctatgctaactttgtcgccatggtgaagccggagcaggggaaacggcttgttgagacggtaaagaggctgatgctgccagctgtggaaagcgcgggggaattaccgcgccaggagccaagtacaaatgggcagatcaatcagcctccaaaagacacaaacctgagtacagactggtgggacgtgttatga

SEQ ID NO: 13220 - RNA, 1566 nt, synthetic construct
  source 1..1566: mol_type = other RNA
atgtctctgacccgtcagcagctatacgatcagattagagcatcatccaaggaggagtacattcttgaagaaatgactagacttgggttttggccaaacaatgtggggcagcctgcacccgcggtgacacttattagaaaggagggcgaattaaaccggcagctgaatgagctgctggccgaaaagcagaagtatcgaaataagagaaagatgcttgaagacatgagaaaggatagaatggcaaaagccaaactcaaaagggctgaaactaaaaaaaggcgggaagaggagcgggtaaagagggccgctgagtgggcagctaccaagaatctccagattgtttacctgggggaggacgtatcagccggcctgaacaaagtgacccccgataccgcccaactcacccgctttggcctgccagtgctgagcgatgcggtagccctggcaaacgccatgaacatcaccatcggcaagctgcggtatttaagcttctccagaaagatcggccatcatacccactaccagcgatttcaggtgcccaagaagtccgggggtacaagggttataagcgcccctatgccacaactcaaagccgcacaacactggatcctggagaacatactctataagatcaagaacaacgatgccgctcacggtttcgtgccgggcaagtccatcgtcacaaatgcgactccgcacatcgggcaggacatcgtcattaatctcgaccttaaagacttctttccctcagtggcctacaaacgtgtgaaaggcctcttctgcaaactaggatacgccgaacaagtggccaccatcctgggactgatttgcacggagcccgaagtggatgaagttttgctggacggtcgcaagtactatgttgcgaaaacagaaaggcatctgccccaaggagctcccactagtccagcaatcaccaatcttatctgttacaagttggatcagcggtttgcaggcctggccaacaagtatggatatgcctatacgcgttacgctgacgatatgacattctctgccaagggtgacgcagcagacaaggctggccagttgctgcgggctatcaagatgttcgtcaaagaggagggcttcacactgcaccctgagaagttgaaagtcatgaggcgaggggacaagcaggaggtcactggaattgtggtgaatgagaaactgtcattggaccgcacaacacttcgcaagtttcgcgcgttattgcaccagatcggacataccggactatccggcaaatcttgggggaaggggaaaaacattatttcgagcatggaaggatatgctaatttcgtgtacatggttaagcccgatctcggagccaaactgaaaagcagcttgacggccctcctccaacgcgaggatataaaagctgaggccaggagtatttgggcaggcgagcaggctcctacaaccccaagtgtcgcaggtgtccatataaacactactccgcaggctacgcctgctgccgaagttccacctgtgaatccctctactgacaaacctgccgctcctgacaagccatggtgggatgtattatga

SEQ ID NO: 13221 - RNA, 1593 nt, synthetic construct
  source 1..1593: mol_type = other RNA
atgtcccttactcgacagcagctgtatgatcagattagagcctcgtcaaaagaggaatatatcctagaggaaatgacacggcttgggttttggcccaagtctgtgggccagccaacaccagcagtgactttgatccggaaagaaggggaactgcgacgcagccttaacgaattgatagccgaaaaacagcgctacagaaataaacgcgcaatgctcgaagatatgcgaaaagctcggatggccaaggcaaagcagaagcgcgccgaaacaaagaagcgtcgcgaggaggagagggtaaaaagagccgcggagtgggccgccgagaagaatctgcatatcgtgtatctgggagagggcgtgtcagccgggctcaataaggtaaatcctgatacggcccagctggagaaatttgggctcccagtctgggctgacgctattgcgctcgccaacgccatgggaatcactatcggtaaattacgttacctaagcttcaaccggaaggtcggccaccacactcactatcagcgcttccagatccccaagaagtctggcggcaccagagttatctctgctcctatgcctcagctgaaggccgcacaacactggatactagagaacatcctgtacaagataaagaacaacgaggcagctcacgggtttgtgcctggcaaaagcattgtgacaaatgccgcgccccatattggccaagacatcgtgattaatattgatttgagggacttcttcccatctattgaatacaaacgcgtgaaggggcttttttgtaaactgggttacgccgagcaggtggccacaattctggctttaatttgcacggagcctgaagtggacgagctgctgctggacggcaggaaatattacgttacaaagactgcacggcatttgccccagggggctccaaccagtcctgcgattacaaaccttatctgctataaactggacaggaggttcgccggactggccacgaagtacggatatgcatataccagatacgctgacgatatgacattctccgccaagggacctgcagcaggcaaagcagggcaactgctgagggctgtgaagatgtttgtcaaagaggaaggatttactatacatcccgacaagctcaagatcatgagaaggggggatcggcgagaggtaaccggtatcgtcgttaatgagaaactgtcattagatcgtacgaccctccggaagttcagggcattacttcaccaagtcggacaaactggcctcgcgaacaaaacctggggcaagggtaagaacattatatcctccatggaaggttacgccaacttcgtgtacatggttaaaccggagttgggggcgaaactcaaagctacactcgcagctctgctgcagcgggcagacattaaggcagaggctagaagtatctggacaggagaagccctcccgcagaaggagtccaacaccgccatcagcggaaacaccgaaaccatcactacccccgttagcaccgctaccaatggcaatggagccgccagtgccgctagaggtaataccggcactgataagcccgctgcggctgataaaccatggtgggacgtcttgtga

SEQ ID NO: 13222 - RNA, 1530 nt, synthetic construct
  source 1..1530: mol_type = other RNA
atgagcttaaccaggcaactactctacgacagaatcagggctagcagtaaggaagaacttatcctccaggaaatgactagattagggttctgggcggaaaacctcgcccaacccagtcctgcggcctccttaattcagcaagagacagaagtccgccggcaactgaacgacctgattaacgaacgacagaagtatcgcaacaaacggatgatgttggaggacatgagaaaagcccggatggctaaagcaaagctgaagagagaggagacaaaacagcggagggaaacggctcgaaaagagagggcagccgcctgggctattaccaaagaccagcagatcgtttatcttggcgaggaggtttccgcggggctgaacaaggtagtgcccgatctcgtgcagctgcagaagttcggtctgcctgtgtttgcagacgctaatgctctggccaccgcaatgggaatcactcttggtaagctacgatacctgtcatttaacagaaaggtgggccatcacacccactaccagaggttccagatcccaaaaaagagcggcggcagccgtacaatttcggccccaatgccacagctaaaggccgcccagcactggatcttggagaatatcctctacaagattaaaaacgatgtcgcggctcacggtttcgtgcccggaaagtctattgttactaacgctgctccccatacagggcaggacatcgtgattaacattgatttgcgcgacttctttccaagcatcgcctacaagcgagtgaaaggcctgttttgcaaactgggttatgcagagcaggtcgcaactatacttgccctgatatgtaccgagcccgaggttgatgaaattctgctcgatggacgtaaatattacgtagccaagaccgcaaggcatttgcctcagggagctcccacctcccccgcaataacaaatctgatctgcttcaagctcgatcgccgctttaccggacttgcagaaaagtacggctatgcatatacacggtacgccgacgacatgactttttccgccaaagggccagctgcagacaaggccggccaactcctgagagctgtgaaaatgttcgtgaaagaggaagggttcaccatccaccctgataagctgaaagtgatgcgcaaaggtgataaacacgaggtgaccggaatagtagtcaatgaaaaattgtcactcgaccggactacgctgagaaagtttagggcgctgttacatcaggtcgagaagacagggctcgccaataagtcatgggggaagggcaagaatatcatttcttctatggagggctatgcgaatttcgtctacatggttaagccggaattgggagccaaactgaaagccactttggccgccctgctgcaacggcctgacatcaagagtgaggctcgtgggctttggacgggcgaggtcaaagagaagaaggtgtcagatacaccggtagctccaaccgcccccgtgaatccgcctcctagttccgcaagctctgaaaagccatggtgggatgtgctttga

SEQ ID NO: 13223 - RNA, 1608 nt, synthetic construct
  source 1..1608: mol_type = other RNA
atggctgaatccctgacccgacagcaactgtatgacagaattcgggccagctccaaggaggagttcatccttgaagaaatgatcagactcggcttttgggcgaggaacaccgcacagccctctcccagtgagacacttatcaggcgggagggagaactgagacgggaactgaatgatttattggccgaaaagcagcgttaccagaataaagtcaagatgctggcagatatgcgcaaagatcgtatggccaaatccaaactgaaaatcgcagagacaaagaagaggagggaagaggaacggaaagctcgggccgaagcgtgggcagttgccaaggaccaacagattctgtacttgggcgaggaagttagcgccgggctgaacaaggtgaaccctgacaccgcgcagctcgcaaagtttaacctccccgtatttgccgacgccaccgctctggccaatgccatgggaattaccttagggaagttgagatacctagcctttaatcgaaaagtgggtcaccatacacattatcagcgtttccaggtgcccaagaaatctggtggaaccagggtgatctcagctcccatgccgcaactgaaggctgcccaacactggattctcgagcacatcttatacaaagtctcccattccaacgctgcccacggattcgtacctgggaagagcatcgtgactaatgctgcaccacacgttgggcaggatatagtcataaacatcgacctgcgcgacttcttcccctcaatagcttacaagcgcgtcaagggtctgttctgcaaactgggctatgctgagcaggtggccacaatcttagccctgatttgtacagaaccagaggtcgacgaggtactgctagacggaagaaagtactatgtcgcaaagaccgctcgccatctcccacaaggtgcgcctacgtcaccggccctgacgaaccttatttgcttcaagttggaccggcgctttgccggtctggccgagaagtatgggtatgcatacacccgatacgcggatgatatgaccttctccgcaaagggagctgccgctgacaaagccggccagttgctcagggcagttaagatgtttgtgaaggaagaggggttcactatccatcctgacaagctgcaggtcatgaggaaaggcgacagacatacggtgacaggcatcgtggtgaatgaaaaactgagcatcgatagaaccacactcagaaaatttcgcgctttgctccacaatatcgagaaaactgggctctcgggaaaacgatggggcaaaggcaagaacattatttctagtatcgaagggtacgccaattttgtgtatatggtgaagccagagtggggcgcaaggcttaaagagaagcttgcggcacttctacagcggcctgatattaaggctgaggctcacgcaatttggaccggcaactctagtcagcccgtaactactgaggccatatcagcgtcttcgcacccagccggctacactagcagtgatacaacaactcctgcagccaccaccgatagcagcactacaattcctggacgcataacgcctccagagccaccggctgccactgataaaccctggtgggacgttgtgtga

SEQ ID NO: 13224 - RNA, 1524 nt, synthetic construct
  source 1..1524: mol_type = other RNA
atgcctgagggactaactcggcagcagctgtacgataggatcagggaaacttccaaggaggaatatatcctcgaggagatggttcggctcgggttttggtccagggacaccgacaaacccagtatccccgaagcgcttatcaaacaggaaggagagctcaatcggcagttgaaccagttgctgtctgagcgtagtaaatatcgcgacaaaaaacgcctgctggtggagatgcgcaaacaaagaatggcccaagccaaagctaagcgtgcggaaaccaagaagcggaatgagcagaagcgaatagagcgggcggctgcctgggctgaaaagaagcagcaagacattatctacctcggcgagaacgtctctgcgggtctgaacaagaaccaatctgataccgcccagctgcagaaatacaacttacctgtatggcacagcgctacagatctggcagccgccatgcaactcccactcggaaagcttagattcctcgcttttaatcgctcagttgctcaccagacccattatcagagatttgccatcccgaaaaagagcggcggtacgcggattatctcggcacccatgccacagctgaaggctgctcagcactggatattagagaacgtactgtacaaggttagcaactctgggagcgctaacggattcgttccaggcaagtcaattgtgaccaatgccatacctcacgtcggcaaggacctggtgattaatatcgacctaaaagatttcttccccagcgtcgcctataatcgcgtgaagggccttttctgtaaattggggtacagtgaacaggtcgccactatactgggactgatttgcacagagcccgaggtggacgaagtgctgttggatggccgaaagtactttgtggccaaaacagcaagggtgttgccgcagggggcaccaaccagtcctgcaattacaaaccttatctgctacaagatggaccgtaggttcgaagggctgtcagcgaagtatggttacgcttatactagatatgctgacgacatgacctttagcgcgaaaggcgaggctgctgcaaaggccggtcaactgctctgggccgtaaaaaaagtggtggccgaggaagggttcgtcctgcatcctgataagctcaaggtgatgaggaagggcgatcgacatgaggtcacgggcatcgtggttaatcagaaactttccatcgacagaactactttgagaaaatttagggccctactgcaccaggtggaactgacagggctggccggtaaatcatggggaaagggaaacattattgcctccatggagggatacgccaatttcgtgatgatggttaaacccgagcagggcagagcattaaagaccaagttagcagcaatcctttcccgcgccgatattaaagctgaagcccaggccatgtggaagaatgaaccacccgccgaacaacccgcaatgcctcccgcaaaccctgtagctccgcctgcaccagagaaaaagacagatgatccatggtggaaggtggtctga

SEQ ID NO: 13225 - RNA, 1539 nt, synthetic construct
  source 1..1539: mol_type = other RNA
atgcctgagggactcactcggcagcagctgtatgatcggatacgacagagctctaaggaggagttcattctggaggagatgacacgactgggcttctgggcacgtgatgtcaacaagccatcagtgccggagactcttatccagcaggaaggcggcctgcagaggcaactcaacgaattactccaggagaaggcaaagtaccgcaacaagcagagactgttgacagacatgcgcaaagagaggatggccaaggctaaggcaaagcgcgccgagactaagcaaagaaatgagcagaaacggatcgaaagggccgcggcctgggctgaaaagaagcagcaggatattatctatcttggagaagctgtctcagccggcctgaacaagaacacgtccaatgaggcacagctccagcatttcggcctgcccgtttaccacaatgctcagcagctggcagacgctatgcaactggccctcggtaaactccgctttctagcattcaaccggtccgtagccactaccacccactaccaacgtttccagctccccaagaaaagcgggggagttcgcacaatcagtgcccccatgccccaacttaaggcagcccagcactggatcctcgagaacatcctatacaaagtctctaatagtgatgccgccaatgggtttgtcagggggcggtcaattgttactaatgcccaaccacacataggtaaggacgtggtagtcaacattgacctaaaggatttctttcctggcatcgcatataaaagggtcaaaggtttattctgcaagctgggctatagcgaacaggtggcaacaattctgggactgatctgtactgagccagaagtggatgagattatactggacggaagaaaatacttcgtggccaaaacagatagggtcctgcctcagggggctccaacctctcctgcgattaccaaccttatctgctttaagatggatcgcagatttgaaggcctgagcaaaaagtacggttatgcttatacgcgatacgccgacgatatgacgtttagcgctaaaggcgacgctgctgccaaagtgggacaattgctctgggcggtgaaaaaagtagtggctgaagagggcttcgtgctgcaccctgataagcttaaggtgatgagaaagggtgaccggcatgaggttacaggaatcgttgttaacgaaaagctttccattgaccgtaccaccttaaggaaattcagagccttgctgcataatgtggaattgaccgggttgtctgggaaaaagtggggaaaggggagtattatagccagtatggaagggtacgccaattttgtggcaatggtgaaacctgagcaaggcaaaaaattaaaagcccagctggcagccttgttttccagagcggacatcaaggctgaggctcaggcgatctggaaaaatgaagagcagccccaacaggactccagcgtatcgccacagacccccaacacccaggacacaccgactcctcccaagccatcaggtccagaaaagccctggtggaaagtggtgtga

SEQ ID NO: 13226 - RNA, 1545 nt, synthetic construct
  source 1..1545: mol_type = other RNA
atgcccgagggtctgacacgacagcagctgtatgataagattcgcgaaagttctaaagaggagtacatcctagaagaaatggtgagattagggttctggcaaagggacaccgagaaaccaagcgtacccgaggttttgataaagcaggagggtgccttaaataaggagctaaatcagttgctccaggagaaataccggtaccgcaacaagcaactgatgttgacagagatgagaaaagctcgcatggcaagagcgaaagccaagcgtgcggaaaccaaaaagcgcaacgaggagaagagaatcgcaagggctgcggcctgggccgaacagaaacaacaggatattgtctacctcggagagaatgtcagtgccggcttaaataagaaggtgtccgacgaagcgcagctgcgcaagttcaacctcccggtgtggcataccgcacaggatctggctaatgccatgcagctttcactgggaaagctcaggttcctggccttcaatagaacggtggggcaccagacacattatcaacgttttcaaatccctaagaagtctgggggaaccagagtaataagcgcccccatgcctcagcttaaggcagctcagcactggatcctggagaacgtcttatacaagatcactaacagtacatcagccaacggatttgttcctgggaagtccattgtgaccaacgccattccacacattggaaaggatgtggtggtaaatattgacctgaaggactttttcccttctatcgcatataagagggttaagggcatgttctgcaagctgggttattcggagcaggtcgccactatcctgggtctgatttgtaccgaacctgacgtggacgaggtgatgctagataaccggaaatttttcgtagctaaaacagaacggaggttgccacagggcgcacctacttcccccgccattactaacatcatttgctttaaactcgaccggaggtttgaggggctcagcgcaaagtacggctatgcttatacacgatacgccgacgatatgaccttctccgcaaagggcgaaccagctgccaagattggccagttgctctgggcagccaaaaaaatcgtcgctgaagagggattcgtcttgcatcccgacaagcttaaagtgatgcgaaaaggcgacaggcacgaagtgacgggcatcgttgtgaacgagaagctgtcactcgatagaactactctgcggaagtttcgggccctgctgcatcaaatcgaacttactggactcgccaacaagacatgggggaaaggcaatatcataagctccatggaaggttacgctaattttgtggccatggtcaaaccagaacaagggaccaaactgaaaaaccagctgaacgctcttcttcagcgcaatgacatcaaggcggaggctcaggctatgtggaaaggcgaagaggttgcatctgccaaaccggcagaacacctcccagagaaagagaataagaaggataacaccagcaataacaataaaacgcccgataacgataaaccctggtggaatatactgtga

SEQ ID NO: 13227 - RNA, 1548 nt, synthetic construct
  source 1..1548: mol_type = other RNA
atggccgaaggccttacacgccagcaactgtatgataggatcagggcctctagcaaagaggagctgatattagaggagatgactagactcgggttctgggctaacaatactagccagccctccccaagcgagagtctaatccgacaagagggcgttttgcggcgtgaattggacgagctgatcaaagaaaagcagaaataccgcaacaaggagaagatgctgcaggatatgcggaaggaaagaatggctaaggcaaagctcaagagagcggagacgaagaaacgaagggaggaagagaggaaagccagagcgatagcctgggctgcggaaaaaaatcagtccattgtgtatctgggtgaggatgtgtccgccgggctgaacaaagtagtgtcaaatacggagcagctggccaaatttggccttcctgtgtggcatgacgcagttgctctggctaacgctatgggcgtcacccttggaaaactcaggtatctctctttcaatagaaaggtaggacaccatacccattaccagagatttcagattccaaagaagtctggaggtacccgcgttatctccgcccctatgccccagctgaaggctgcacagcactggatcctcgagaacatcctctacaaaattaagaacagtgaggcagcgcacgggtttgtgcccggcaagagcatagtcacaaatgcagcaccccacgtgggccaggacattgtgataaacatcgacctacgagacttcttcccttctatcgcctacaaacgggtcaagggccttttttgtaagttagggtacagtgaacaggtggccaccatcctcggattgatctgcaccgaaccagaagttgaagagatcacccttgataatcggaagtattacgttgccgccacagctcggcatctcccccaaggagcccccacttcaccagcaattacaaacctgatctgctacaagctcgacaagaggtttgaagggctgagtgccaagtatgggtacgcctatacacgctacgctgatgatatgacgttcagcgccaagggtgctgccgccgacaaagcaggccaattgctgtgggctattaaattagtcgtgaaagaggaagggtttactattcaccccgacaaactgaaggtgatgcgcaaaggagacaagcgtgaggtgaccggcatcgtagtcaacgataaactgagcctggaccgggttactctgcgcaagttcagagccttgttgcaccaaatttctaccaccgggctgtcaaataaatcgtggggaaagggtaaaaacattattagctccatcgagggttatgctaattatgtgtacatggtcaaacctgagcagggagcaaagctgaaagccacattagcggcactcctgcagagggaagacatcaaggccgcttcgcgttccatttggacaggcgaaactcttgccgccgcgcctgtcgtaacaactgtgaccgcagagactccggcatctaagccaattataaaggaaacccctccggcttcaaaggataaaccatggtgggatgtgctatga

SEQ ID NO: 13228 - RNA, 1581 nt, synthetic construct
  source 1..1581: mol_type = other RNA
atggcagaaggactaaccaggcaacaactctacgaccggatacgcgcatcctcaaaggaagaatttattttggaggagatgacaagactcggtttctgggccaagaataccagccagccttcactgcctgagactctgatccgccgtgaaggagagttgagaagagagttgaatgagctgcttgcagagaagcagaaatatcgtaataaggaaaggatgctggccgacatgcgcaaagagagaatggcaaaggcgaagctgaagcgcgcggagacaaaaaaacggaacgaggaaaagcggaaagcaagggcagctgcctgggccgagaaaaagaatctcgatattacgtatcttggcgaggaggtgagcgccggcctgaataaggttacacccgatgaagcccagttagcaaagtttggattgcctgtctttaaagacgcgaccgcgttagccgccgctatgggtgtgaccctaggtaaattgagatttctggccttcaacaggcaggtcgcaaatacgagtcactaccagcggtttgaaatccccaaaaaaagcggcggtacccgtgtgatttctgcacctatgccccagctgaaggccgcacagcactggattcttgagaacatcctgtacaagatcaacaactccgctgccgcacatggttttgtgccagggaagtccatagtaactaacgctgtcccccacgtgggacaggacattgttataaacatcgatctccgagattttttcccctctgttccttataaaagggtgaaaggcctattctgtaagcttgggtacgccgaacaggtggccactatcctcggcctcttatgcaccgaaccagaggtggatgagatcctgctggataaccgaaaatactatgtcgctaaaactgagcggcacctgccacaaggggccccaacatctccggctctcacgaatctgatttgcttcaaactggacagaagatttgagggcctggctgcaaagtacggatatgcctatactcgatatgccgacgatatgactttctctgctaagggcgatgctgccgataaagccggccaggtcctttgggctgtaaaacaggtggttaaagaggagggattcacgattcatcccgacaagctgaaggtcatgagaaggggcgataagcgggaggtgaccggcatcgtggtaaacgaaaagatcagcctcgaccgcgaaaccctgcggaagttcagggcccttctacaccagatttcgaagactgggctcgcggggaagcgatggggtaaagggcgcaatatcatatcaagtatggaaggattcgctaattacgtctacatggtgaaacctgaacagggcgctaagttgaaggagacattagccgctctgctccagagggaagacatcaaagcagaagcacataacctgtggacaacagggacaaccgaagggaccgccgccgaaaccactaccgagacacccagcgctccacaatccagtgcgccacaacatcccgagggagtgcacattgccaaggacacaccaactgctaccaacaaacctgacaagccgtggtgggacgttctgtga

SEQ ID NO: 13229 - RNA, 1578 nt, synthetic construct
  source 1..1578: mol_type = other RNA
atggctgaggggctgacgagacagcagttgtatgatcgcatacgggcatcgtcaaaagaggaatacattctcgaggagatgacaaggcttggattttgggctcagaatagttctcaacccagtctgcccgagacacttatccgaaaggaaggtgagctgcggcgagaactgaacgaattactggcggagcgacagaaatacagaaataaggagaagatgcttgccgatatgagaaaggaacgcatggccaaggccaaacaaaagcgtgccgagactaagaagagaaatgaggaagaaaggatcgctagggcagcagcctgggcggaaaaaaagcaacaggatattttgtatctcggagaagaggtgagcgccggccttaacaaagttaccccggacgaggcccaactgaccaagttcggcctgccggtattcaaagacgcaaccgcattagccaatgccatggggatcacacttggcaagctgcgttttctcgcctttaacaggaaagtgtctaactcatcccattaccagcgcttccagatccccaaaaaatctggagggacacgggttattagcgctcccatgccccagctaaaggctgctcagcactggatactggagaacatcctatacaagatcaagaatagcgatgccgcacacggtttcgtgcctggaaagtctattgtgactaacgctgccccgcatataggacaggacattgttatcaacatcgatctgcgcgattttttcccaagcattccttataagcgagtgaagggcctcttctgtaagttggggtatgcggaacaggtcgcctcgattttggggctgatctgcacggagcctgaagttgacgagattctgcttgataaccggaggtacttcgtggctaaaaccgaacgccacctaccccagggtgctcctacttcaccagcaattactaacctcatctgctttaagctggacaggcggttcgaggggcttgcagccaagtacggctacgcctatacccggtacgccgacgatatgacgttttccgcgaaagctgctgtggccgacaaggcaggccaggtcttgtgggccatcaagcaggtggtcaaagaggagggttttacaatccatcctgacaaactgaaagtcatgcgtaaaggcgacaaaagagaagtgaccggcattgtagtgaatgagaagctgagtttagacagggagacattaagacgcttccgggccttgctgcaccagatatccaaaactggtctggccgggaagtcctggggaaaggggaaaaatatcatcagctccattgagggatatgcaaactacgtatatatggtcaagccagagcagggagcaaaactgaaagccaccctcaccgcgctcctgcagagggaagacataaaagcccaagccagaagcctctggaccggcgaacaagctccagcccagcaacaagcaggccccgcttcacaggctgatactactaagacgaccgacacaacagctactacccaggcaccacctgcttccaatcctagcagttctgcgaagacagaaaaaccatggtgggatatcctctga

SEQ ID NO: 13230 - RNA, 1554 nt, synthetic construct
  source 1..1554: mol_type = other RNA
atggcagagggcctgactaggcagcagctgtatgaccggatcagagcctcctctaaggaggaatatattttggaagaaatgacccgacttggcttttgggcacggaacaccacacagccatccccttctgagacactcatacgcaaagaaggggaattaagaagggaactaaacgaacttcttgccgaaaagcagaagtatcgcaaccgggagcgcatgctggcagatatgaggaaagagcgcatgcagaaagcaaaggataaacgagcggagacaaaaaagagaaatgaagaaaagaggcgtgagaaggccgctgcttgggtggtgcagaaaaatttgaacattgtctacctgggcgaggaagtttccgccggcctgaataagaatgtcagtgacgaggcacagctaaagaagttttgtcttcctgtgtttaacgacgccgtcgccctcgctaacgctatggggataaccatcggcaaactgaggttccttgcattcaataggaaggtggccacaggtacgcactatcaaagatttgccatacccaaaaagtcaggtggtacacgggtgatcagcgcacccatgccccagttgaaagccgcgcaacattggattttggagcacatcctgtacaaaattgagaacgggaaagctgcccacggtttcgtgccaggcaagtcaattgttactaatgcggcaccgcatgttggacaagacctggtaatcaatatggacctgagagatttcttccccagtataccgtacaagcgggtaaaggggctcttttgtaagctgggatatagcgagcaggtcgccacaattttggccctgatctgcactgagcccgaggtggacgaggtgatgctggataatcgcaaatactacgtagctaaaaccgatagacatctgcctcagggggctccaactagtcctgccatcaccaatctcatttgcttcaagctagatcgaaggtttgagggcctcgccgccaaatacgggtacgtttatacgcggtacgcagatgatatgacattcagcgtcaagggagacgccgctgacaaagccggccaagtaatctgggctgtcaagcaggttgtgaaggaggagggtttcaccctccaccccgacaaattgaaagtgatgagaaagggcgacaaacgtgaagtcaccggtattgtggtcaacgagaaactgtctatagatcgcgataccctccacaaatttcgtgccctgctccaccagatctccaagaccggactcgccgggaagcattggggaaagggcaacatcatttcttcgatggaaggattcgcaaactacgtgtatatggtgaaacccgagcagggcgccaagctgaaagctactttagccacgctgcttcaacgggaagacatcaaggctgaggcgcgatcaatctggactggagaggcaacggctgtggctgcggcaccagctgacacaatcgcagatactaccgccagcgttacacctgtgaccccaaagcctgaaggaaaggcgactggggctgaaaagccatggtgggacattttatga

SEQ ID NO: 13231 - RNA, 1437 nt, synthetic construct
  source 1..1437: mol_type = other RNA
atggcccaggggctcacacggcaacagctttacgacaaaatccgcctgtcgagtaaggacgaggtgattctgcaagagatgactcgtctcggtttttggagcaaggattcagcctccgcgtcccctagcgccctgttgatcgaacgggaggatacccttcggaaagagctcaccgatttgcttaaggaaaagcagaagtatgcaaaccaggagaagctcctcgctgagatgagagctgtgagaatggagaaggccctcaaaaaaaggcaggaaacaaagctgcgcaaagaagaacagcgcaaagaaagagccgaggaatgggcagagcagaagaacaacagcatcttatacctaggggagaatgtaagtgcagggttacacaagatagtgtctgatgtgacacagctgcagaagtacggactgcctgtgtggcacgatgtcaatgccatggcagcggagatgggactgggactgggggagatccggttccttgcctttaatcggaaagtcgctcactgctcccattatcaacatttctacctgcctaagaaatcagggggaaagaggctgatatctgctccaatgcccaggctgaaagctgtgcagaactggattttgcacaacatcctgtacaggattaaaaattccgacgccgctcacgggtttgttccaggcaggtctatagtcacgaacgccacaccccatgtgggcaaagagttagtaattaacatcgatctgagggacttctttccgtctgtcgcctacaaacgggtgaagggcttattcgttaaactaggttactccgaacagttggccacaatcctgggcctgctgtgtaccgagccagacgtagatgagattgtgcttgacaatcgtaagtactatgtcgctaagactgagcgccatcttcctcagggcgctcagagctcacccgccattactaacctaatttgctataagttggacaagaggtttgagggcttggccgcacgccatgggtatagctatactcgctatgcggatgacatgactttctctgctaatggcgagggtatcgaaaaggccggacaactgatggctttcgtcaagaaagttatcaaggaggaaggttttaccatccaccccgaaaaactcagagtgatgagaaagggcgacaaacgtgaggtgaccggagtggttgtgaacgacaagctgagcatagaccgagaaacgctgcgaaagttcagagcactcttgcaccagataagcaaaaccggactcagtcaaaagcaatggggcaatggaaatatcgtttcctcgctgcagggctacgcaaactacgtggcaatggtaaaaccgggggcgggtgccaagctcaaagcaagtattaacgagcttttcaatcgaccagaaatcaaaagagaagccgtctcaattctgggcgataaaaaggaatga

SEQ ID NO: 13232 - RNA, 1533 nt, synthetic construct
  source 1..1533: mol_type = other RNA
atggctgagggactaactaggcagcagctgtatgaccgcatcaggagttcctctaaggaggaatacatcttaaatgagatggtccggctcggcttttgggcacaccagacagccactcctaccttacctgagagcatacttaaccgggaacgagagttaaggaaggaactaggcgatctgctggccgaaaaacagaagtaccgggacaaagaaagattgctggccgagatgaggaaacagcggatggaggctgccaaacagaaacgcgccgccactaagcagcgacgtgaagaagaaagacagtctcgggccgctgcttggaccttacagaaggcacatagtgtagtatatttgggggaggatgtatcagcaggcttgaataaagccgtctcagacaccgtccaactggctaagtacggattgcccctgtttcataatggagaggctctggccactgctatgggcgtgtcactggggacactccgctttctcgcctttaaccgaaacgttggctacattagccactataaacggttcaagctccccaaaaaatctggagggcacaggaccatcagcgctcctatgccacagctgaaggctgcacagcattggatacttgagcacatcctgtataaggtgcctcacagcccagccgcccatggatttgttcccgagagatcaatagtgacaaacgcagccccacacgttggacaggacatcgtcatcaacatcgacttgaaggacttcttcccctccatcgcgtacaagagagtgaagggtctgttctgcaaactggggtactccgaacaagttgcgacaattctcggtctgttgtgcacggaacccgaggtcgatgaggtcagtctggataataggacctactatgtcgccaagacagcaaggcatctacctcagggtgctccgacctcccctgccattaccaacctgatttgtttcaaactggatagacgctttgaaggcctggcggcacgtcttgggtatacatacaccagatatgccgatgacatgacgttctcgacgaaaggcgccgccgctgaaaagccagggcagcttatctggagcgtgaaacaggttgtgaaggaggagggctttaccattcaccccgacaaactcaaggtgatgcgaaaaggtgatcagcgtgctgtgactggtatcgtggtgaacgaacaactttcccttgatagggcaacattgcgcaaattcagagccctccttcaccagatctctcaaaccggcctggccaacaaaagctggggcaaggggaatataattagtagcatggagggctacgccaattacgtggccatggtgaagccagcactcggagcgcaattcaagcaaaccctggctaatctcctcgctcgcgatgacattaagcaggcggcgcgggctatgtggactggaactccagtgtctccggtacctattcctgcacccactcccacagcatcccccgcaaaggaggagacaccacctccggctggggacaagccatggtgggacgtgctgtga

SEQ ID NO: 13233 - RNA, 1506 nt, synthetic construct
  source 1..1506: mol_type = other RNA
atggccgaggggttaactcggcagcaactgtatgataggatccgggcttcaagtaaggaagaattcatacttgaggagatgacgagattggggttttggaccaaaaatacggcgatgccttctcccagcgaaatgctgataagacgcgagggcgaattgagacgggagcttaacaaattaatggaggaaaaacacaggtatcgtcatagggaacagatgctgaatgagatccgaaagcagcggatggaagccgcgaaggccaagcgagcagccactaagctgcggaatgaagagaagaggaaggaaaaagctgcaaagtgggcaattgagaaggaaaagaacattgtctacctcggcgaagaggtgagcgctgggttgaacaaggtgctgagtgacgaggctaaactgcgcgcagccggactcccaatttatcacgatggcgcagctctagccgaggccatgggtataacactgggaaaactgcgcttcctgtcttttgatcgcaaggtggctaccgtcacccactacaaacggttctacataccaaagaagagcggcggacggcgactgatttctgccccaatgccccagcttaaggccgcccagtattggatcttagagaatatcctctacaaggtaaaacacagtgatgcagcccatgggtttgttccagggaaatccatcgtcacaaatgcagctaaccacgtgggccaggatatcgtgattaatatcgatctccgtgacttcttcccgacagttgcgtataatagggtcaagggaatgttttgcaacttgggttactccgagcaggtgagcaccatcctggggctgttgtgtaccgagcctgaaatggaacccgtaaacctcgatggaaaagactaccatgtggccacatcagccagacatctacctcagggcgcaccctgcagtccagccattactaacatcatttgttataagctggaccgccgtttcgaaggactcgcgaggcgatttaattacacctacaccagatatgcagacgacatgacattttcagctaaggaggccgctgcgaacgacgctggcaagctaatttggggagtcaagcaagtggttaaggaggaggggttcgtcgtgcatcctgacaaactcaaagtgatgcgcaagggcgacaagagggaagttactggtgtggtagtcaacgagaaactgtcaatcgacagagagacacttcgcaaattcagggctctgctgcaccaaatttcggtgagcggaatcgaagggaaacagtgggggaaaggcaatatcgtgtctagcatcgagggctacataaactacgtccagatggtaaaaccggaagccggacaacagctgaaaaccaagtggcaggtgctccttggtagaactgatatcaagtcccagactagagcctcctctacgggccagattgtgattccccccgttgtgcctcctgcacaagattccggtgagacaggcgagaaaccatggtgggacgttatgtga

SEQ ID NO: 13234 - RNA, 1506 nt, synthetic construct
  source 1..1506: mol_type = other RNA
atggcagaggggttaactagacagcagctctatgacagaatcagaagttcaacgaaagaggaagtgattctcgaggaaatgacacgtctcgggttctggacccgtaaccaggcaatgcctgccccatcggaggtgcttatcaggagagaaagtgagctgcgacgggaactcaataagctggtggaggagcagcaaaggtacaggaataaggagaaaatactgagtgatttgagacagcagaggatggccgctgctaaagcaagacgcgccgagacaaagctacggaaggaggagaaacgcaaggaacgggcagcccagtgggccattgagaaggagaagaacattgtgtacctgggagaagacgtctccgcgggcctgaacaaggtggtaagcgatgaggaaaaactgaaagctgctggactgccagtttatcatgacggacttgcgttagcagccgcgatgggcatcactatcgggaagttacggtttctttccttcaaccgcaaagtggcaaacgtttcccactataagaggttctacatccccaaaaagagcgggggaaagcggcttatttccgctcccatgcctcagctgaaagccgcccagtactggattcttgagaatatcttgtacaaggtgaaactctctgaatctgcccatggcttcgtgccggggcggtctatcgtgacgaatgcaacacaccatgtcggacaggacatagtcatcaacattgatctcaaggatttcttccctaccatcgcctataagcgggtgaaaggtctgttttcaaaatttggatactcagaacaggtcgccaccatcttggctctcctgtgcaccgagccggaggtcgaacaagtagccctggacggccgtgaatatcacgtggctacaaccgagcggcatttgcctcagggtgctccatgtagcccagccatcactaatatcatttgctacaagctggataggcgcttcgagggactggctcgcagatttggctatgcatacactcgctatgcggacgatatgacttttagcgccaaggaggcagccggagataacgcaggtaaactgatttggggtgtgaaacagattgtcaaagaagaggggttcgttatacaccccgacaaactgaaagttatgagaaagggggacaaacgagaagtgacaggtgtagtggtcaacgaaaagttgtccatagaccgagaaaccctgaggaaatttcgcgccctgctacaccaaattagcgtgtcaggcctcgagggcaagcaatggggcaaggggagccttgtcaattctatcgagggctacatcaattacgtgcagatggttaagccagaagctggtcaacagttgaaggccaagtggcagctcctgctaggcagggaagacgtcaagacacaagtacgagccgctgccaccgcagcacccatattaattcctcccgttgctcctgcgcaggaagagccaaaagatggcgagaagccctggtgggatgttatgtga

SEQ ID NO: 13235 - RNA, 1509 nt, synthetic construct
  source 1..1509: mol_type = other RNA
atggctgagggccttacccgccagcagctctatgacagaattagagcctctacccgcgatgaggtgattctggaagagatgactcgtttgggcttctggaaaaaaaacaccctcatgccctccccatccgaagtgctgattcaccgggaggctgatttgactagggaactgaataaactgatggaagagaagcggcggtaccagaacagggagaagatgctcatcgagatgaggaagcaacgcatggcggccgctaaagccaaacgcgccgagacaaagctccgtaacgaggaaaagcgcaaagagaaagccgcccagtgggccgaacagaaggagaagcaaatagtctacctgggtgaggacgtgagccagggtctgaacaaaacagttagcgataccgagagattgacagccacaggccttccagtgttccatgacggggtagcccttgctgccgctatgggtatatctattggaaagttgaggtttcttgcatttaatcgtaaggtgggacacatcactcactacaaacgcttctacattcccaagaagtcaggaggcaaaagattgatttcagccccaatgcctcaactcaaggctacccaacactggatcctggagaacatactctataaagttcccaattccgacgcggctcatgggtttgtcccagggcggtcgatagtgactaatgcagtccaccatgtcgcacaggacattgtgatcaatatcgatctgagggacttcttccctaccatcgagtataagagagtgaaggggatgttctgcaagttaggctacagcgagcaggtggctacgattctggcactcctatgtaccgagcccgaagtagatcaggtggccctggacgggaaggattactatgtggcaaacacaaatcgacacctgcctcagggagccccttgtagcccagccatcactaatatcatttgcttcagactagacaggcgatttgaaggcctggcacgccgattcaactatacttatacgaggtacgcagacgacatgacattttccgcaaaggaaccggcggctgacgacgcaggcaaactgatctggggtgtgaaacaggtagttaaagaagaggggtttgttatccatcctgataagctcaaagtcatgcggaagggagacaagagggaagtaactgggatcgtggtcaatgataagctatctttagaccgggagacattacggaaatttagagctctgcttcatcagatcagtgtgagcggtcttacaggcaagcagtggggaaaggggaacatagtgtcaagtgttgaaggctacatcaactatgtcctgatggtcaaaccagaagcgggaaaacagctgaaggataagtggcggttgctcctgaatagagatgatatcaagacccaggttcgagccgctgcaacgcaatctgatgccccccctgccccctccagtagtaacgagaacaataccaccaacgacggcgaaaaaccgtggtgggatattctgtga

SEQ ID NO: 13236 - RNA, 1488 nt, synthetic construct
  source 1..1488: mol_type = other RNA
atgatgacgggcctgactcgacaagaactctacgaccgcattaggagttcaacgagagatgaggtgatcttagaggaaatgaagaggctgggcttttgggccaggtctaccggcgcaccctctctgtctgaaactcttataaggaaggaatctgagctacgccgtgagcttaacaaactgatggaggaaaaagctcggtatcggaacaaagaaaaaattctcaacgaccttcgcaagaaacggatgatggatgccaaggcaaagagagctgagacaaaacagaggaatgaagagaagagacgggaaaaagccgcagcctgggccgctgaaaaggaacgatccgtggtttatctcggagaagacgttagcgcagggctcaataaaaccttttcagatattacacgcctgagtgcggccggattgccaatcctgcatgacggagttgggttggccgcggctatgggaattactctgggaaagctcaggtttctttcctataacagaaaggtcgaagaggtgtcacactataagcggttctatctgccaaaaaaatccggcgggcgacgtctaataagtgcccctatgccccaattgaaagccgcccaatactgggtgttacagaacattctctataaaatccctggctctcagagcgcacatgggttcatccccgggaggagcatagtaaccaatgctcagcagcacgtgggtaaggatgtggtcatcaacatcgacctccgtgacttctttcctaccatcgtgtacaagagagtgaaggggatgttctgcaagctgggatacagcgagcagattgcaaccattctggccctgttatgtaccgagccggagcgggatcaagtaatgctggatggcaaagagtaccacgtcgctaacacaaaccgacacttacctcagggagccccttgcagccctgctatcaccaacattatatgttatcgcctggacaagcggtttgagggcctggcaaagaaattcaactacacttacactcgctacgcggatgacatgactttttcaacatccggagagactgctggtaaggctggccagctactgtgggcggttaagaaagtagtgaaggaggagggtttcacaatccatccagacaagctgaaagtcatgcggaagggggacaaaaaggaagttacgggcattgtcgtgaatgagaagatgagcctcgacagaaccacactgagaaagttccgcgccttgttgcaccaggtaagtgtgtccggtttcgccggcaagaagtgggggaatggtaatatcgtgtcctcgatggaaggttacatcaattacgtccagatggtcaaacccgagacaggcaaacagcttaaagacaagtttagactgctcctcaataggaaagatatcaaagcagatcttcccgaggctccgaaggaggttctgccagacacctctttgccagatcagaataacgataagccctggtgggacgtggtgtga

SEQ ID NO: 13237 - RNA, 1530 nt, synthetic construct
  source 1..1530: mol_type = other RNA
atgagcgcgggcttaacgcggcaggagctgtacgacaagattagggcttcctcaaaggaggaagtgattttggaagaaatggtccgcctgggcttctgggccaagaacgaatctgtccctagtgtgccagaaacattcattagaaaggagggggagttaaggcgcgagctgaacgaactcctttctgaacaagctaggtatcgcaataagcagcaggtgctgaccgatatgagaaaggcccgtatggccgccgcaaaagcaaaacgagccgaaaccaagaagaggaatgaagagaaacgtctccaacgcgctgcagcttggaaagaggagaaggaaaaaactatcgtctaccttggagaggatgtgtccgcagggttgaataagaccacctctgacgctgaacagctgcagaaattcggcctcccccttctaaatgatggtgctcagctggcagccgccatgggaattagcctgggcaagctgagatttctcgcgttcaatagaaaggttggaactgtaagtcactataaaagattctacctcccgaaaaaatcaggcggtaggcggttaatctccgccccaatgcctcagctcaaagctgcccaatactgggttttggagaacatcctatacaaggtaccaaattccgaatctgctcacggatttgttccgggtaaatcgattgtgacaaatgccagcaaccatgtgggccaggaggtggtgattaacatagacctcaaggacttttttcctacaatagagtacaagcgagtgaaaggcctctttatcaaactggggtattccgaacagattgccaccatcctggggcttctgtgcacggaacccgaagtcgaccaggtggcgctagacggcaaggagtacttcgtcgccaacacccccagacacttacctcagggtgcacccggtagcccagccataacaaacctcatctgttatggtctggacaaaaggttcgagggcctggcgaagcgttttggatacacttattcccggtatgcggatgacatgacttttagcacaaagggggaggccgctgataagatcgggcagctgctgtggagcgtgaagcaagttgtcaaagaggaggggttccacctgcatccagataagttgaaagtgatgaggaaaggtgacaagcgggaggttaccggcattgtggttaacgataagttgtctcttgaccgagagacactgcggaaattcagagccctcttgcatcagatcgataagactggcctggctaacaagcaatgggggaacggaaacatcatctcaagtgtcgagggctttgccaattatgtagcaatggtaaagcccgaggctggacgccagcttaaagataagatcaaagtgctgttcaatcgcgaggacataaaggcacaggctcgggcaatgatgagtggggccgcagtcaatggagccggaagcaccggatcaattgggggcgctgcagccaaggatgagcacatccctaaaaaagaagatggcaactggtgggacgtggtgtga

SEQ ID NO: 13238 - RNA, 1407 nt, synthetic construct
  source 1..1407: mol_type = other RNA
atgctattcaattatcgctactcaggcagcactcaggtctactcaaatgctacctccgccggcatctctttctcgccagatactcggcgggagccaaccttctttaacgagtacagaaacaagcaacaggtactgaccgatatgcgaaaagctagaatggcggcagccaaagcgaagcgagccgagacaaagaaacgtaatgaagaaaaaaggcagcaaagggccgcagtttgggcagaggaaaagagcaagtccattgtctacctgggagaggatgtctctgctggcttgaataagacatccagcaacacggaactcctccagagatttggactgccactcctccacgacgctgtgcaactgagcgctgccatgggtattacactgggtaaactgaggttcctggccttcgacaggaaagtaggtacgatctctcattataagaggttttatctgcccaagaaatcgggcgggaggagattaatctcagctcctatgccccagctaaaggcagcccagtactgggtcctggagaatatactctataaggtccccaatagcgaagctgcgcatgggtttgttccaggcaaatctattgtgacaaacgcaacgaatcacgtggggcaggacgtggtgattaacattgacctgaaggatttcttcccaactatcgagtataagcgtgtgaagggcctgttcataaagttggggtactccgaacagctggccaccatcctttgcttgctgtgcactgaacccgaggttgaccaggtggccctcgatggtcaggaatattttgtcgctaacaccccgcggcatcttcctcaaggagccccctcctctccagctattaccaatctcatatgttacggtctggacaagcgatttgaggggttggcaaagaaattcggatacacctacagccgctatgccgatgatatgacattttctaccaaaggagagcctgccgataaaatcggtcagttattgtggagtgtgaaacaggtggtgaaggaagagggcttccacctccaccccgacaagcttaaagtgatgcgcaaaggcggaaagcgggaggtgacaggaatcgttgtaaatgaaaagttaagtctcgaccgggatactttacgtaaatttcgggcactgctgcaccaaatcagtgtctccggccttgcgaacaaaaaatgggggaacgggaacattatcagttccattgaaggatttgctaactacgttgccatggtgaagcccgagacaggcagacttctgaaagacaagatcagacttctactgaatcgcgacgatataaagtcacaggcccgcaccttgatgactggcgcacctgccccggcaagcgagaagaaccctcctcagaagggggacgacaactggtggaatgtggtatga

SEQ ID NO: 13239 - RNA, 1503 nt, synthetic construct
  source 1..1503: mol_type = other RNA
atgaccgagcgcttgacccgacaggaaatctatgaccggattcgcgccacatctagggacgagtttatcctatcagaaatgaagaagttgggcttttggccttctgacgaagagaagccctccgtatcggaacagctgatcaaacacgagggcgagctgtccagagagttacaagaactaagccagaagcagcgaaagtttgataaccaacaagcaatgttggctgaaatgcgaaaagcccgcatggccgcggctaaaaaaaaacgcgttgagactaaggaaaagaacgaacagaagagaaaagataaagcagagcagtggaaacagcagaaacagaatgagatcgtgtatctgggcgaggacgtctcccacgagttaaacaacacagaagctgacacagctaaactggcccagtttggccttccgcactttgcagatgctctggcattagccaccgctatgaacatcagcctgggtaagctgagatttcttgcctataatcgcaaggtgtcaacaactactcattacaagaggttctatctagcgaaaaaaaccggcggcaagagactgatcagtgccccaatgcctaagctcaaagaggctcagtactggatcctggacaatatactctacaagttgaagaacacggatagcgctcacggtttcgtcccacagaggagtatcctcactaacgccagtaatcatattggccaggacgtggtaattaacatcgatctcaaagactttttcccctcaatcgattacaaacggatcaaagggctgttcgcagccctgggatatagcaaacaaatcgcctccatactggccctggtgtgtgcagaacccgatgtcgacatgattgacatagataagaagacctattacgtcgcacacacagagcggaaacttcctcagggggcccctacgtcaccagcgattaccaatctcatctgctacaagctcgatcaccggttcgaagggatcgcaaggaagtttaatttcaattacagtcggtatgcggatgacattactttttctgcaaagggagacggcaagaaactggtaggacaagtgctctgggccattcgccagattattgaatccgagggcttccagatccatccggacaagctcgccgtcatgcgtaaggggaggcaacaggaagttaccgggattgtcgtgaacgacaagccgggaatagataggaaggagctgagaaggttccgggcccttcttcatcagattgagctgaacggtaccgaggggaaatcttggagaaatggagtggatctggaaaatagcatgagaggttacgctagcttcgttgggatggttaagccagagcaaggaatccagttcaaggcccaattggaccagatattcggagtgcgtgctaaggtgaaacccgtgcctgctccagagatcaagatcgtgcctcccactattcaggatacaccacccaaacctgataacgacgaaaagccctggtgggagataatttga

SEQ ID NO: 13240 - RNA, 1503 nt, synthetic construct
  source 1..1503: mol_type = other RNA
atgtccgagaggttgactaggcaggaaatctacgatcggataagggcaacgtcacgcgacgagttcatacttagcgaaatgatcaagttgggcttttggcagtccgacgaagatcagccaaaggtgaccgaacaactgatccgccgtgaaggagagcttcatagagaattaaatgaactaacccagaaacaacgtagatacgacaaccagcaggccatgctggccgacatgcgaaaggcacgaatggaggccgcaaaaaaacggcggattgagacaaaagaaaagaacgagcagaagcgtaaggacaaagctgaacaatggaagaagacgcagcaatctacaattgtttacctcggggaggcggtgagcggcaatctgaacgacaccctggctgatacagccaagctcactcagttcggcctgccccattttgaagacgcactaggtctagctaatgccatgaacatgtctttaggaaaactgcggttcctggcctacaatcgaaaggtgtccacaacaactcactacaagcgcttctatctggcaaagaagagtgggggcaaacgcctgattagtgcgcctatgcccaagctgaaggaggctcagtactggatcctggagaacatcctttataaactcaaaagcaccgatagcgctcacgggttcgttccacagcggtctatcttaactaatgcccgaaatcacatcggccaagacgtcgtgataaacgtggacttgaaagattttttcccgagtatcgattataagcggataaagggactctttgctaaactggggtattcccagcagatcgcctctgtgcttgctttgatctgcagcgaaccagatgtcgacattgtcgatatagacaggaaaacctattatgtggcctctacagaaagaaaactgccacaaggtgctcccacctccccagccattactaacctcatctgttacaagctcgaccataggtttgagggcatcgcacaaaagtttaatttcaggtattcccgctacgccgatgacatcacatttagcgccaagggtgagggcgccaagcttgctggacaggttctgtgggccgtgaggcaggtaattgaggatgagggattccagattcacccggataagctcgccgttatgagaaagggcagtcagcacgcggtgactggaatcgtcgtcaatgagaaacctggaattgaccggaaggagctgcacagatttcgcgcattgctccatcagatagagctcaccgggaccgaaggtaaatcatggagaaacggcgtgaatctggagaactcaatgagagggtacgcaaacttcgtcactatggtaaagcccgaacaggggaacaaatttaaggctcaacttgatcgcattttcggcatcaggacaaaaagccagtcactgcctgtggtagagacgtcgattattccccccgcaattcaggcgacccctcctaaaccagagaataacgagaaaccttggtgggaaatcatttga

SEQ ID NO: 13241 - RNA, 1512 nt, synthetic construct
  source 1..1512: mol_type = other RNA
atgtccgaaagactgagcagacaacaactgtatgatcggattcgcgagacgtctaaagacgagtatattctgtccgaaatgaagaagctcggtttctggaagtcaaatgagactgagccccagatcagcgaacaacttattcagagagagggcgacctacacagagagttgaatgacttaagccaacagcagagacgatacgataaccagcaggccatgatcgccgacatgaggaaatcccggatggaagcgtccaaaaaaaagcagctcgaaactaaacaacgtaaccagcagaaacgaatcgaaaaggccgagaagtggaagacacaacagcagaatagcatcgtgtatcttggggaagaggtgtctggtggacttaactctacccagacagatatcgcaaaattgaactcattcggactgccgcactttactgatgtactggcactagcccaggccatgaagctgactctgggcaggctccgtttcttggcttacaatcgcaaagtgtctaccgtcagtcactacaaaaggttctatctgcctaagaagtccggaggaaagcgattaattagcgctcccatgcccatgctgaaagacgctcagtactggatactcgagcacatcttatataaggtcagtcccacagatctcgcccatggcttcgtacctaatcgctctattatgacaaacgcacagaaacacattggccaagatgtggtcataaacctcgacctgaaggattttttccccaccattgattacaagagggtaaagggcctgtttaataagttcggctattcagagcagattgccactattctggctctcatctgctccgagccagacgttgaattgctggaaatagatgggaagcagtactacaccgccaaatcagagagaaagcttccacagggagcacccacatcgcctgccattaccaaccttatatgttaccgcttggactgccggtttgagggcattgctaagaaatttgggtttcagtacagcaggtatgctgacgatttgacattcagcgcgaagggtgaaggtaaaaaacttgttggccagctactgtggagtgtgaaacaagtcataaccaatgaaggttttactctccatccagacaagatagccgtgatgcgcaaaggcagtcagcagaaggtgaccgggattgtcgtgaatgacaaggccgggatcgatcataaggagctgcataaattccgggcactgatccaccagatcggaaaaaccggcatcgctgggaagacgtggcggcaaggagtgaacctcgagaattccatgaggggctacgcagagttcgtgtcaatggtgaagccagagcaggggcagaaatttaagattgcgctggacaaagtttttggggttaaagtcaagagtgacaagcaagatatcccacagaacccgatcatcgagaacaaactgcctgaagagaagcctaagaacatcaacaaaaatgaagacggaaagtcttggtgggaagtgatctga

SEQ ID NO: 13242 - RNA, 1494 nt, synthetic construct
  source 1..1494: mol_type = other RNA
atgagtgagaggcttacccgtcagcagatttatgaccgcatccgtcagaccagtagggatgagtttattctgtccgaaatgaagcgactaggattttggcaaacagatgccaatcagcccaaactttctgaggccctgattgataaagagagggagctgtaccaagaactaaacgaattgtcccaaaagcagaggcgttacgctaataagcaggccatgttggctgaaatgcggaaaagcaggctggaagcctctaagaagcgcaggcaggagactaaagctaaaaacgaacagagaaggcaacagaaagctgaagcatggaaagtccaccaacagtactctattggttacctgggcgaaggggtcagcggagggctcaatcaaactcagagtaatccacagcagctcgctctgcttggactgccagacttccgcagtccattccagctggcacaggcgatgggagtatctctcgggcatctgagattcctggcatttaacagaacggtgtccaaaataagccactataagagattctacctgcctaagaagtccggtggcaaacggctcatttcagctcctatgcccctgctgaagaaggcccagtattggatcctcgaaaacatcctatataagatcccgtcaagcgaggccgcccacggctttgtccctaaaaaatcaatcctgagtaatgctcagaaccacactggccaggacattgtggtaaacatcgatctgaaggacttttttccaaccattacgtaccacagagtgaaggggttgtatcataagctcgggtatagcgagcagatcgccactatccttgcgttaatatgtaccgagcccgaggtggatattgtcaagatcgattcgcagatatactacacagccaagtccatacggaaacttcctcaaggtgcacccacctcccccgctattactaatttgatctgccatcggttggatctcagattccagggtctggcccaaaagttaggatttaactattcccggtacgctgatgacctgtcttttagcggcgcaagcgagggatccaaactcgttggtcagctgctctggtcaatccataagatcgttaaggacgaaggattcgttgtgcatccggagaagatagcagtgatgcgcaaagggacacaacagcgagtgaccggcatcattgtgaatgagaaggtgggcatcgatcgccaaatgcttcgaaagttcagagccttgatccaccacattgaacagtctggagtgcagggcaagacatggaacaatagtaaaaatctggaagcctcaatgcgcgggtacgttaacttcgtatcgatgataaagccagagcagggcgcgaagttcaagatgaaattagacgccatttttggccagaaagagaaaaccagcacatctcggcctatcaaagacattcccccgcccagcccacctttccaggactcaaacgacgacgataaagcatggtgggaggtggtctga

SEQ ID NO: 13243 - RNA, 1518 nt, synthetic construct
  source 1..1518: mol_type = other RNA
atggccgacaagcagcctacccggcaacagttatatgatcgcatcagagaatccaccaaagacgccgtggttctggaagagatgaagcgcctagggttctggcccaagggagagcaatctcccagcgttcccgaactcttaattaaccaagaagccgagctgaacaaggagtttaatcagctctttaaccagcagaggaggtatcagaataaggaggctgttctgcaggagatgcggatgaaaagaatggcagacgcaaaggcgaaacgtgaagccaacaaaaaaaagagagaacttcagcgacttgagaaggcagaagcttggaagaagaggaagactacagagatcatttatctgggcgaagatgtgagcgtcggactgaataacattgaggcaaacgtagcagccctccagaagtaccaactgccagcctttgccaatgaaacggagctggcacaagcgatgggcatcacgcttcccgatctgcgttttctggccttctcgaggaaggtgtcaaatatctcacactaccgcaaattctacctgcccaagaagtccgggggcaagcgtctgatcagtgctcctatgccacgcctgaaaaaaactcagtattgggtcttggagaacattttgaataaagtagccgtacacaccgcggtgcatggcttcactctgaaccggtcaatcctatctaacgccttaccacatgttggcaagaaagtagtccttaacattgacgttaaagactttttcccctctatccattacaagcgagtgaagggacttctccagcagttggggtacagcgagaaaatagcaactatcctcagtctgttgtgcaccgaggccgtgacggaggaggtggagatcgacggtaagaactacttcgtgcagaaaggaaatagggtgttacctcaaggggctcctacttctccggccatcacaaatattctctgctataaactcgatctgagactgcagggcctcgcagctaaacatcagtgtcagtacacccggtacgctgatgacgtgacattcagctggaatagcagtgatataaatgcccaacagatggtttggaggataaagaaaattctgtccgatgagggctttaccgtgcacccagataaaattagagtgatgcaccaaggtgcccggcaggaagtcaccgggattgtggttaatgaaaagcctgggatagacagaaataagctgcgaaaattccgcgccctattgcaccagctgcagaccaaggatgcagccgtcctgttgccgggagctgagtccccagcgaatgtggtcatcggttatgctaacttcgtgcgccaggtcaaacccgctcttggagcatttttcgctaagcagatcgaccagctctttcagacaggccggctccaatatgtggtgaaggaaacaccccctgccggtacaaacaacgacactcccccggctaaacctggcaatgacaaagaacctccaaagggggatgatgacaagccatggtggaacgtcgtctga

SEQ ID NO: 13244 - RNA, 1509 nt, synthetic construct
  source 1..1509: mol_type = other RNA
atgtttgattctaagcccacccgtcaacaactgtacgacaggatcagggaaagtagcaaggacgccgtggtactagaagaaatgaaaaggctgggcttctggtcaaaaaacgatcagtctcctactattcccgagctgcttatcaaacaagaggtcgagctgaacaaagagtttcagcagctctttaacaggcatcgccagtaccagaataaagaagcagttctgaaagagatgcggctgaagcgtatggctgaagcgaaggcaaaaagggaggctaataagaagaaacgcgagcagcagcggttcgagaaggctgaagcctggcgcaagcagaaggagactgagattatttatttgggcgaagaggtatctatcggtcttaatcacacggaatcaaatgtcgcagcactgcagaaacatcagctacctgtgtttgtcaatgagaacgagctggccttggcaatgggtgtaactctcaaagaactgagatttctcgccttcagcagaaaggtgtcgacagtgtctcattacaggaagttttacttacccaaaaagtccgggggaaaacgactcataagcgctcctatgcctagactgaagaagacgcagtattggatcctcgagaacatactcaacaaagttgccgttcatcaggccgtgcacggcttcacactgaatagatcaatcctgtccaacgcccagcttcacgtgggtaagaaggtcgttcttaacatcgacgttaaagacttcttcccctccattcacttcaaaagagtgaagggactactccagcagcttggatatgctgagaaaattgcgactatactggcgctcttatgcacagaagccgtgacggaggccgtggaaattgacgggaaggactactttgttcaaaaaggcaatcgggtgctgccacaaggggctcctacctccccagccataactaacattctttgttacaagttggacaagagattgcaaggcctggctaccaagcaccagtgccattacacccgatatgctgatgatgtgacattctcctggaacagcaatgatgtgaatgctcagcaaatggtatggcgcatcaaaaatatcctccaggacgagggtttcaccgtccacccggataaggtgcggatcatgcacaccgggacacgacaggaggtcaccggaatcgtggtgaatgaaaaattgggcatcgatcggaataagctgcgtcggttccgcgccttattgcaccaattacagacaaaggacgccgccgagctgatgcctggagtggaaagtcccgctaacgtggtgattggctatgcaaacttcgttaagatggtcaaaccagcgcagggcgccgcatttagcaaacagattgatcagctgtttcagtcaggccgcctccagtatctggtaaaggaaactccccccagtccagggaacaatggagtccctccaaccccaccgagccaacaggcagggaaggatgacgacaagccctggtggaacgtcgtctga

SEQ ID NO: 13245 - RNA, 1518 nt, synthetic construct
  source 1..1518: mol_type = other RNA
atggccgataataagttgacgagacagcagctttacgacaggatacgcgaatcaagcaaagatgccgtcgttctcgaggagatgaaacgcctgggtttctggcccaaaggagacgagagccccactatccccgagctgctgatcaacaaggaagcagccctgaacaaggagttccgagaactattcgaaaagcaccgtcagtatcagaataaggaagccgtgctaaaagagatgagattaaagagaatggcagcggcaaaggcgaagagagaggagacaaaaaaaaaaagagaacagcagcgcttcgagaaagcagcggcatggaaaaaacggaaggaaaccgaaattctctatctcggggaggacgtttccataggcctgaacaatatggcgggcaacgctgatgccttacataaacatcatctgcctgcctttgcgaacgaaaacgagcttgctgctgctatggggattgaacttaaagcactgcggttcttagcattcagtcgtaaagtgagtactgtatcacactatcgcaagttttatttgcctaagaagtctgggggaaagcggttgatcagtgctccaatgccacgtctgaagaaggtccaatactggatcctggagaacattctcaataaggtagccgtccaccaggccgtgcacggcttcacacttaatcggtcgatcatctccaacgcccaactccatgtgggcaagaaagttgtactgaaccttgatgtgaaggacttttttccgtccatacattttaaacgggtgaagggtcttctgcagcagttgggatacagcgagaagatcgctacaattctgagtctactctgcactgaggccgtgacagaagaagtggccctggacggcgggaactactttgttcagaagggaaatagggtattgccccaaggagccccgacgtctcccgcaatcaccaacatcttgtgttttaaactggacaaaaggctccagggcctggctacccgccatcaatgccactacacccgctacgccgacgatgtgaccttctcatggaactccactgacatcaatccacagcaaatggtgtggcggattaaaaagatactcgctgatgagggattcgccgtccaccccgataaaataagaatcatgcaccagggggctaggcaggaagtcactgggatcattgttaatgagaaactgggtattgacaggaacaagttgcgacaattccgagcccttctgcaccagttacaaacaaaggatgcctctgagctgatgcctggccaggtgagccctgccaatgccgtcattggctatgcaaacttcgtgaagatggtgaagccggctcagggcgccgcttttgcaaaggcaattgacaaactctttcagacaggtaggctccagtacctggtgaaggacgccccacccgtcctgaatggaaatccagctccttcccccagcccaacctctaatcctccagctaacaagggggatgataaaccttggtggaatgttaccggctga

SEQ ID NO: 13246 - RNA, 1509 nt, synthetic construct
  source 1..1509: mol_type = other RNA
atggctgataaccggaatatcagacaagagctctacgacagaatacgcgaatccagcaaggatgaggtggttttagaggaaatgaaacgtatgggcttttgggctaaagatgagaacgggcccactatccctgaattgctcatcaaaaaggaggtggagctgaacagggagctcaacaaattgtatgaagagaagcggaagtatcagaatcgagaggccgtgttgaaagagatgcgccttaaacgcatggcagaatcccggctgaagagagaggagaacaagaagaaaaaggagctggcacaccttgaaagggccgaggcctggaaaaagaaaaaggacacagccattatttacctgggtgagggagtgagtgtgggcctgaacaacaccgacaataacctggccgcactccaaaaacataacctgccagtcttcaataatgaaaatgagctggcaaacgccataggaatccccctgaaagaacttagattcctcagcttcaatcgcaaagtcagcactgtttcacattatcggaagttctacattcctaagaagtccggtggcaagcggctcatcagtgcccctatgccaagactgaaacaggtccagtattggctgctggaaaatatctttaacaagatagctgtgcatcccgcggttcacggtttcgctctgcatagatcaatcatttcaaatgcccaacctcacgtgggcaagtctgtggtagtaaatattgacgttaaagacttcttcccatctattcactataagagagtgaaagggctgttacagcagctgggctttgcagaaaaaatcgccgtgatcatggcactcctttgtacggaggctgtaacagaagaagtggagatcgatggcaggaattactttgtgcagaaagggaacagggtccttccacagggcgcccctacttctccagcgattacgaatatcctctgttacaagctggacaagcggctccagggactcgcgactcagacacagtgcagctttaccaggtacgctgatgatataacattctccttcaacaacgaaacaaccaatgctcagcagcttgtctggcgcatcaagaaagtgttagccgacgaaggatttaccgtccatcccgataaggtgaggatcatgcgcaagggagcctgccaagaagtcaccggagtggtggttaacgagaagttaggcatttctcgaaaaaaactacgtcagtttagggccgtattgcaccagctgaaaactaaagacgcagctgagctgaagtgggggcacgggaacttggcctccgcagttaccggttatgcaaactttgtcaagatgataaaacccgtgcagggggccgctctgcaaaataccattgtaacgttgctgcagaccaatcgactacagtacccgctagcggtcactagcagtaagaagaatattcagacacctcccgcccaaaacaacgacccatcggctaagaaggatgacgataagccgtggtggaatgttgtgtga

SEQ ID NO: 13247 - RNA, 1506 nt, synthetic construct
  source 1..1506: mol_type = other RNA
atggcgcacaaaaatatccgacaagaattatatgaccgaatcagggagagctccaaagacgaggttgtgttagaggagatgaagcgtatggggttttggagtaagaatgaagggggtcccgctgtgcctgaactcctgattaaaaaggagagcgagcttaataaggaactcaacaagctttacgaagaaaaacgccggtaccagaacagagaggctgtactgaaagaaatgcgccagaagcggatggccgaagcaaggcttaaacgggaagaaaacaagaaaaagaaggagcaggagaggttcaataaagctgaggcctggaaagagcagaaaaaaaaggagatcatatacttgggggaaggcgtgtccgtcggtctgaataacatagataataacttggctgccttacaaaaacacaacctccctgttttcaacaacgagaacgacctcgctaatgccatcggcatcccactgaaggagttacgtttccttagctataacagatccgtctcgaccgtgagccactatcggaagttttatattcccaagaagagcggagggaaaaggttgatctctgcccccatgcctagactaaaacaggttcagtattggatcctggaaaacatcctcaacaaggtggccgtgcatgccgcagtccatggatttgcccttcaacggtctattatttctaatgcacagccgcatgtaggaaaggaggtggtcctcaatgttgacgtcaaagacttctttcccagtattcactataagagggtgaagggcctgctgcagcatctgggatactcagagaaaatagcggtcatactggcactcctctgcacagaggcagttaccgaagaggtggccattgacggacggaactatttcgtgcagaaaggaaatcgcgtcttgccccaaggcgctcctacctcaccagccattacgaacatcctctgctaccaattggataagagactacagggcctggcaaacaaaggccagtgttcttttactcgctacgcagatgacatcaccttctcctttaatgatccaggtacaaatgcccagcagctggtttggagaatcaaaaaggtgctggcggacgaagggttcacagtccaccctgagaagattcgcatcatgcgcaaagggactcatcaggaagtaaccggtgttgtggtgaatgaaaagcttggcctgaatcgtaagcagctgagaagatttagggctgtactgcaccagctcaagacgaaggatgcggcagagctgaagtgggggaatgataacctagcttccgctgtaactggctacgcaaatttcgtgaagatggtgaagcctgctcaaggagccgccttgcagaaccgaattgccgccctgctgcaaactaataggctgcagtacgcaagtaccgtgacaggcgctcccaaaaagaaagatcccacaccaccggccaacaactcagccgatccaaagaaagaggacgacaagccatggtggaacgtggtctga

SEQ ID NO: 13248 - RNA, 1470 nt, synthetic construct
  source 1..1470: mol_type = other RNA
atgtttgataatcagcagacccgccagcagctgtatgatagaattcgtgagtctagccgcgatgaggtaattctggaggagatgaaacgcatgggtttctggggtaaaaaagatgctgagccatcactgcccgaacaactgatcaagcaggaaacagctctgagcaaagagcttaatgccctggtcgctcagcagcgcaaattccaagacaaggagaaaatgctgaaagaaatgcggatcaagaggatggccgaggccaagcagaagagggccgagaataagaaaaagcgagagcagcagcggttcgagaaagcagaagcctggaggaaaagaaggggtggagaaatcctgttcctaggcgaaatggtttcaactggcctgaacaatacaactaacaacaccgagtcgttgtccaagttcgggcttccggtctttcataatgaaaacgacctggccattgctatggggatttctttgagtgctctccgatttttagccttttcccgcaaagtttctaccgtgagtcactaccgaaagttctacctggcgaagaagtctggcgggaagaggcttatcagcgctccaatgccaaaactcaaaggagtacagtattggatcctacagaatatcctgcaaagagtgaatgtccacccctccgtacacggttttattgcaaatcactcgattctgaccaatgcccaacctcatatagggaaggaagtcgtcttgaatatcgatgtgaaggacttctttcccagcattcatttcaaacgggttaaggggatgcttcagcaactcggctacgctgaaaaaatagccacaatccttgcattgctctgcactgaagcagtaactgaagaggtggccatcgacggaaagacatacttcgtgcaaaagggcaacagagtgctccctcaaggagctcccaccagtccagcaataacaaccatactctgctataagctagataaaagactccagggcttagctgaccggcaccagtgtaactacacgagatatgccgacgacgtgacgttctccacgagccggactgagctgaacatgcagcagatggtctggcgtattaaaaagattttggcggatgaggggtttactgtgcatcctgataagatttctatcatgcgtaagggggcccaacagcaggtgaccggcatcgtggtgaaccagaaactcagtgttaaccgagagaagagacggaaactgagggctctgctccacaaccttgaaacaaagccgggcttcgttcccgtctggggacagaactcatctgcagcagccatcttgggctacgcccattttgtgaagatggtggatgcggagaaaggagaaaagtttaaggacaaggtgaggagcttaatcgcgcagggaaaactgtcactgacccagtccaacaacgaccgctccggtggcaatgcagggagcgacaagccttggtggaatgttacatga

SEQ ID NO: 13249 - RNA, 1464 nt, synthetic construct
  source 1..1464: mol_type = other RNA
atgtctgacaaccagaagacacgccaggagctgtatgatcgtatccgcgagagctccagagccgaagtgactctcgaggaaatgaagcgactgggcttctggtctaagaacgacaaggagccaaccctaccggaacagctcatcaagcaggaggccgccctagtgaaagaattgaatgcgctgaacgcccagaagcagaggttccagaacaaagaggctatgctcaaagaaatgcgaatcaagcggatggcggaagccaaaaagaagcgggaggagaacaagaaaaagcgggagcagcagcgctttgaacgagctgaggcctggaggaaaaggaagacgtctgaaatcatatacctcggagaactggtgtcaactgggctgaatgacgttacgaacgatacagccaaattatccacctacaacctgcctgtcttcaataatgagaacgatctggccgctgcaatggggatcacgctgtcacagttaaagtttctggctttttccaggaaagtgagcacagtgagccactaccggaagttttacctgagcaagaagtcgggagggaaaaggctgatctccgcccctatgcccagacttaaaaccgcgcaatattggattcttcaaaatatcctgcagcgtgtccctgctcaccctgccgttcacgggtttattcagcaacacagcattcttaccaatgccgccccccacgttggcaaagaagtagtgctgaatattgacgtgaaagacttcttccccagcatacattttaaaagggtgaagggtttactccagcaactgggatatgctgagaagttcgccgcaatcttggccctgctttgtaccgaagctgtgactgaggaaatcttcatggacggtaaaaactattttgttcagaaaggtaaccgggtcctcccacagggtgctccaacctcaccagctatcaccactctcctctgctacaagctggacaaaagactgcagggcttggcggataaacaccagtgcgcctacacaagatacgcggatgacattaccttcagtacttctaacgcacaattcaatgctcagcaaatggtctggcggattaagaaagtcttagccgatgagggctttgaggtccatcctgacaaaattgctatcatgagaaagtctaccagacagcatgtgactggaatagtcgtgaacaaaaaaatagcagtaagtcgcgataagagacgcaagtttcgcgctctacttcataatttggagacaaagccgggattcgtgccaacatggtcaaataacagtagtgggtttgcaatcctcggctatgcaaatttcatgaagatggtagaccccgtaaaggcatccaatgcattgcagaagttgcaaagccttattgcatccggcaagctgcccctgattgcagccgttaagcccgccagggagcaaggcgatgataaaccttggtggaacgtgacatga

SEQ ID NO: 13250 - RNA, 1644 nt, synthetic construct
  source 1..1644: mol_type = other RNA
atggcatatacctatcagtgtacctttcctggagctggtacctggtgtcacaatgggacgctcgtgcgtgtgtgtctggcactgataaacctggttaggggcagacacgagggagctgcgaccctctgccaaaacatgaattttttcagtccaatcatggcggacacacaccttacaaggcagcagatttatgaccggattcgagagagctctaaggatgaatatattctggaggaaatgaagcgccttggtttctggaaatccaaggaaagcagcagcatcgtaccagagttaatgatcaaaaaagagactggactccagcaagagctgaatcgcctctttgagcaaaaacggaaataccagaataaggaagccgttcttaaggaaatgagacagaaacggatggaggaggccaaacggaaacgggaagagactaaaaagaaacgcgagcaacagcgcgctgataaagccgccgcgtggcagaagaagaaggaaacatcgattctatacgctggcgagaacgtgagcgctggcatgaactcaactgagacaaagccagatatcctgcaaagatatgggttgcctttgtttaccgatgagctgagcttggcagccggccttggaataaccatcaacgagctcaggttcctgtccttctcgcgaatcgtctctaccgtaagccattacagaaagttctacctaccgaagaaatccggaggcaaacgcctgatcgctgccccaatgcagagattgaaagaagctcagtatcatgtcctggagcaagttcttaacaaggtggttctccatgatgcagccaacgggtttgtcaagaagagaagtatcgtgacaaacgcccaacagcatgtggggaagacattgctgcttaacctggacattaaggattttttcccgaccgtcgactacaagagggtcaagggcgtcttccgcaagctggggtacgcagaaaaaatttctaccctgctagccctgatatgcaccgaagctcccaccgacgaagtgtcaatagacggtaaaaactatttcgtacagaagggtaatagggttttaccacagggcgcccccacttctccagcactgacgaacatactattctacaagtgcgataagcgactgcaaggcttggctgccaagacagggtgcacatacacacgatacgccgacgatatctccttttccactaactccaataccctgaatcctcagcagttaatctggaggattaaacggatccttacagacgaaggctttacggttcaccccgagaagattcgggtgatgcgtcagagttctaaacaggaggtgacgggagtagtggtgaataaaaaactgaacatcgacaggaaaaagatgagacagtttagggcactcatccatactctcaagactaaaggacccgacgcgattcactggggacagagtcacccggcctacgctatccccggctatttgcagttcatcactatggtgaatcctgaaaaaggtgccctcctgaagaatgccctcacacctctgttagataaaattccaaagcctgtgcgtattacccagtcaccccagcccgggaagcccgatacttcaggggaagcacctaaggagggtggcgactggtggaatgtcgtgtga

SEQ ID NO: 13251 - RNA, 1524 nt, synthetic construct
  source 1..1524: mol_type = other RNA
atggccgacaacaggctgactcggcaacagatatacgatagaatccgttcttccagtaaggaaagctacatcctgtccgagatgaagaggttggggttctggtcagtgaaagacggtgcatcggcagtgagcgaggcactgataaataaggaggcaagtctggaaaaagagttaaaccagctcttggcccagaaccgcaaatttaataatcgcgaggcggtactgaaagagatgagactgaaaagaatggcagaagcccggcagaagcgtgaggaaaataagaagaagcgagagcagaaacgatacgaaaaagctgaagcctggcgagcccggaaacagcaggagatcttatatctgggcgagggagtgagtgccgggctacattatacggacaccaacgaagccttactctgcgaaaaagagcttccggttatcaccaccgagaagcaactcgctgagtacatggggatcgcgctgcaggagctgcactttctcgctttcagtaggcgggtttccaccgtaaaccactaccgcaagttctatcttcccaaaaagagcggagggaagcgcttgatcgctgcgcccatgccccgtctcaaaaactcccagtactggatccttaacaatatacttgctcgcattcctgtccacgctgccgcgaacggctttgtcgcagataaatcaatcgtgaccaatgccagaccacatctcgataaagaggtcgttatcaatatcgatgtcaaggacttctttccttctattcactttgctagagtgaagggtgtcttcgtgaagctgggttattcagagaagatagccactgtgctttccctgttgtgtaccgaaccagtgacacaagagatctcaattgatggacggaattacttcgtacagaaaggtcagagggtccttcctcaaggcgcccctggaagccctgtgattacgaatattctgtgccaccacctcgaccagaggatgcaaggggtggccgccaagcatcagtatacttatactcggtatgccgatgacattacattttctggcagcgaaaacaccctacatgcacaggctctgctatggcgaatcaagaagatcgttcaagaggagggattcacagtccaccccgacaaagttcatgtcatgaggaaaggcgcaagacaagaagtgacaggggttgttgtgaacaagcagctgggcatccagagagagaagctgaggcagttccgcgccctgctgcacaacattaaggtgaagggatgggaaaatgcacagtgggggaacggcaatattattagctctattctcggctacataaactacattaagatgatcgatccggcaaaggccgctgtgttccagcagcaagtgaatgtgttgtttcagcagcccggtttttctgctattcagcagcaagtccagccacaagcctccgcggctgctacaacacatgacccaaccactaatccccagcctgccccaggcaaaggaactgaaggcgacgaaaactggtggaaagtggtatga

SEQ ID NO: 13252 - RNA, 1515 nt, synthetic construct
  source 1..1515: mol_type = other RNA
atggccgataatagactcacgagacaacagatctatgaccgcatacgttctagctcaaaggaagagtacgtgagatcagaaatgttacggctcggcttttggaccgctaaatctggcaacactcagatcactgaggtgctgcttcaacaggaggcaaccctgacgaaggagcttaatcagcttatgcaagagcgaactaggtatcggaataaggaggccgttctgaaagaaatgcgcatgaagcgaatggcggaggccaggaggaagcgggaagaaactaaacagaaaagggagttgcagcggctggagaaagccgaggcatggaggaagcgtaaacaggacgagattgtctatctgggagagacagtcagtgctggcctccagcccggacagagtaacgaggcccttctcctgcagcggggtctacccgtatttcatactgagaaggagttggccgcagccgctggagtcgatctgcgagagctccgatttttgtgttaccaccgcaaagtgagtgcagttaaccactacagaaagtttctgcttccaaagaagtccggtgggcataggctcatatcggcgccaatgccacgcatcaagaaggtgcaatactgggtgttacaccagatcctgaataaagtgccgttgcatgccgcagccaacgggtttgcaaccggtaggtccattgtgaccaatgctcagccacacgtggggcgtcaggtagtgattaacgcagacgtgaaggatttcttccctagcatccacttcaaaagggtaaaaggcgtgttcgaaaaactgggctataatgaacggatcgctaccatcttggctctgctctgtactgaagcagtcacacaggaagtagtcattgacggcaagacatacttcgtacagaaaggatgccgcgttctgcctcagggagcccctggttcacccgcaatcaccaacatactatgctaccagttagataagcggctgcagggggtggctggcaaacaccagtaccaatatactagatacgccgacgacatcagcttttccggatccgagacaacactggctgctgaggccatggtctggagaattcgcaaaattctgcaggaagaagggttcaccgtgcatccagataaggtgcgaattatgagaaagggcgcccggcaggaggttacaggaattgttgtgaataagcaacccggtatccccagggagaagctgcgcagatttcgcgccctcctgcatcggatcaaaaccaagggctgggaaggggtccaatggggcgaaggcaatattgtgagcgcaatgcttgggtatgtgaacttcatcaagatggtcgaccccgttaaagccgccagattcgaaaaagagatagccttactagggcagctccctgggttcacggaagcgcagaagcaagtgcctttgacacccgcgccggaggctctgcaaaagccttctgacacaaaccctccatctgctccgaacaccggcgaaggagattggtggaaagttgtctga

SEQ ID NO: 13253 - RNA, 1524 nt, synthetic construct
  source 1..1524: mol_type = other RNA
atggctgataacagactgacccggcagcaaatttatgaccgtataagggaaacctcccgcgacgatttcatcctggaagaaatgaaaaggttggggttttggggaaggggccaagacgaccccagtgtgtcagagctcctgataaagaaagaagtcgagctaggaaaagaactcgataagctgctagccgagcagcggaaatatgataacaagcaggcagttctgaaggagatgcgaatgaagcggatggcagaagccaagcaaaaacgggccgacaataaaaagaaacgtgaagagcagcgctttaataaagctgaggcctggcgacagaaaaaggaaactgagattttctacctgggccaaggagtctcaggcggtttaaaccacactgagaacaatgtggttctcctccagcaaaagggcctgccggtgttttatgacgagcaagagctcgcatcagccgctggaatcgaacttaaagagctcaaatttctgagcttcagccgctccgtctctacggtgaaccactaccgaaaattctatctgccaaagaaatctggggggaaaagactgataagtgcccccatgcctagactcaagaagttacagtactggatcctgcacaatgtgctgcaaaaggtgacattgcacacagccgtacacggattcacaggcaagagatccattgttactaatgcacagcagcacattgcgaaggacgtggtcatcaacgccgatgtgaaagatttcttccctagcattcatataaagcgggtcaagggtatttttaaggcattgggatatagcgagaaaacagccactattctcgccctggtttgcactgagccagtcaccgaggaggtgatgatcgacggaaaaaactactttatccagaaaggcgaaagagtacttccacagggcgcaccaacctccccagctcttacgaacatcatctgttaccatttggataaacgcctgcaaggcgtggcgagcaagcatcagtacacatacacccgctatgctgatgacatcaccttctctgctactggccagcagttgaaggaggaggcactgctgtggagggtgaagaagattctgaaggaagaggggtttaatatccaccctgacaagatccgcatcatgcataaaggtacaaggcaggaggtgacaggggtagtggtgaataaaaagttatccctttcgaggcagaaactgagaaattttcgggccatgcttcacaatttaaagactaagggttacgcggatataaaaaccgggaataaggacattgcagctgttattctcgggtatctgaattacatcaagatgatcgatcccgtaaaggcgctccagtttcagcaacaggtcaaccagctattccagcagcccagtttccatcagcttttgaaggaacaggctgccgctcgtgctgccgttaagcctgtggaaaaaagcgccatgccctcaccggaatctaccacgcctcagcagggcaacggtaactggtggaacgtcaccgagtga

SEQ ID NO: 13254 - RNA, 1527 nt, synthetic construct
  source 1..1527: mol_type = other RNA
atggcagacaataggctcacacgacagcagatttatgatcgcatcagagagtccagcaaagaggaatacatactagaagacatgaagcggctggggttctggcagcgcaatgaagaagggccctccgtgcccgaactgttgatcaaacgtgagagtactttgaacaaagaacttaactctctgttggctgagaagagaaaatatcaaaacaaggaggccgtgctaaaagagatgcggatgaagagaatggctgaggctaagcaaaaaagggaggagaataaaaagaagcgagagcagcagcgctatgaaaaagcgcaagcgtggcgggctaagagagagactgaaatattcttcctgggggaaggcgtttccgcaggcctgcattatacagagtctaatctcgaagagttacagaagaaagcgctgcctgtttttgagaatgagatgcagcttgcaaacgcgatgggcattgccctcaaggaactgtcctttctgagctatagcaggagagtgtccgcagtctctcactaccagaagttttacctgcccaaaaagtcttcaggaaaacgcctcatttcagccccaatgccacgcttgaagaaggcccagcactggatcctacagcatatcttgtataaagtgcccgtccatgcccaagccaatggctttgtacctggcaaatctattgtttcaaatgcaaccccgcacatcggaaagaacgtggtggtgaatgccgacgtgaaggacttttttccctcaattaccttcaaacgggtgaaagctctctttgggaagctcggttacgccgacaaaattgcaacgatcctttcgctcctctgcacagaaagtgttaccgaagaggttatgctggatggtaagaagtatttcgtgcagaagggagagagggttctgccacagggagctcctaccagccctgccgtcacaaacatcttatgcttccggctggataaacgcctctccggcgtagcaaagaagttcggatgtggttacaccagatacgccgatgatattaccttctccggcacactgaacaacagtgacgcgagcaagattgtatggcacatcaagaaaatattgagtgaggagggcttaacgatccatccagacaagattcgagtaatgcagaaatcagagaggcaagaggtcactggggtggtcgtgaacaggcagctgtcggtcagtcgtgaaaagcttaggaacttcagagcacttctgcaccagctgaaaaaaaacgggcatgaaaatgccaagtggtctgagggaagccttagcaacgctatcgccggttacgctagctttattcgaatggtgaacccagctaaggccgaaaaattcatcaaggagatcagcgatatccgtcaaagtcaaacctggcagcacctgttactctccgaggccgccgcaatagctaagaaactgaatcagcagactctgccttctactccggctcctccacccgccaataataaccggaaggaagacggcgaatggtacaatgtcgtgtga

SEQ ID NO: 13255 - RNA, 1209 nt, synthetic construct
  source 1..1209: mol_type = other RNA
atggcagataatcaccttacccgccaacagatttacgaccgcattcgagaaagctctcgagatgagtacatactggaagagatgaaaaggctgggattctggaacaaaaacgagagctcgcccaccctacccgagctccttatcaagaaagaaagcaatcttcataaggaactgaacgcactcctggcggaaaagcagaagtttcagaatagggaggccctgttaaaggagatgaggctgaaacggatggaagccactaagttgaagcgggaggacaataagaagaaaaaggagaaggagcgcttcgaaaaaacaaccgcttggcggaagaagcaggagactgagattttttatctgggggaggaggtcagtgcaggccttcactatgctgagaataaccaccctctcctcaatcagaaagccttacctgtttttgagaacgagcagcaactggccctggccatgaactgtacggtcaaagagttggcgtttttggccttttctcgcagagtgtccgagttaacacactaccagaaattttatctgccaaagaaatcagggggcaagagactaatttccgccccaatgccgcgtctgaagaaagctcagcactggattttgcagactatactgtacaaaatccccctgcatactagtgctaatggttttgtgccgacaaaatcaatagtgagtaatgcatggcctcataccgggaagcaggtagtcatcaacatggatatcaaagacttcttcccctcaatctcttttaggagagtgcgcgcactcttcaaaaaccttggctattccgacaaaatcgctacaatcctggccctgctgtgcacggaagcaccaaccgagcaggttgaactcgatgggaagaagtacttcgtccaaaaaggtgaaagagtactccctcagggagcgccctcctcaccagctatcaccaatattctttgctaccggctcgacaagcggctagtgggagttgctaacaaattcaacggcacatataccaggtacgccgatgacataacaatttctggcagcttcgcccataacactgccaccaggatcgtgtggcaaatcaagaagatactgagcgaagaaggattcatcttgcaccctgagaagattcgtattatgcagcaatcccagagacaggaagtgactggtatcgtcgtgaatcaagaaatgagcgtgaaccgatga

SEQ ID NO: 13256 - RNA, 1443 nt, synthetic construct
  source 1..1443: mol_type = other RNA
atgcagagactaggattctggcctaagaacgataacgctcccacactgccagagcagcttattaaaaaagagggcgagctgcaacgcgagctctcaacactcctccaggaaaaacgtaagttcgaggataaagaggccatgctcgcgcagatgagaaagaagaggatggaggaggcaaagaagaagcgagaacaaacaaagcagaagagggaagctaaacgtatagagaaagccgaaaagtggaaggcatctaaagagaaagagatcatttatctcggggaaaaagttagcggcggattaaacgccaaggaaagcgatgtcccagccttagactccaagggtctgccgactttcaccgaagagacagagctggctcaggccatgggaataacgatttcacagctgaggttcttctgctaccaccggtcagtcgctaccaccactcactacaagcgcttcggcatcaagaagaagtctggaggcatgagaatcattagcgcacctatgcccaggctgaaagccgcccagtattgggtgtttcacaatgtactgaacaaactccgacaccatgaagcagcccacgggtttgtgcgggaacgttccatcttgtcgaacgccaaagaacatctgaataaagaggtggtggttaatatcgacctcaaagactttttcccttccatacatttcaaacgggtgaagggcttgtttcataaactgggctacagcgaaaagatcgctacgatcttttctctgctatgtactgaacccgacgtggaagaggtcgagctggatgcaaagacctatttcgtcgccaaggggaaaagagctcttcctcagggagcgccaacaagccccgccattaccaacctgctttgttacaaacttgactgccgattgcatggagtcgcgaaagctatggggctgtcttacaccaggtacgcagacgacatgactttttcaggcgatggcgaggcagcagccaaggttcagcagctactttggcgcttgcatagaatcattaaagacgagggctttacaatccatccaaagaagattcacgtgatgcgcaaaggtgccagacaggaagtgaccgggatagtcgtaaataagcaaccaggaattaaccggcagaccctgcatcggtttcgcgccttactgaataagatcgagaagaaggggatcgagggtaagaggtggcgcggagggaatgtcatcgcggaaatagcaggttatgccgagttcgtgagtatggttaaacctgctcagggcgtaaaatttaaggaccaagtgaggagaattctgcagcagcccgacgtgattgaacacctccaaaaagctcctttgcaagctgtgcacgcctcccacgctagtaaaccgatcaaggatactcacagtaacagcgatcggaatgagtccagtaagccctggtgggatgttctgtga

SEQ ID NO: 13257 - RNA, 1566 nt, synthetic construct
  source 1..1566: mol_type = other RNA
atgaatcagagtcagcccgcaactcggcaagaactgtatgagcggataagggaatcgagcaaaaacgaggtcatccgcagcgagatggaacgtttgggtttctggaatcccaatgctccagaacccaaggtcgcagatgactggctgaaagaatacgacaggctcaccaaagagttgagggagttgcggggaaaacaagagcggatgaataacagagacaccttactggccgacattagaaagaaaagaatggccgagtcacgcgagcgccagaaagagacaaagcttaggcgagaacgggagaggatagaaaaagcggagcgttggaagaaactaaaggaagaggacatcctataccttggggaggatgtgtccactcagctgaataagaaagaacccagaccagatctcctggccgaaagacagctcccaaactttgtgaacgccaaggcactcgctgcatctatggaagttccgatcggagagctgaagtttctcgcctataatcgtaaggtgagtaaggtatctcactacaaacgcttcttcatgaaaaagaagtcaggcgggcagaggttaatcagcgcccccatgccacggctgaaacgcttacagtactggatcctacactccatattgtacaagatacctgtccacgaatgtgtgcatggctttgtccctgaccgatccattaagaccaatgctgccccacacgttggccaggatgtggtggtgaacattgaccttaaagatttcttccctactgtctctcagtcccgggttcagggcctctttaacgctctgggctacagtaatcaaattagcacaatctttagccttctctgcacagagccggaggtgcagcaggccaaactggatggagaatcatggtttattcatcaaggagagcgccatctgcctcagggtgcaccaacgtcccctgcaatcaccaatctgatttgctatcgcctggactgccgaatcaagggggcgactgacaagctggggttcaattacacacgatatgctgacgacattacgctcagtgccagtggggaagccgtgagcgatatctgtagactgatctggcaggtgagaaagatcatcgaggaggagggctttaatttccaccccgataagtttagggtaatgcggaaaggtcgcaggcaggaagttaccggcttggtggtaaatgagacactttctatcaacagaaacaccctgagacgtttccgcgccctcctgcatcagattgagaaatcaggcatcgagggcaagtcgtggcaagggaactccgtcaaccttctgaacagcattcaggggtatgctgactttgtcgccatggtgcgacctgaaaagggtcagctgctgcaagctcgggtaaaggcaattaggatggtgcagaaacataagaggagagccaagcccgaggctaagcctaaaatacctgctccgctggttccaattaacaaagcgaacgaactttctcacgcgggatcagatcaaaccccaaagtctagctccggacccaagcccttctggaagaaactcttattctggttggattga

SEQ ID NO: 13258 - RNA, 1548 nt, synthetic construct
  source 1..1548: mol_type = other RNA
atggccgacccggacccgtcccagccttttaggcccctctcccgccaggagatatacgatgcgatcaaggcaaccagcaagcaggagttcattctggatgatatgatcaggttgggattctggatgcccgagcagggcaatcctgccgttccagacgcaataattcgacgcagaggagaactgaatagagaacttaacgagctactgcataagcaacggcggttcgagaatcgggaggctgctcttgcggcgcaccggaaaaaacgcatggccgagagtaaggttaggcagaaggaaacaaaggaaaggaatgctcgactgcggcaggaaaaagcagagcggtggagggagagaaagcagcgcgagattttgtatctgggtgaaggcgtctccgggggtctgtctgagctacagtctgtgcccgagcggctgtcacggcatcaacttccagatttcgcaaacgctgaaactctcgcgtcggcgatgggtattacactcggggagctgagttttttagccttccaccgcgaggtgtcaaaaacaacccactatagacgctttgccattcctaaaaagagtggcggcgagagaatcatcagcgcccctatgcctaggctgaaggctgctcagacctggatcctcgagaacttgctccagaaggtgagcgtgcacgatgccgcccacggctttgtacccgacaggagcattattacgaatgcctccaatcatataggcagagacatagttatcaacgtcgacctccaaaacttcttcccaagcgtgactcaagccagaacaaaaggcttgtttaagagtctgggatatagcgaacacatcgccaccatcttgagcctgttatgtacagagcctgagatggatactctggagctggacggtcagatttggcacgtggccatgggggggcgttttctgcctcaaggctctcccgcatctcccgccattacaaacatcttatgcagaaagtttgacgcacgcctttctggaatggcccggaaactaggcttcacttacacgcgttacgccgacgacgtcaccttctcagcaggcggagaaactgtggaaaagtataaaaccctcctgtggcgcgccaaggctattatccatgaagaaggcttcatcgtccatccggataagctgaggataatgcgccttgggtcacgacaagaggtgaccgggctgatagtgaacaaggctattggaattccacgagaagacctgcgtaggttccgagctgttctgcggcaggtagaacaggatggtccagcaggaaaaaggtggcacggctccgggcataatatccttgctgtcctcggagggtacgtaaactttatccatatggtgacccccgaaaaagctgcccccttacgtgagcgagtgcttgcactccagtccaaacacggatggcagcgggagatcagacacagacctagagccctcgcaccagaagctgggaatccagccgcaaggtctgctgatggtggcgggttctttaaatcgatcttgcgcaaactgggctttggaaagtga

SEQ ID NO: 13259 - RNA, 1503 nt, synthetic construct
  source 1..1503: mol_type = other RNA
atgagaaatagcacagagcggaggcaggagatctacgataagatcaaagcatcatctaagcaggagtatatcttgagcgaaatgaggcgcctcggcttttggaatgaagaggatctggactttgaagctgtcaatttgttctttaaacaggaatctgagctgtctgcaaaactccagaagcttctgagagaaaagcgtgtcatcgaagatcctgaagctttcttggccaagaaacaccaagagcggaaaatcgcttctaaagcttctcagaaagagactaaggaacgcagagagaagaccagattggagaaagccgaaaagtggagggtgagcaaagcaaaggatattgtgtacttgggagagaattactctcaccagctcaatgacaaaacttccgatgcatcacggctgaaagcgcaatccctccccgtgatgcatcacgctgaagacttagcactggccatgaagattagcatcggggagctcagatttctgtcatacagcaggaagaacagcaaaatctctcactacaaacgattccaggtcgccaaaaagacggggggatatcgcctaatttccgcaccaatgcctaagctgaaaaaaactcagcactggattttagaaaacatactgaacaacgtgcctgtacatgagaatgcccacggctgcgtgattggcaagtcaatcaaaacgaacgccattccccacgtgggtaaagacgttgttatcaatcaggacttcaaaaacttcttcccatccgtcacttacaacagaatcaaaggtgtctttaagtcccttgggtactcgaaccaggttgctacaattctgtctttattgtgcagtgaacccaagatccttgacataagtctcctgggagaggattattacgctcagcaaggagagcgatttctaccgcagggcagcccatgttcgcctgcaattacaaacatcctatgtaaaaagctggatcatcgcctttccggactggctaagaagtatggctttgaatacacccggtacgttgatgatattaccttctcatccaacaacaacaatttcaagaagattacccccctccttaagtattcccgttacatagtgaatagcgagaacttcaaactccatccagagaaactgcgagttatgaaacggaatgccaagcaggaagtcaccggggtggtagtgaacgaaaaagcgaacatcagcaagaaaagtctgaagaggtttcgtaccctgctgtttcaaatcgagaaggacggaatagagggtaagttctggaacaagagtgggaacgtgcttgcccaaatagacgggtacgccaatttcatttatcagatagaccaggacaagggcgtagtgtataagaagagggtcaatgccatcctggagacatataagtataaggagaatcatcgcagtaagtatatctcaaataccaataagggctccgcgagttcatttggccgcttcgtgaaaaaaattgccagcctctttcggaagtga

SEQ ID NO: 13260 - RNA, 1521 nt, synthetic construct
  source 1..1521: mol_type = other RNA
atgaggaacaattcaacagaacgccggcaggagatttatgataagatcaaggcctccagtaagcaggagtacatcctgagcgagatgaagcggctgggcttctggaatgaaggcgagttggacttcaaagcagtcaatactttctttaatgaggagcgggaactaagccagaagttacagaaactcctgaaggagaaaaaagtgattgaagatcctgaggcttttcttgccaagaaacaccaggaaaggaaactcgcctcaaaacaatcgcagaaagctactaaggaacgacgggagaaagagagactggaaaagaccgagagatggcgggttagtaaggaaaaggacataatctatctgggcgagaattactcccaccaactgaacgaacagatatctaataccgagcgacttaagagcaagaacctccctgtactgcataccgctgaggatctcgccaaggctatgaacatatccatcggagaactgagattcctttcattctccagaaagaacagtaagatttctcactacaaacgtttccagatggccaagaaaagcggcggataccgcctgatcagtgctcccatgcccaaattgaaaaaagctcaacattgggtgctggagtcagtactgaacatcgtgtctgtccatagcaatgcccacggttgcgtgattggacgcagcattaagacaaacgcagagccccacgtcggaaaggccgtcgtgatcaaccaggactttaaaaacttcttcccctctgtgacatatgcacgaattaaaggtgtatttcttgcgctggggtactccaaccaggtggctaccatttttagcttgctgtgcagcgaacctaagattctggatgtttcactattgggcgaagactattatgcgcaacgtggggaacgctttcttcctcagggcgccccaacttctcccgccattacgaacatattatgtgagaagctcgactttcgcctgaccggcctggcgaataaatacggcttcacatatactaggtatgtggacgacatcacgttctccgggacccatgactctttcgataaaatcacaccgctcctcaagtacagtcgttacgtagttaattccgagaactttaatcttcatcctgaaaagttgaggatcatgaagaggaatgcaaaacaagaggttacaggcgtggtggtcaacgaaaagaccaatatcccaaaaggggatctgaagaggtttcgggccctcttatttcagattgagaaggacggaattgaaggtaaatattggaccaaggggggaaatgtgctggcacagatagatggatatgctaattacatcttccagattgagccggagaagggggtcctatacaaaaagagagtgaatgtcatcttggagaagtataactacaaggaaaagcacaaagcaacttacgtgccaaaggtgctcgataaaagagagaaagccaacaagccagactccgttgggggtatctttaacaaaatcatgtcgttctttcgcaaatga

SEQ ID NO: 13261 - RNA, 1503 nt, synthetic construct
  source 1..1503: mol_type = other RNA
atgaaaaactccactgagaggcgacaggaaatctacgacaagataaaagcatcaagcaagcaggaatacatactctctgaaatgaagcggttggggttttggaatcaggaggagctggacttcgagtctgtgaacgcatttttcaaggaggagacagagttatctaagaaactgcaaggccttctcaaagaaaaaagggtgattgaagacccagaagcttttttggctaaaaagcatcaggaacggaagcttgctagcaagcagtcacagaaggaaaccaaggaaagaagagagaaggaacgactcgagaaagccgccaggtggaaaactagcaaggagaaagacatagtgtacctcggaagcgggtactccaacaatctcaataagaaggaatccgatgtgacacggctgaaaacacagcaattgccggttctcaatactgctgaggatcttgcaagtgccctggggatcacggtcggagagctacgctttctgagtttcacgcggaagaatagcaagatttcccactataaacggtttcagatgccaaagaaatcagggggctacagactgatttccgcacctatgcctaagctgaaaaaggctcagcattggatcctggagcatatcttaaataatgtcaaggtgcacgataacgcccacggctgcgtgatcggaaaatctattaagaccaatgcagtgcctcatatcggtaaagccgtcgtcgttaaccaggacttcaaaaattttttccccagcgtgacctataaccgtatcaagggggtctttatgagtttaggttacagtaaccaggttgcaaccatcctagcgcttctttgttcagagcccaagatcctcgatgtttcactgctgggcgaggactactatgcccaacgtggagagagatttcttccgcagggtagcccctgctcgcctgctattaccaacgtgttgtgtaggaaactcgatttccgcttgtccggcctggcgaaaaagtacgactttgactataccaggtatgtagatgatattaccttcagcggagacaaaaaatccctgcccaaaattacagctctgctgaagtatagtggcaaaatagtccgcgacgagaactttatgctccacccagaaaagctgagagtgatgaagaggaacgctaagcaagaagtgactggcgtggtggtcaacgagaaggccaatattgccaagacttctctgaagcgattccgcgccctcctgcacctgattgaaaaggaggggatcgaaggcaaatattggaataaggggggcaatgtattggcccagatcgatggttatgcaaacttcatctttcagattgatgaggttaagggtgcgatctataaggagcgcgtaaatgccatactggtaaaatacaactacaaggaggaacacatcaaacaatacgccccaaacgcgaaaaaaggaacatcgggattactatctggcttcattaaaaaggtgtcctctttcttcaagaaatga

SEQ ID NO: 13262 - RNA, 1503 nt, synthetic construct
  source 1..1503: mol_type = other RNA
atgaggaattcaactgagcgccgccaggaaatctatgataaaattaagggctcttccaaacaggagtacattctctctgagatgaaacggctgggattttggaacgagggcgatgtggactttgaagctgccaacgcctactttaaggaggaagccgagcttagtaaaaagttgcaagaacttctgaaggagaaaaggatcgtcggggatccagacgcgtttatcgccaggaaacacaaggagagaaagctcgcctccaagcaatcccagaaggagacaaaggagagacgggagaaagaacgcttagaaaaagcaaaacggtggaaagcaatcaaagaaaaagacatcatctacctgggaacaagctacagtaataacctcaacaagaaaatcagcaacgtggagaagcttcgaagccagaatttacccgtgttacagaccgctttggacctggcatcagctatgaatataaccattggcgaactccgctttctggcattttcaaggaaaaatagcaaaaccaaccattacaagagattcaaggtgcctaaaaaaacaggcgggtatcgccttattagtgcccccatgcccaagctcaagagagcccaacattggattctagaacacatcttgaatcatgtggtcattcacaagaacgctcacggaggtgttttgaagaaaagcattaagtcgaatgcgattccacacgtcgaaaaggccgtcgtgatcaaccaggactttaagaatttcttcccaacagtgacgttcaatagaatcaaaggagtcttcgtttcgtttgggtacagctctcaagtatccactatccttgcgctcctgtgctccgagcctaaaattcttgatgtggagctgctgggggaaaagtatttcgcccaacgaggagagaggtttctgcctcaggggagcccctgttcacctgctattacaaacattctatgcaagaagctggactaccgtctcaccggtctggccaaaaagtacggcttcgactacacccgatatgtggatgacataactttctcaggcgataagcattccttatctaagatcaccccactgctgaagtatagtcggtttatcgttaacgaggaaaatttcaaactgcatccggaaaaactgagagtcatgaaaaggaactctaagcaggaagtgaccggagttgttgtaaacgaaaaaccgaacatatcaaagaagagcctgaaacgttttaaggccctcctgtttcagatagagaaagacggcatagaggggaaattctggaacaagggtggaaatgtcttggcacagatcgatggctatgctaacttcatatatcagattgactctgagaagggtatgctctacaagaagcgggtgaaggcaatcctggattcctataattacaaggagaatcaccggaaagcttatgtattgaattcccagaagactgggattagcgtgggccgtctattcaagaaaatcacgagtttcttcaagaaatcttga

SEQ ID NO: 13263 - RNA, 1509 nt, synthetic construct
  source 1..1509: mol_type = other RNA
atgacggatagcaaagaaaggcgtcaggctatttacgacaaaatcaaggagtcttccaagaacgaattcattttatccgagatgaaacgcttgggtttttggtctgatgaaaacgtagacttcggagcggtcacaaagttcttcaaagacgagggggaactgtctaagaagatacaggagaagctccgtgataaaaacatcctggacaatcctgaagtctttatagcccaaaagcataaagagcggaaactagcctcgaagcagagacagaaagaaaccaaagagaagagggaaaaggtgaggcaggagaaggccgccaagtggcaagagtccaagaaatcagacataatctatcttggggaccagtactcccaccagcttaatcagaagctctcgctcgtggaacgcctgaaaagtcagggactaccagtgattcaaacagcagccgaattggccaagaacatgggagtgtcagtaggtgagctgcggtttctgacttactcacgcaagaacagcaaaatcagtcactataagcgatttaaggtgccaaagaaaagcggcggttatagactcatttctgctcctatgccccgcctgaagcaggctcaaacttggatccttgaggaagttctgaataaggttaaggtgcatgagagcgcgcatggctgcgtcacagggaaatctataaaaacaaacgccgagccacatgtggctaaagcagttgtcatcaatcaggatgtgaagaactttttcccctccattacctataacagaattaaaggcgtgttcctgtctctgggctattcacaccaggtcgccgtgatcttcgccctgctctgtagcgagccaaaaatagtggacattgatctcctcggtgaagattacttcgcgcagaagggggaaagatttttgccccagggaagcccttgtagtcccgctatcaccaatatcctgtgccgcaggctggattttcggctgactggcctggctaagaaatataaccttagctacacccgatacgtggatgatttgaccttcagctctactgagtaccctgaccactccgtagtgaccaaagtgctgaaatactcacgcctcattgtcaaggacgaaaattttaggctccacccggacaagctgagggtgatgaagaaaggagcccggcaagaggttacgggcgtggtcgtcaatgagaaacctaacgttagtaagaagacactgaagagatttcgtgcactattgtttcagatcgaaaaggatggaatcgaggggaaacagtggaacagaccagggaatgtattagcacaaattgacggcttcgctaatttcatttaccagatcaatcccgagaagggcgcacggtataaagcacaggttgccgttatcttagtgacacacaactacaaggagcttcataaaaaggctttcccccctaaaagtaacccgaccaacgagactccacaaaatcgattgtggtcccgggtcaagtccttctttaagaaaaattga

SEQ ID NO: 13264 - RNA, 1512 nt, synthetic construct
  source 1..1512: mol_type = other RNA
atgaaaaactcacaggaacgccggcaggagatttacgacaagatcaaggagagctcaaagcaggagtacattctcagcgagatgaagagactgggattctgggatgatcagcaggtggactttaaggaagcggaggccttctttaagttagaatcaggcttgagcaaagaactccaagttttgatcaaagagaagaacctgatcgacgaccccgccgctttcctcgccaaaaaacaccagaaaaggaaactaaagagcaagcagaaacaaagagagacaaaggaaaagcgggaactcctgcggctggagaaagccgagaaatggcagctgagcaaaaaggaggatatccggtatctgggagacggcttctctcatcaactcaacgatcagacgtcccaggtggatcgacttaagtccctggatctgcctcttttgaacaatgcaaaggaacttgcccaggcaatggacatccccatcggggaactgaggtttctttcgttttcgcgaaagaatgctcggctgagtcactacaaaagattcaagatgaagaagaagtcagggggttttagactcatctctgctcccatgcctcgcctgaagaatgcccagtattggatactcgaggagatccttaataagatagcggtccaccccctggctcatgggtgtgtgataggtaagagtatcaaaactaatgctgagccacacctccagaaagcagtggtgattaatcaggacttcaagaacttcttcccttccattacgcacaatagaatcaagggcatctttaagagcttcgggtattctgaacaattagccactatcttctcccttctatgctcagaacctaagattgtcgaggtgagcatgctgggagaagattacttcgcccagaggggtacccgatttttaccgcagggtgctccgacctcccccgctataactaacatcatctgcaagcagctggacttgagactgcatggcctggcaaaacattatggtttcgattatactcggtacgttgacgatataaccttttctgggaatcaagagcagctgccaaaaatcgcagcaattctcaagtactccaagaagattgtggaagacgaaaacttcacactgcacccagaaaaattgcgtattatgaaaaggagcgatcgccaagaggtgacaggcgtggtagtcaacgagaaaaccaatatcccaaaaaagaaccttaagcgctttcgtgcattgctctttcagatcgagaaagacgggattcaaggcaaggtctggaataaaaaggggaacattttagcccagattgacggctacgctaacttcatctatcagatagatacagagaaaggcattgcctacaagaagagggtcggactaattctgaaagcgcacggatataaggaggcccatcaatccaaatttggaaggcgcagtaaggattctagtacaagttggtttacctctctggtatccaaagttaaagacattttcggatctggcggcaaatga

SEQ ID NO: 13265 - RNA, 1452 nt, synthetic construct
  source 1..1452: mol_type = other RNA
atggataacagcgctaccaggaaacaggagatctacgacaaaattaaagagtcgtctaagcacgagttcattctaagcgaaatgaagcggctgggattttggggggatgacaatgtgaatttcgacaaggtgaatgatttcctgaaggaggagaatgctctgtctggcgatttgagtaagcttctcaagaaagagcggctcataaaagacacagatgcattcatagccaacaagcacaaggaacggaagaagctctccaaagaaaaacaaaaagaaaccaagctgaagagggaacagatcaggaaagagaaggcggaaaagtggcagcaaacgaagaaagaagacattacttatctgggggccgggtactcacatcagctgaacgacacccagatcgatgaggtccgactgaaagaagccggtttaccaatctaccacagcgttaaagacctggccgaggcaatgaagattaccgtgaatgagctgcggtttttggccttctccagaaagaactcccagattgaacattataagcgctttaaagtcgccaagaaaagtggcgggtatcgactcatttccgctcctatgccgaggttgaaaagagcccagcactttattctggagaatatcctgaacaaagtgatcgtacataacaaggcccatggttgtgttaaagaacgcagcattataagtaacgcaatgccccaccttaacaaagctgtggtaataaaccaggacttaaagaacttctttccatctgttacgtataaacgaatcaaaggggttttcaagtcattggggtatagcgagcagctggctgtcatcttctctctcttatgttctgagagtaaaatcctagacatttctcttcttggagaaaactacttcagcaagcgcggcgagagatttcttccccagggatcgccttgctcacctgcaattactaatatcttgtgccggaagatggattatagactagatggccttgcgaaaaaatacggtttcgactatagccgctacgtcgatgatacaacatttagtggcaaccacgaacaatttaagcatattacagccatcctcaagtatagcaagaaaatcatctccgaggaaaacttcaatctgcaccccgataagctcaagataatgaagcgcaatcagagacaggaggtgaccggcattgtggtcaatgagaaattgaatatcgacaagaagtcactgaaaaggtttcgtgccctgctgtaccaaatagagaaggagggcatcgctggaaaaacttggaatggaggcctcaacgtgctcgcagaaattgacggttacgcgaattacatctaccaagtggacaaggaaaaaggagccaaatacaaatcccaggtggctgatattctgaaggcacactcatataaggagtccaagggcatctttaataagatcaactccctgttcaagcgttga

SEQ ID NO: 13266 - RNA, 1506 nt, synthetic construct
  source 1..1506: mol_type = other RNA
atggataattccgcaactagaagacaggagatttatgacaagatcaaagagagttccaaggacgaatttattctctcggaaatgaagcggctcgggttttggggggataatgaggtggacttcgagaaggcaaacgcattccttaaagaagaaagggagctatcaaataacttaaccgccctggtgaagaaagaaagggcaattgaagacacagaagccttcattgccaataaacacaaggaacgcaaaaagctgtcaaaagaaaagcagaaggagactgcccttaagagagctctgatcaggaaagaaaaagctgctaaatggcagcaaaccaagaaggaggagatagtgtatataggggacgggtactcccaccagctcaatgataccgagacaaatgtggcccgactgaaggagaacgatctcccaatttacgagagcgcaaaagagcttgctgaagctatgaaaattacagtaaatgagctgaggttccttgccttttcgagaaagaactccaaaatccaccattataagcggttcaaggtggccaaaaagagcggcggctaccggctgatttcagcacccatgcctcggctgaagagagcccagcacttcattctggagaatattctgaataaagtgacggtccataagaaagcgcatggatgcgttaaggagcgctcaattgtcagcaatgcagaaatccatgtgaacaaagccgtcgttatcaaccaggacctccaaaattttttccccagcgttacctataaacggattaaaggcgtgtttaagagcctgggctatagtgagcagttggctgttatcttctctctactgtgcagcgagtcaaaaatcctagacctgagtttgctcggagagaactactttacacaacgcggcgatcgctttctgccccagggatctccttgttctcctgctataactaacatcttgtgtaggaaaatggactatcgacttgatggacttgctacaaagtatggatttacctattctcgttacgtggacgatactaccttctctggtaaccaggaacagtttaagtacatcaccgcgatcctgaaatacagcaagaagatcatcaaggaagaaaatttcaagttgcatccggataaattacgaataatgaaacggaacgagcgccaggaggtaactggtatcgttgtcaacgaaaagctgaacataaacaagaagtccttgaaacgtttcagggcgctcctcttccaaatagaaaaagagggtattcaagggaaaacgtggaacggcggtctgaatgtcttagccgagattgatggctacgcaaattatatctaccaggtggacaaaatcaagggagtgaaatacaagagtcaggtgtccgccatcctgaaggcccacagttacaaagagaatcacgtcgctaagtacgcgtctaactccacagaagccgccaacgagcacaaggtaccatccttctttaagaagatcatcagctttttcaagaagtga

SEQ ID NO: 13267 - RNA, 1581 nt, synthetic construct
  source 1..1581: mol_type = other RNA
atggtgccgatcagcctcgaactattcaatagcgtcttccgggttgtcagacgcgagcttaagtacatcctcctgctacctttttttgtgttcatgagcaattccacagaaagaaggcaagagatttatgacaaaatccggcaaagctctaagcacgaatatattctgtcagagatgaagagactgggcttttggggcgaggataatgtggatttcgaacaggtgaataagttcttcaatgatgagtccgaattgagcaaacagctgaacgaccttctccggaaagagaaatctattgaggacacagaagcatttattgctgctaagcatctggagagaaaacgcatttcaaaagagaaacagaaggagacgaaggaaaagagggagcagcaaagactggagaaggccaagcagtggcagctctcaaagctggaagatatcgtgtatctcggagaagggtattctcatcaacttaacgacaaaaccactgccgacgatttgctgaaacgccaggggctccccatcttgcactctgccaaagacgttgcaaaagccatgaacattacagtggcggaactgcgtttcctggcgtactcccggaagaacagcaagacatgccattacaagcgatttaaggtagccaaaaagtccggcggcttccgattaatctccgccccaatgccaaggttgaagaaagcgcagcacttcattctggaacacattctgaacaaggtaaccatgcatcccaaagctcatgggtgtgttctagagaagtcgatccttaccaacgcacttccacacgtgaataaggatgtggtcataaaccaggacttaaagaactttttccccagtataacttacaaaagaatcaagggtgtcttcaagagtatgggttacagcgaacaggtcagtgtgatatttgctctgctgtgctcagagcccaaaatcctcgacgtaacgctcctgggagagaactactttgcacagcagggcgataggttcctgccacaaggctccccttgtagtccagctctgtccaacatcatttgcaaaaagcttgattatcggctcgatggccttgcctctaagtacggattcatttattcccgatacgtcgatgacataaccttctcggggcctaaagctcagttttctaagatccccgccctgctgaaatacagtaacaaagtcgtgaaagccgagaattttattttacaccctgagaagctccgcttgatgaaacgtcatcagaggcaggaagtgaccggggtagtggtgaacgagaaaccgaacattaataagaagagcttgaagcggtttcgcgcattgatctatcagatagaaaaggacggaatcgagggtaaaacttggaatggtggactgaatgttctggcagaaatcgacgggtacgccaatttcatctaccagataaacaaggagaagggcaagccttataaagagagggttgcttcaattttagttgcccacaattacaaggaggcacacaagcaaaaatatgtgaaagctccccccaaaaaagaaggattcatcaagaagctcttttcttggtttaagttgtga

SEQ ID NO: 13268 - RNA, 1515 nt, synthetic construct
  source 1..1515: mol_type = other RNA
atgtcaaatagcacagaacggagacaagaaatatatgataagattcggcaaagctcaaagcaggagtacattatatctgagatgaaacgcctggggttctggggggaagacaatgtggatttcgataaagttgacaggtttttcaagaaggagtccgagctgtcaaaacagctccacgatctgctcaaaaaagagaaatcggttgaagacactgaagcatttatcgctgctaaacatatagagcgcaagcggattagtaaagaaaaacagaaggagacgaaggagaaacgagctttggagcggatcgaaaaagccaaacgatggcagctgttgaagaacgaggacatcatttatcttggggaaggttactctcatcagttaaatgataagaacacagccaccgacctgctgaaagcccagggtttgcctgttctagaaagcgctaatgatatcgccaaagctatgaaaatttctctgggcgagctgcgttttttggcgtatagccgaaagaactccaagacatctcattacaagaggttcaaagtcgctaaaaaatctggaggtcacagactgatcagcgcccctatgcctaggctcaaaaaggctcagcactacattctcgagcacatcctgaataagatcaccatgcacccaaaggcacacgggtgtgttcttgaaaagagtatactctctaacgcactaccacacgtaaacaaagatgtcgtgatcaatcaggacctgaagaatttttttcccagtattacctacactcgcataaagggagtatttaaggcaatgggctacagcgagcaggtgtcaatcattttcgcacttctgtgctccgaacccaaaatcctcgacatctccctgcttggagaacattatttcgcacaacagggtcaccgcttcttacctcagggatctccatgtagccccgccatcactaatatcatttgcaagaagatggactatagattggatggactgggctccaagtacggatttacctactcgagatatgtggatgatattacattttccggggacaaaaaccagttctcaaagattaccgccctcctaaagtactccaaaaaaattgtcactagtgagaactttacgctgcatccggacaaattgcggattatgaagaggcatcagagacaagaggtcacaggcgtcgtggtgaacgagaagcccaacatcaataaggtgagcttaaagaggtttcgtgctctgatatatcaaatcgaaaaggacggcattaagggaaagacttggaatggcggggcaaacgtgcttgccgaaattgagggctacgccaacttcatctttcagatcgaccaggaaaaaggcaggggcttcaaggagcgcgtggcgaagatcctcgcgcaacacaactacatcgagaagcatatagtgacctatgccaaggagaaggtagtggtcgccacctccagtgacgccaaacccaaggatacattcctgaaaaagctcttcagcatcttcaagaaatga

SEQ ID NO: 13269 - RNA, 1542 nt, synthetic construct
  source 1..1542: mol_type = other RNA
atgtatgaaggaaataagatccatcttatcgccacatttttcatcccctacacaatggccgacagcgcaactcgacgccaggaaatttatgacaagatcaaggagagctctaaagaccagtacatcttggaagaaatgaagagactagggttctggaacgagggacaggtcgactttgaaaccgtgaatcagtattttaaggaagagtctgaactgtcccagcagctgcaaaaacttttgcgggagaagagactggtcgagaaccccgaggcctttctggcacaaaaacacaaagagcgcaaactggcttcaaaacagtctcagaaggagacaaaggagaagagagagaagctacgacaggaaaaggcagatagatggaaggaaagcaaggaaaaggatatactcttcctgggggccggatactcgcacacccttcacgacaagtcaaccaagcaggatcgcttacaacaagagaaactgccggttctccagaacgccgaggatgtagcaaaggctatggacatttcgataggccaactgaggtttctgtcctttagtcggaaaaactctaagatcaaccactacaaacgatttcagatcccaaagaaaactggtggctttaggtacatatccgcacctcagccaaaactcaaaaaagctcagcattggatcttagagaacatcctgaataaggtgactatgcaccctcaagcgcatggctgtgtgatcggtaaaagcatcaaaacgaatgccatccctcacgtggcgaaggatgtagtcatcaatcaggacctcaaaaatttctttccctccattgtttacccccgcattaaaggggtgttccaaagtctggggtacagcgaccaggtcgccacaattttcgctctcctttgttcagagccgaaaatagttgagatttccgttctgggcgaggattactatgctcagcggggtgaaagattcttgccccagggctcaccttgcagcccagccattactaacattatatgccgtaagttggattaccggcttgacggtctagccagaaagtatggattctcctatacaaggtacgtggacgatttgacgttcagcggcgaaaaggaccaatatgcacatatcactaatatgctgaagtacagtcgcagggtcgtgaaggaagaaaatttcaccctccatccagacaaactgagggttatgaaaaagggagtgaggcaggaagtgaccggcgtggtggtgaatgagaagccaaacattgacaaaaaatctctgaagcggttccgggccttactgtatcagattgagaaggatggcctcaaagacaaggtatggaccgggaaggcggatcttttgtcccaaattcacgggtacgctaattttatcaaccagatagatcaggagaaaggcaaaaagtataaggagaaggtcaacatcattctcgagaggtataactacaaagataaccaccgcaaacagtatgtgaagacctttgtcaaacctaagggactgatgagtaaactccgttctttcttcagaaagtga

SEQ ID NO: 13270 - RNA, 1497 nt, synthetic construct
  source 1..1497: mol_type = other RNA
atggctgatataagacagcagctgtatgaccgcattaaagccagcactaaagagtccgttatcctggaggaaatgaaacgtcttgggttctggaaacaggaaaccggcgttcccagcctacctgaacaattaatcctccaggaagcagacctcacgaaggaattgcaatctctgcttgagcagcaaagaaagtaccagaacaaggagcaggcactgaaagagatgaggaaggctcgcttagagaagtcgaaactgaaaagagaggaaaacaagaagctaagaaagcagaaacgggaggaaaaagccgctcggtggaaggccacccaggaaacagatattatctacctcggggaggatgtgagtaaaggtctgaacaacaaagagacagatgtcgccaagatcaatacccatcagttgccaggcattacgactgtcgaagagcttgccaaagctatgaatatctctgtgggaacagtccgatacctttcctataaccggatcatttcaaagactacgcactacaagagattttacatacccaagaaaaccggcggaaagcggctgatctcaactcccatgccaaagttgaagcgagctcagtactggattctcgagaacatcctggaaaagattgccattcaggacagcgcgcatggcttcgtgaaaaagaagagtattgtgagtaatgctttgccccatgtaaaggctgaggtggtagtcaatatcgacatgaaagatttctttcccaccattacttaccctagggtgaagggagtcttccaatccttcggatattccgaacagatcgcgacaatcctggccctcatgtgtaccgaggctgaatgcgatcaaatcgatctggacggcataacctactatgcggcaggtttagagaggtttctgcctcaaggcgcgccaacatcaccagcccttaccaatatcatatgccgtaaattggatgcacgcctgaaggggattgccacaaagttcaacttcaactatacaaggtatgccgatgacctgaccttttcagcctccggggaagcaactgcccacctcaagacactcatggggtttattaaacgcatcatcaaggaggagaatcttcacatacacccggacaaggtgagggtactgcgtaagggggcccggaaggaagtgaccggtatcgttgtgaatgaccgccccgctgtcaacgcaaaggagctagaccgatttcgcgctctgctgtttcagatagagaaggacggcctcgatggtaagcattggaaaggatctaataacctgctggcaagcattaagggatatgcaaatttcgtgctgatggtggacccaatcaaaggcaaacctctcatggaaagagttagtaaaattttgagcactcacgagttcaagcatgtgatccggcacaaaccgaaatctttactcgccaatgagccagagaaacctaaaaacaccgaggaacagagcaaaaagccttggtggaggttttggtga

SEQ ID NO: 13271 - RNA, 1488 nt, synthetic construct
  source 1..1488: mol_type = other RNA
atggcagacattcgtcagcagctctatgaccgcattaaagcgagcacaaaagacagcgtgatactggaagagatgaagcgtctcggcttttggaagagggatgtggggatgccatctttgtcagagcaaatcatcctcaaagaggcagacctgactaaggagctgaatgcacttctagagcaacagcggaggtatcagaacaaagaacaggctttgaaggagatgagaaagtctcgtttggagcagagcagagccaaaagggaagagaataaaaagcgaagaaagcagaagcgagaggagaaggcagcccgctggaaagcatcaaaggaaacagatatcatctatctgggagacaatgtgtcgcaggggttgaataacaaggaaacagaccccgcgaaattaacccaacaccagcagccccttgttaccacagtcgaggacctggctaaggccatgaatgtctcagtggggacactgagatacctggcttacaaccgcataatctccaagactacgcactacaagcgcttttatatccctaaaaagaccggcggtaaaaggctgatttccaccccgatgcctaaactgaagcaggcccaatattggctgctggaaaatatgctgaacaaagtcgccacccacgacgcagctcatggctttgtgaggcagaggagcattgttagcaacgccctaccccatgttggggccgaggtggtaatcaacattgatatgaaggacttcttcccaacaatcacttatccccgggtgaaaggtgtgttccgctcctttggctacagtgagcagatagccaccattctggctctcatttgcacggaaccagatgtggatcagatagaattagacggccaaacatactacgctgcgggatccgaacgcctactgccacaaggtgcacctacctctcccgccctcactaacatcatttgtcggaaactggacgcccgacttaaagggattgccacaaagttaggctttaactacaccagatacgctgacgatctaactttcagtgcttcaggagaggccgtaacgcatgtgaaaactctgatgggattcgtgaagaaggtggtcaaggaagagaagctggtcattcaccctgataaaattcggatcctccggaagggtgcacggaaggaagtgactggaatcgttgtcaatgataagccggctgtgaatgccaaggagctcgatagattcagagcgctcctcttccaaatcgaaaaggatggaccacagggcaaacactggaacaattctcctaatcttttggcttccatcaaaggctttgctaacttcgttgcccaggtcgatcctgtgaaagggaagccacttgtagagagggtaaacgccatattggttacccatcagttcaagcacaccatcaagcataaaagcaaagcacaacaggccaagcaggaggcggaacagaagcagaaaagtaaaaaaccctggtggaagttttggtga

SEQ ID NO: 13272 - RNA, 1503 nt, synthetic construct
  source 1..1503: mol_type = other RNA
atggccgatatccggcagcagctgtacgaccgaataaaggcctcaactaaagagagcgtcatcctggaagaaatgaagaggctgggcttctggaagaaagaagaaggcattccgtccctaagtgaacaactgatagtgaaggaggccgacctgaccaaggagctgaaagaactcctggaacagcagcgaaagtacgagaacagggaagccgcacttaaggaaatgcgtaaggccaggatggcccagtctagagcaaagagagaggaaaataagcagctccgcaagcagaagcgtgaggccaaggcagctcgctggaaagatagtaaggaaaaggatatactctacctaggcgaggacgtgtccaaagggctcaacaacaaggagtctgaccttacaaaattagcaacctacggtttaccagttattcatcacgcagaggccctcgcccaagccatgcagactacaatcggaaacctgcgccacctagcatatcatcggattatatccaaaaccacccattataaacggttctacatacccaagaaaacaggtgggaaaagactcatcagcacgcccatgcctaaactcaaacaggctcagtattggatcctggagaacattttgaacaaggttacccttcacgacgcggctcacggcttcgtcaaaacacgctccattgtgagtaatgctcaaccccatgtgaaagctgatgtagtcattaatatcgacctcaaggatttctttccaagtatcacatacgtgagggccaagggcgtttttaagtcattcggttatagcgagcaagtggctactattttcgccttgttatgtactgagccagagtgcgaccagatcgcaatcgatggcgtgacttactatgccgcttccatggaaaggtttcttcctcaaggagccccgacctcccctgcgattacaaacattatctgcaggaagctggacgctcgtctgcggggaatcgcaacgaagttgaatttcacgtacaccagatatgccgatgaccttacctttagcgcttctggtgatgcagctgctggcactcggaccctgttggggttcgtaaagaagatcattaaggaggagaaattgaacatccaccctgacaagtttcgagtgcttcggaaaggagctagaaaagaggtgaccggaattgtcgttaacgagaagcccgcggtgaatgccaaagaattggatcgctttcgcgccctcctgttccagattgagaaagatggcatagccggcaagcattggaacaattcaacaaatctgctggcttcgatgaaggggtatgcctcttttgtggccatggtcgacgctgcgaaggggaaacctctggtagaaagagtgaatgccatcctggcagcgaatcagttcaagcacgtcatcaggcacaaaagcaaagccatgagagataaagagactgcacaggcacccaaggggtcaggaagctctgacgcgaaaaaaccatggtggaagttttggtga

SEQ ID NO: 13273 - RNA, 1512 nt, synthetic construct
  source 1..1512: mol_type = other RNA
atggtgggatcgcagaatacacggcagcagctgtacgatcgcatcaaagctagcactaaagaagccgtcattctcgaggagatgaaaaggctagggttttggaagtccgaggaaggtatgccctctcttccagagctgattattgaaaaagaggccgtgcttataaaagaagtccgcgaactggtggagcagcagcgcaaatacaagaacaaggaagaggccctcaaggaggtacgaaaactccgtttggagaaatcaaaacttaagagggaggagaacaagaagacgagaaagcagaagcgggaagagaaggcagcgcattggaaggagcgcaaagaaaaagacattctgtaccttggggagaaagtttctaaaggcctgaacaacaaggagagcgacttagcaaagctgacctctctgcaactgcccgtactccaaaatgctgaagatattgctctagctatggggattccagtgggccaagtgaggtttctctcattccacaggattgtgtccaagacaactcactatcgtcacttttacatccctaagaaaaccggcggtaagcggctcatttcaacccccatgcctcgactgaaatccgctcagtattgggtactgacgaatgtcctcgacaagatcctgatacatgatgcggcccacggctttgtcagaaagagatcaatcgtgagtaacgctctgcctcatatcaaagccgaagtcgtgatcaatatcgacttaaaggacttctttcccagcatcagctacatcagagtgaaaggcttgttccagagtttcggctacagtgaacaggtggcaacgattttgggtctgatatgcaccgagccggagagcgatgaaatagagcttgatggcgagacatattttgccgccaacggagagcggttcctacctcaaggagcgcccaccagtccagccatcactaatatcatttgtcgcaagcttgacgttcggctgaagggaatcgcctccaagctcaatttcaactacacccggtatgcggacgatttaacattctccgcctctggcgagtcagccgctagcactaaaaccttactggggtttgttaagaagattatcaaggaggagaacctgaacatccatcccgataagctgagggtcctgcgaaagggggccagaaaggaagtgactgggatcgtcgttaatgacaaaccaagtgttaacgcaaaagaactcgacaggtttagagcattgttgttccagatagagaaggatggaatcggcggaaagcattggaagaacagcaacaatctgttggcatccatgaaaggttatgcctctttcgtagccatggtgaatccggaaaaggggaacccaataaaggaacgtgtgaataagattctcgccgctaaccagttcactcacgttattaagcacaagtccaaagctatgatcgcaaaagacgcagcaaaaaatacaaataccgcttctacaagcgaagtgaaaaaaccttggtggaaattttggtga

SEQ ID NO: 13274 - RNA, 1572 nt, synthetic construct
  source 1..1572: mol_type = other RNA
atgactaagaatatcctatatacgaccatcttctatacacctatggcaaataccgaaaactcccagccgactagacagcagctctatgagcggattaagtcatcaggacgtaacgcggtgatcctggaggaaatgcagaggctgggcttttggaaatccgacgaaggtgcttctgttattcctgagatgcttatacataaggaggctgatttgatcaaagagctcaataagctgcttcaacaacaacgcatttatcagaatcgcgaggaagctttaaagaaggtcaggcaggctaggttagagcagagccggaagaagcgcgaggaaaataaaattctccgaaaacagaagagagaagctaaggctgcgagatggaaagaactccgtgacaagaatattatatacctgggcgagaaggtgtccaagggcttaaacaaccagattagcgagaacagtaagctcctaaagtaccagctccccgtcctgcagacagccgaagaactgtctgcggccatgaagatcacaataggggaattgagatttcttagctataaccgtacgatttccaaaatcaaccactataagcggttctatatccctaaaaaaaccggggggaaacggctcatctctaccccgatgcccaggttgaagaaagcccagcactggatactcgaaaacattctgaacaagatcgaccccacagagtcagcccatggcttcgtgaagaagaaaagtattgtgagcaatgcacttccacacgtaaaggctgacgtcgttgtgaatattgacctgaaagacttttttccctccatcaactacagacgggtgaaaggcttgttcatcgcactgggttacagcgaacagatttctactatcttcgccctgatatgcacagagcccgattgtgatcaggtcgagttagatggcgaaacttactacgcagcgggaagtgaccgcttcctcccacaaggtgccccaacgagcccagctatcaccaacctgatatgccgaaagctggaccttaggctgaagggaatcgcatcgaagcttaattttaattacactcgctacgccgatgacctcacctttagtgcctccggagtagcaacatctaacactagtacacttctggggtttgtgaaaaagataatcaaagacgagaagctgtacatcaaccccgataagctgagagtgcaaagaaagggcgccaggaaagaggtaactgggattgtcgtgaatgataaaccatcagtttgtcgcaaggagctggataagttccgagccctactgcatcagattgaaaaagagggaaccatcaaaggcaagcactggaataattccaacaatctgttggcaagcattaaagggtacgccaatttcgttaagatggtgaatcctgagaaaggaaaacctttggaggaaagggtgaagaaaatcctggaggcccaccggtttaaacacgtgatcaagcataaaccgaagaaacagtctgccaccaccaacgtcgttgattcaaagcctgctaaccaaccagaagcagagaacaaaaagccctggtggaaattctggtga

SEQ ID NO: 13275 - RNA, 1497 nt, synthetic construct
  source 1..1497: mol_type = other RNA
atggctgattcccagagtacaagacagcagctgtacgaccgtataaagaattcgtcaaaggacgctgtagtgctggaggagatgaagcgcctagggttctgggccaagaacgagagtgccccctcgttgccagagatcctgattcaaaaagaggcagcccttgtccaggagctgaggcaactgaccgagcaacagcaaaaactgaaagacaaacaacaactcctgaaggaggtccgcaaagcgcggctggaaaaaagcagagcaaagcgtgaagaaaacaagaaattgaggaaggaagcacgagaggccaaggccgcccgttggaaagagaagaaggagaaggatattgtctaccttggcgccaacgtgagcggaggactgtcacatactgccagcgacgcgacccttttaggcaagcaccagctccccatctggaactctgtggaagaacttgcaagggacatgaaggtgaaagtgggagaactccggttcctggggtttaatcgcgctgtgtcaaaggttaaccactataagaggttttacattccaaagaagactggcggtaaaagactcatctccgccccgatgccgcggttaaagacagcacagacatggatcttggagactattctgaataaggttgcccctagcgagcaggcccatggttttgtcctgaagcggtccatcgtatccaacgctttacctcacgtgaaggctgatgttgtcataaacattgaccttaaggacttctttcccagtattcattatccacgcgtgaagggcgttttccagagcctgggctattctgagcagctcgctacactcttcggcttgatatgtaccgagcccgactgcgacactgtggagctggatgggacgacatactacgtgtctaattctgaacgctttttgccacagggagctcctacttcacccgccattaccaatattctatgcagaaagctggatgctcgactcaaggggatctctaccaaattaaacttcacctatacaaggtacgctgacgatctcacttttagcacctccggcgagcatgtcaacaaaaccaaaacactcttgggattcatcaaaaaaatcatccgggaagaaggtctggtgatccatcccgataaattgagagtccagagaaagggtgctaggaaggaagttaccggcctggtagtgaatgataaaccttctatagcagcaaaggaactggataaattccgagcccttatttatcagatagagaaggacaaaacgctgcagggaaaacactggaagaattccccccacctgctcgcaagcatgaaggggtacgcaaatttcgtggcgatggtggatccagcgaagggcaagccactggtccttcgggtgaacaaaatcctagacgaacacgggtataaacacgttatcaaacacaagcctaaaccaaaagtcgtggccgccagtgagcagcctgtacctgccaaaaagccctggtggaaattttggtga

SEQ ID NO: 13276 - RNA, 1515 nt, synthetic construct
  source 1..1515: mol_type = other RNA
atggctgataacagccaggtaacacgccagcagctctatgatcgcattaaggctagtactcgcgattcagtcatcctcgaagaaatgaagcgtctggggttctggaagaaagacgacgggattccatccctgccagagatactgatcacaaaagagtccatactgacacaggaactacatgtgctattggaccagcagaggaaatataaaaataaggaggaggcccttaaagaaatccgcaaagcaagactagaacaatctcgactgaaaagagaggagaacaaaaagcttaggaagcagaaacgcgaagctaaagccgctcagtggaaggagcggaaagagaaagatattatatacctcggagaggacgtttctaaggggttgaataataaggccagcgatttgaccaagctcgctacctatcagctgcctgaaatgcacatggccgatgagcttgccaacgcaatgggcatcactgtgggtgagcttagatttttggcctataataggaccgtcagcaaaattaaccactacaagcggttttacatccctaaaaagaccggcggtaagagactcatctcaacacccatgccccgattgaaaaaagcccagcattggatcctggaaaacattttgaacaaagtgtcgattgacgaccatgctcacggattcgtgatgaagcgctctattgtcaccaatgccctgccccacgttaaggcagaggtggtgattaacatcgacctgaaggatttcttccctaccatatcctatcagagagtgaaggggctgtaccgtagtcttggctactcagagcaactgtccacgatcttcggcctgatcagcacggagtccgaatgtgaccaaatcgaactcgacggcgaaatctactacgcggccggaattgaccggtttcttcctcagggagcccctactagcccagccatcactaatataatctgccgaaagctcgatgcgaggttaaagggcattgcctctaagctcaattttgcctataccaggtacgccgacgacctgaccttcagcgcaagtggtgaaaacgtcaacaataccaagaccctgttagggtttatcaagagaatcatcaaggaggagaacctgactatacacccggataaattccgggtcctgcggaaaggggctcggaaagaagtgactggagtgatcgtaaatgataaacccgctgtgaatgcaaaggagctggacagattcagggcattactctttcagattgagaaagatggtacactggagggcaaacattggaagaatagtccaaacctgctcgcctcaataaaaggatatgcgtcttttgtggctatggttgatcccattaaaggcaagcctttcgtagaaaggactaacaagattttagagacacacggctttaagcatattatcaagcacaaaccgaagccaccccagacagctgcagcggttcaaacggaagagcaagcagcccagaagaagaagccatggtggaagttctgggcatga

SEQ ID NO: 13277 - RNA, 1506 nt, synthetic construct
  source 1..1506: mol_type = other RNA
atgtcgaaccagccgaatagacaacaactgtacgaccggattaaggcatctactcgtgatgctgtgatcctcgaggagatgaaacgatttggcttttggaaaaaggacgaagctcagtctatagtgccagaaactcttatcgagaaggaagctgcgttgaccagggagttacgggacctcttagagaagcagcagaggttccagaaccgagagcaggcccttatagaggttcgaagagctcggctggaggcatccaagaaaaagcgtgccgaaaacaagttgttacggaaacagcagaaggagcagaaagccgcacgttggaaagagaagaaggagaaggaaatcatttacctcggggaagacgtgtctcccggactgaacaatgtcagcgctaaccccgataatctaaataagcagaagttacccgtcatcgccaacgccgaagagctggcgaaagccatgaagacaactgtcgcagaactaaggttcctggcctatcatcgcacagtgagtaaaacaacccactatcagcgcttctatatccctaaaaagacagggggcaaaagattgatctcaactccaatgcccaggctgaagtccgcccaacactgggtgctcgagaacattctggagctcccggagattaaagacacagcacatggttttgttaagaagcgctctatcgttagcaacgcggtgccccatctcaaggctgaggtcgtgattaatgtcgatctgaaggacttcttccctagcattgactacaaaagagtgaagggtctatttatctcattgggatattcagaacagattgctatcatccttggcttgctctgcaccgaacccgagagcgaccagatcgagctggatgggcaaaaatactatgtagccggcactgaaagattcctgcctcaaggcgctccaacctcacctgctataacaaatctgatttgtcggaaacttgatgcccggctcattgggataagtaaaaagttgggatttacgtacacccgctatgccgatgacctgaccttctctgcaagtggcgaggcagtaaagagcgttaaaacccttatggggttcattaggaaaatcgtgaaggacgaaaatctgaacatacacccagataagctcaggattctgcgcaagggatccagaaaggaagtgacgggtatcgtggtgaatgacaaaccagccattaacagcaaagaactcgaccgctttcgggccctgctgtttcaaatcgagaaagatggaatcgcggggaaacactggaaaaattcccctcaccttctgccttccattaagggatacgtgaactttatcagtatggtagatcaggagaagggcaaagccctgaaagttagggtcgatgcaatactgcagaagcacggctacaagcatgaaattagacataagtccaagcaacagatcgccaaggaacaggagcgaatcgaagctgaggcagtccaccagaaaaagaaaccatggtggaaattctggtga

SEQ ID NO: 13278 - RNA, 1512 nt, synthetic construct
  source 1..1512: mol_type = other RNA
atgaccagacaggaaatctacgacaggattaagaatagtaccaaggatgcagttattttggaagagatgaagaaactgggattttggaaagaagacggagctgccgccagtgttcccgagcagctgattcttagggaagccagtttaagaaaagacctgaacgagctgttgcagaaacagagaaactaccaaaatcgggacctggcactgaaggatatgagggccgctcgcatggaagcaagccgcaagaagcaggctgagaacaaactgctcagaaaagaaaaggctgagaagaaggcagcagcctggaaggagaaaaaacaaaaagatatcacgtacctcggggaagccgtgtctacagggttgaacaatgctgaagctaatacagaaaagctgcaaaaatcaggcttgcccctgatcgagtcagcggagaaattggcagccttgatgcagatttctatttccgagcttaggtttgtggcttataatcgagtcgtttccgagataacacactacaagaagttccagctccctaaaaaaaccggtgggtttcgcacaataagcgccccactcccacgtctcaaatcagctcagcattggatcttacaggagatcctgaacaaactgcctgtgcacgccgcggcacatggcttcgtgaccaaaaggtccattgtctcgaatgccaaggagcatctgcagaacaacctccttatcaacatagatcttaaagacttcttcccgtccatccattacccacgggtaaaaggattctttaaggctatagggtactcagagcaagtagcgactattttcgcgctgatttgcactgaatccgaggtggatgagatagagctcgataagaaaacctattatgtgaaatctggggatcgcagtctgcctcagggtgctcccactagccctgccatcacaaatctactgtgtcgtagacttgacgcccggtttgccggcttagcaaagaaatacggctttgtttacacccggtatgccgacgacctgtcatttagcgcgcccgaagaaaagaaggaggaattcaagaagtttattggtttcgtgaagaagactattaaggctgagaattttactctgcacccagataagttcaaagtgttaaggaaaggagcccgacgggaggtaacaggtatcgtcgtcaatcagaagctatccgtttccagcgacaaagtgaagaagtttcgagccctgctgttccagatcgagaaggacggcattgccgggaagcactggaacggatctaccacactacttgctagtatcaagggctatgctagcttcatctatcaagtcgaccctgtcaagggcaaaccgatgctcgagcgcgtgaacaaaatactcgtggctaacgcattcaagcacatcatcgtgcacaagtctaaggcacagaaagaaaaagaagcacccaagaaacaggccggaatcggcgccagcacgaaaactacctctgatacgaagaagccatggtggaagatttggtga

SEQ ID NO: 13279 - RNA, 1437 nt, synthetic construct
  source 1..1437: mol_type = other RNA
atgaaaaagtttggattttggaacgaaacagaaggacagtcctccctgcccgaacaactgatcatgcaggaggcacggcttagtaaagagttatacgacttgctggagaaacagcgaaagtaccaggatcgggagaaggccctcaaggaaatgaggacagcgcgtctgcagaagagccgcgagaagatagcagagaataagagattgagaaaggagaagaaagaacaacgggcgcaggattggaagaactcgaagcagaaggatatcatttatctcggcccaacagtgtcaaaagggctccagcagacggccgacggagaaagcgataaactgaagcagaagcaactacccttgatccatacagccgaggagctggcatcccagatgggcatcggcattggcgaactgcgcttcctgtcttataaccgtccggtttcaaccgtctctcactatcggcagtttcagatgcctaagaaaaccgggggtttccggaaaatttctgccccaatgcctaaattgaaagaggcccagcattggatcttacactacattctgaataagctgcctgtccacgaaaacgcccacgggttcactcttcgaaagagtatcgtgaccaatgctcaacctcatctccagaaggtgctcttaatcaacatcgacctcaaggacttttttccaagcatccattatcccagagtcaaaggtatgttcaggggcatgggttacaatgagaagatagctacacttcttgctctcatatgcacggaaagcgagactgacgaggttgaactggacgggaagaaatatttcgtgaaatcagggaatagagcactgccgcaaggagctccgacttccccagccattacaaactatctttgccgcaggctggatgctcgactgtccggtctagcgaggaaatatcacttcacttacacccgttacgctgatgatatgaccttcagtttcagcgccgatcaacaagatagtatcaaaacctgtatcggattcatcaaaaagacgattcgcactgaaaactttaacatacacccagacaagttcaaagtgctgaggaaaggcgcacgccatgaagtcaccggagttgtggtgaacaataagctctcagtggacagcaagaaactgaaaaagtttagggccactttgtaccagattgagaagcatgggttgcagggcaagcactggaaccactcccataatctgcttgcctctctaaagggctacgctaactttattaatcaggtagacccagtcaagggcaagatatataccgagagagtaagaaaaatcctggaccagtaccagtaccggcacgagattattttcaaacccaagcccaagccatctcctctcaaagaaatccccaatcctattcctgcccccgaggcaaaaacacgcaagccctggtggaaattttggtga

SEQ ID NO: 13280 - RNA, 1296 nt, synthetic construct
  source 1..1296: mol_type = other RNA
attgcacgcaaggaaaaaatagaggcagccgccaaggcttgggccaggaaaaaagagaaagagatcgtgtaccttggcgaaaacgtttccgctggactgaacaacctgcaggactcggatgcagagcggctaaagaagaacaatctcacggatatagccagcgcagaacagctcgctgcccttatgaaaatcgagatgggtcagttacgcttcctaagttatcatagagcagtctcccgggtcagtcactacaagaagtttacaattcccaagaagaccggtggcgttagaacaatttctgctccgatgcccaaattgaaaaccgctcagcactggatcctggagaatatcctcgataaaattctcctgcatgacgcggctcacggatttgtgaataagaagtctatcgtgactaacgcaactccccatctcaagtcagaggtggtcatcaacattgatctgaaggacttcttcccttctgttcactacccacgagtgaagggtatgtttcggaaattggggtataatgaggccatctctacgatcttcagcctgatatgtactgaggctgaacaagacgaagtggaaattgacggcgtaaaatattacgtgaaggatggaaacaggaagttaccacagggagctcctacctcaccggcaattaccaacatcatttgcagaaaaatggatgcccgcttcactgggcttagcaagaagtatggctttgcttacacaagatatgctgatgacttaactttcagtgcctcgggcgacgctctcttgaaactgaagcaattcattgccctggtgaagaaggtcatctcctccgaaaggttcactcttcaccctgataagtttaaagtcatgcggaaaggcgcgaggaaagaagtgacagggatcgttgtgaatgaaaaacccgcgatagagaagaagaaactgaagaaattccgagccctcctgtttcagattgagaaagaggggtcaattgcaggaaagaagtggggtaatagcaagaatttgctggccgccataaaagggtacagcaatttcatcaacatggtagaccctgtgaaaggcaaaagcctgatcgaccgtgccaacaagattctggagcagcataagtttgcccacgtgatcgtacataaggccaaacctaaagtcgaacccgtcgttatccagaaaacgaccagtaccgtgtcacaatcccagtacgtgagcacaacaaccgcggcaacacagcaagtagccccagagaagaccgactctaagaagccatggtggaagttttggtcctga

SEQ ID NO: 13281 - RNA, 1506 nt, synthetic construct
  source 1..1506: mol_type = other RNA
atggccaaccagtctaaaccgaccagacagcaactgtacgacaggatcagacagagctcccgcgatgaggtggtcctggaggaaatgaagaaactcggattttggcctgacggggagggagcccccagtttacccgaacaggtgatccgtagagagggggaactgagcagggagctgggtgatatgctggtacagcagcgcagatattcagatcgggagcagatgctcaaggaaattagacagcaacggatggaggcttcccgacagaaacaaaaggaaaacaaggaaagacggcgacaggagaggcagcagcgtgcagagcagtggaaggcaaggcaggaaaaggagatcttgtaccttggcgaaggggttagcgctggtctgggcgaatctgataacgacgcggctaagttgcggctgaatggactccctgactttattgatatagaatcactggcgcgcgccatggagatcgatgtagcatctcttcgcttcctggcttactccaggcaggtttccaaagtgagccactacaagcggttttacatacagaagaaaaccggaggaaggcgtatgattagtgctcctatgccccggctaaagcaagcccagcagtggattctcttacacattctggagaatgtcaaggtcaacggtgccgcccatggcttcgttttaaataggagcatcgttacaaacgccctgcctcacttgcagccagacctgcttgtgaatttggatttgaaggacttcttccccaccgtaacttacaaacgaatcaagggagtgttcagatcgctcgggtatagcgagaaggtggcttctatttttggcctcatctgtacagagcctgatattactgaggcagagatggacggtcgaacctattttatagcatccggagaaagattcctcccacagggcgctccaactagtcccgccctgaccaatattctctgcaggaggctggacgtcagactcaaagggctggcgcgaaagtacggcttcacatacacacgctatgctgacgatttatcattctcagctcgcggggagggcaaagagaatcttacgaaacttctggggaacgtccgcagaatcataaaagacgaaggctttgtgatccacccagacaagctccgggtgatgcggaagggcagtaggcaggaagtgacgggcgttgtcgtgaatcaaaaactgaacgtctgccggaagaaagtgcgcaactttaaagccctactattccaaatcgaaaaggatggcatcgagggtaagagctggcagggatcctctgacaacctgctggccgtgataaaggggtatgcacattatattgccatggtgaatcccgtacagggtaagcccttggcggagcgtgtggaagcaattcttaagaaacatcactatcgccacatcatcaaacatccagccaagaaacctttcatgcaagcagccgccgaggaggaacctcaaccaaaaaaaaaaccgtggtggaagttttggtga

SEQ ID NO: 13282 - RNA, 1542 nt, synthetic construct
  source 1..1542: mol_type = other RNA
atggctgatagctcactcaaccgccgtcaggagctgtatgacaggatcagatcttcaagcaaagatcaggtcatattggaggagatgcagaaaatgggcttttggccagacgattcagaggaacctagcgtgccagcgttgtattttaagagagagctagagctatcccaggaactgagagacttagtcataaagcaccgccgttttgacgaccaggcaaagatgctggagcacatccggagggagcgcatggccgagagtcggaaaaagcaaaaagaaaccaaacagcgcagaaggcaagagaggcttgcccgggccgaagcttggaaacagcgcaaagcctctgaaattctgtatttgggcgaaggagtcagtcagggactgcagggggctacacccaaccgagcaagactgacacagcatggccttaccgacattgcttccgtggaagccctggccttggccatgggtatgacagtgggtaagctgagattcctggcctacaatcgagaaatctccagagtctcccattatattagattccacctaccgaagaagagggggggtactcgtctcatttccgccccaaagccaggcctcaaatctgcccagtactgggtgctccagcatattctggaccggatcgaacttcatgatgctgcacatgggttcagaaaggctcgctctattgttacgaatgccaagccccaccttggggcagatctggttgtgaacattgatttgaaggacttctttccaaccgtgaactaccggcgcgttaaaggcctgtttgggggcctggggtactccgagagaatatctacggtgcttgggctgctctgtaccgagcccgatgtcgatgtagtggagctggatggcgagacatggtacgttgctaagggcgaaaggcacttacctcagggagccccctgctcacctgcgataaccaatatcatgtgcaggcgacttgacgctcgaatgcgcggacttgctcaaaaatacggttttgtatatagcaggtatgctgacgatatgacatttagcgcaagtggcgattcgaggaagttattaatgactctgctcggaaatgtgcggcggatcttgaaggacgagaatttcaagctgcaccctgacaagctccgtatcatgcgcaaaggagcacaaaaagaggtaactggcatcattgtcaatgaaaagctcaatgtgagcaggaagaagctcaaaaagtttcgggccctgatcttccagatcgagaaagacggcccagaaggtaaaacctgggaaggcgcgcgagatttgctgcccgccatctgggggtacgcaaacttcatcaaaatggttaaccccgacaaaggggctgagttcgttgcccgggtcaaggccatcttcgatcacctgggcgagactccgccagtaaaacccgtggtggcacaacctgacggaagcgaagtggaagtggaaattctccagggaagtgacgaggatgaggcacctggtgcgactggaaacgaccctgataagccctggtggaagatttggtga

SEQ ID NO: 13283 - RNA, 1458 nt, synthetic construct
  source 1..1458: mol_type = other RNA
atgtttgagggcttccgagactctcactttcccctgaacgatatgagtaacacagagaactcccaagactcacggttaagtcgccagcagatctatgatcggattcgcgcaacctctaaacaggaatacatactgtcagaaatggtgcgactgggattctggccagattcccaggacgctcctacactgcctgaacagctcatacgccgtgagggagagctgacccgggagttgacggagctgctggaaaaacagagaaagttcgacaatcgggaacaaatgttcaaggagatgaggaagaagagattggaagagtcccaccagaaacaagcagagacaaaagaacggcggcagagagaacgcgatgaacgtgctcgaagatggaaggaactaaaggcacaggacataggatatctaggtgatggcgtcagcggcgggcttcagaataaggaacattccgcagagaggctggcccagaacaacctgcctgcctttgctagcgtggccgagctcgttcaggcaatggggatctccgtgggggagttgaggttcctgacgtttcagagggacgtcagcaaagtgagccattacaaacgcttctacatgccgaaaaaatctgggggaatgcggctcattagtgcgcccatgccacgattaaaagccgcccagcactgggtgctcgaacacctcttgcagactgtgccacttcatcccgctgcgcgaggttttagatcgggggagtcgatcgtcaccaatgctgccccacacgtgggaagggacgttgttatcaatctggacgttaaggactttttccccaccgtcagctacccccgggtgaaaggagtgtttcgcgggctcggctacagtgaacagctggccacaatttttgcactgctctgtaccgagcctgacgtagatgctttggaactggacggcgagacttattatgtcgtggctagcggaagacatctaccacagggtgccccgacctctcctgccttaacaaatatcctgtgcaggaggcttgattcccggctttccgggatggctcaaaaaatgggtttcgcgtatactcgctacgcggatgatatgaccttttcaggcactgaggacacgctgcagaatcttactaaactgttgtggagggctaagaagattatcagcgatgaagggttcgtcgtacaccctggcaagctccgaatcatgaggtctggctcaagacaggaggttactggtattgtggtgaacgagcaaatgaccttggagagaggcaccctccgcaacttcagagccctgctcttccaaattgagaaggatggccttcggggcaagacatggaagggccgcgaacttacacccgcatctctgcgtgggctcgcccattacatcgtcatggtgaatccccaaaagggaaggccactgctagagcgtgtaaacgccttactgagacaggcctga

SEQ ID NO: 13284 - RNA, 1401 nt, synthetic construct
  source 1..1401: mol_type = other RNA
atgaatgattcagaggactccagagctgtccgccagcaaatatatgaccgtatccgacagtcgtcgcatgatgagtatattctcgatgagatgatcaggcttgggttctggagtagcgacaaagacgctccctctgttcccgaacaactcattagaaaagaggctgaactctctcgagaactgagggaccttttgaagaagcaacggcgtttcgaaaatcggaagaaaatgctgaaagaaatgagaaccaagaggcttgccgagtctaggaagaaacaacaggaaactaaggagagaaaaaaacgggaaagggatgagaaagcccggcagtggcagcagaagaaggctactgcgatcttctacctcggtgaaggcgtatccgctgggctgaaccagaaggagctactgaccgagcggctgaaccagtacaatctgcccgtttttactagcgtggaggcccttgcacaagcaatggagattagtgtgggcgagttgcgctttttaacctttcaccggaaggtgagcaagaccacacattatcagcgcttctacatgcccaagaaaagcgggggagtgcgcttgatctccgccccaatgcctagattaaagcacgcacagtactgggtgtttcataatatccttcagcagatcccgctgcattccgcaggccacggttttagacccgcccacagcatagtttctaacgcagagccgcaccaaggtcaggacattgtgatcaatatggatctccgagatttctttccatctatctcatacaagaggatcaagggcctatttcacgccctggggtactcagaacagattgcgacaattctcgggttactgtgcacagaacctgagatcgatcaggtggagctagatggagagacgtattacgtggccaactcagaaagacatctgcctcaaggcgcgccaacctccccagctctcacgagtatattatgtcggagactggactccaggctgcaaggcatggccgataaattgggcttcgcatatacacgctatgcagacgaccttaccttctccgcctctggtgaaaccgcccgacagttcacacagctgctctggcaggctcgcaaaattatcgaggacgaaggatttgttctgcatccagagaaactgaggattatgcggaagggcagcagacaggaggtcactgggatagtcgtcaacgaaaagctgagcgtgaaccgaaaaactttgaaaaatttccgtgccctcctgttccacatagagaaggacggacttgacggaaagcactggaaaggacagcctgtaagtttggctttcctgaaaggctttgccaactacgtaaagatggtcgatcctgataaggggcgccccctcctggacaggattaataagctgatcgtgtga

SEQ ID NO: 13285 - RNA, 1515 nt, synthetic construct
  source 1..1515: mol_type = other RNA
atgaccgatacggatacgagtcgactgaccaggcaacagttgtatgatcgaatccgcgagagtagcaaagatgaatacattctcgaggaaatgattcggatcggcttctggccttccgggaaagatgcccctactctgccagagcaggtgattcggcgtgaaggcgagttgactagggaactcgatgacctcctgaggaaacagagacgctacgagaacaaggagctgatgctcagagagatgcgaaaagccagaatggctgagtcacgccgtaaacaggcggagacaaaggctcgtcgtgaagaagaaaggcaggctagagccgagagatggcaggacatcaagacaagagaaatactttggcttggccacggagtttcagggggtctgaatcggagaacctctgatgttggcaagctggcacaaaacgggctcccgcattatgatgacgtcaaggccttggctaaggcaattggtattcccgtaggcgaactgaggttcctcgccttttccaggaagacctccaaaatctcccattacagacggttctttataccaaagaagagaggcggaagacggctgatctcggctcccatgccacgcctgaaagctctgcaatacttcgtgcttgagaatatcctggcgaagatccctccgcataaagccgcgcatggatttctgccaggacacagcatcgtgacaaatgcggtgccccacgttggcaaggacgtcgtgattaatttggacttgaaggacttctttccgactattagttatccacgggtaaagggtctgttccggagcctgggatactccgaacagcaggcaacgctcttcggactaatatgcaccgagcccgacacagatgcagtcgaactggatggcgagacttactttgtcgctcgaagcgaacggcacctaccccaaggagcacccacaagccccgccatttctaatctgatcttcaggaaagcagatcgcagacttcaaggggtggccgaccagctgggctttgcctacacacggtatgctgacgaccttaccttttctgcctcaggagatgccgcagaagctttaaccaggctcctatggggagtgcggcagatcgtgaaggatgagggctttgttcttcaccctgacaaattacgcgttatgaaaaagggggcccgacaggaggtgactggtatagtggtaaacgaaaagctcaatatcagtcgcaagagcctcagaaacttccgagccctgctgttccagatcgagaaggacgggtttgagggcaaacgctggaacggcgcaaaaaacttacctccagtgatatgggggtatgccaactatgtggctatggtcaatccagaaaagggtaaacccctggtcgcccagaccgaccgcatttttaggaagtaccggattaggaaatctgacatcaggcctgacttagcacgcaaagccgccttggctaagaaaggggagacttcaggggcagacgaggagaagccttggtggaagttctggtga

SEQ ID NO: 13286 - RNA, 1818 nt, synthetic construct
  source 1..1818: mol_type = other RNA
atgtccaacgagcagcagaacgacagtccaattcaggatccatctcctaagctcacccgacaagaattgtatgatagggttaggcgggtaggcaaagacgaatacattctttccgaaatgatacgcctgggcttctggaaaagagacgccaataaaccctcactgacagacactttcctccagaaaaggagcgccctgcaaagtagactccgggaactgtcgaaggaaaatgcactgtattccgaccctgaaaaggcccttaaggccctgcatgaagagcggaagaaggctgcattggagaagagagagttaaccaagatcgaacgcaatactgcccggtaccagagggcattcgcttggtataccaagcagcagacaagctttacatacctgggtgataacgtgagtgctgggctggaagacaaaaccagcgacgaggaaaaactagtgagccaggccctgccagtgtttgacaatgcgggcgccgtcgcagacgctatgggaataagcacctcagagcttcgatttctctgctatcagaaggatgtcagcactatctcacattaccaggacttcaccatcaataagaagtctggcggggtacggacaatctccgccccaatgcccaggatgaaaagatcccagtattggctcctagacaatgtgctgaacaaattggcaatccacgatgcggcacacggttttgtgtctgggaagagtatcgtttctaatgcacaacctcacgtgaaaaagcaagtggtgattaacctagacatgaaagatttcttcccttcagttagctacaagcgtgttaagggcatgttcattaatctgggttactccgaggaactggccacgacgttcgctctactcgcaacgaagcgagaaactcaagcccttgagatggatggtaaaacttggcacgtagccgtcggcgagagagtgttgcctcagggttccccatgttcacctgctatcacaaacgtgctttgccgtcgcctcgatgctcgcttgctggggatggctgagaaactgggctttacctacactaggtatgcagacgatcttacgtttagcagtgatgatgccagtaaggtgcaggccctcctctggagatcgaagcaaattgtgtcaagcgagggctttgtgatacaccccgataagacacgcgtcatgcgaaggcaccaaaaacaggaggtcacaggggttgtagtcaacgacggcctgagcgtggagagaaaaaccctcaaaaggttccgtgccgtcctgcgccatgtggagatggatggacccgaaaacaaacactggggctctggagagttattccagtctctggcagggtatgcgaattttgtggcaatggttaatccagagaagggaatcccgttacagaaagcggtcgtacacctgaagcgacagcataacatcccgacccccgcgggaaagatctctgctctcaacaagaagttatttcggattaaagccgccaaaggagaagctccccgcgaaacctggtggcagcctatgataaaacccgctccagagttggagttcactccggcccagattcagcataagaagagggaagccatggccgagcagcggcaactgagtgacgcatcctccgggacacagactgaggatgttgacaacaccgcttctgagtctgggaagaagaaacggggaattggattctggatatttgccgtgatcttttcacccatcattctgttggtcgccatcagcagaacatccaccacagctaaaatcgcgctggccgcttccattcttttctggatgtactacttctttatgtga

SEQ ID NO: 13287 - RNA, 1818 nt, synthetic construct
  source 1..1818: mol_type = other RNA
atgagcaacgagcatcagagtgactcccccatccaggatccttcgcccaaactcacaagacaagagctgtacgaccgcgtcaggcgtgtgggtaaggacgaatacatcctcaatgagatgatcagactggggttttggaagaaaaacactgataaaccgaacttaactgatacattcatggagaagcgcgcttccctcagggctcgacttcgggaactgtccgccgagaatgccttgtattccgatcctgaaaaagctctgaaagcactacatgatgagcggaagaaagctgcattagagaagagggagctcaccaagctcaagaaaaacacagccaggtacaagaaagcgtttagttggtacatgaagcagcaagatacattcacttaccttggcgaaaacgtcagcgcgggtttggacgacaagacctccgacgaggagaaactgatttcacaagaaatacccgtgtttgagaacgcaggcgcagtagctgatgctatgggtgtgtccactagtgagttgcgatttctctgttatcagaaagatgtgagcaccatttcacattaccaggacttcgccatcaccaagaagagcgggggcgtgcgtaccatttcagccccaatgccacgtatgaagagggctcagtactggcttctggataatgtgctgaataaactcgccgtgcacgacgccgcacacggattcgtaagctcacgaagtattgtctctaatgccgaacctcatacaaaaaaacgcgtggtaatcaacctggacatgaaggacttcttcccaagcgtgagctataagcgcgttaaaggaatgttcaaacagctggggtactcagaagaattagctactacctttgccctcctgaccaccaagccagctaccgaagccctcgacatggatggtaaaacgtggcacgtggcggtcggcgagagaacactaccacaggggtcgccctgctctcccgcaataaccaatgtgctgtgtagacgattggacgccagacttaaaggcatggccgagaaactcggatttacttatacccgctatgctgacgaccttacattttccaacgacgacgatagtcaggtgcaggccctgctgtggcgctgcaagcagatcgtgtcctctgagggattcgtaatccaccccgataagacccgggtgatgaggcggcaccagaagcaagaagtgaccggcgttgttgtcaacgacggattgtccgtcgaaagaaagacactgaagagattccgggcggttctgaaacacgttgagctagatggcccagagaacaagcactggggaagcggggagctttttcagtctatggcagggtacgccaattttgttgcgatggtgaacccggagaagggcatccctttgcaaaaggctgtgattcatcttaagcggcagtatgatattcctactccgagcggtaagatctcagcgctgaataagaagctgttcaggatgaaagcagccaaaggagaaactccaagagatacgtggtggcaacctcccataaagccagcccccgagttagaactgacgcccgcccagctggaacataaaaaacgggaagccattgcagagcagaagaggcactctggcacgcctacagactcaaaaactgagacacagaatagcgatgccactgacagtgaaaagaagaaacgcgggatcggcttttggatattcgctatcgtcttttctcctataatcctgattgtcgccatggctcgggcatctaccacagcaaagattgcattcgctgcctctttgttcttctgggtctactatttctttatgtga

SEQ ID NO: 13288 - RNA, 1818 nt, synthetic construct
  source 1..1818: mol_type = other RNA
atgagcaattctcacagtaatccacaaactcatgagccgacacaagatcctagccccaagctgaccaggcagcaaatatatgatcggattcgcgagtcctctaaagatgaatacattctcagcgagatgactcgcctaggtttttggaaacctggggattctaagccatctctcgccgaacagttcgtgaataagagggcctcactgatggccagactgcatgggctatcacagctggacaaaagatacagtgatccagagaaagccctggcagaaatgcataaggctaggaagctggccgcactggagaaaagggaacaaacacgcatagcccggaatcgagcagcttttgaacaggcactggcttggtaccagcgtcagaagaaacagttcacttttctgggcgagagcgtcagtgctggcctatcccagaaggcatccgaccccttacgactctcaaccagacacctcattcattttcagtcagtcgaagatgtggccaggcaaatggacatcagtaccgccgaactccgattcctttgttaccgtaaggaggtcagcactgttactcactatcaggaattcgagttacccaagaaatcgggtggaacacgggtgatctctgcccccatgccgcgaatgaaacgggcccagtattggcttctggactatgtgcttaaccttttgcctgtccatgatgccgcgcatggattcgtgccagggagatctatcgtgactaacgcccagcctcacgttggcaaggccgtagtgattaacctcgacctgaaggacttttttccctcgatcacctatcggcgggtgaaggggttgttcggaaagctgggttacagtgaggagctggccacaacattcgccctgttggctaccaagccagtcactcaggcggtagagatggacggcaggacctggcacgttgctcaaggagagcacgtgctcccacagggttccccatgctcccctatgattactaacgtactgtgtaggcgcatggatgcccgattacaaggtatggcagataagcttggatttacctacacaaggtatgccgacgacctaacatttagctcacaggacgctggcaaagtgcaatccctgctgtggcgctgcaagcagatcgtcacggacgagggctttgtggtgcaccctgaaaagacgcgcgtcattcgcagacatcagcgccaggaggtgacgggggtggttgtgaacgacagattgagcgtagatcgtgcaaccctcaaacgttttcgggcagtattacagcaagtcgccctggacggaccagaaggcaaaacctggggcgccggcgaattattccagagcctggcgggctacgcaaattttgtggcgatggtgaaccctgaaaaaggtcttcctctgcagaaacaggtcctgcacctcaagcggcagtacgggtttacagttcccaagggaaagataggagagttgaataagaggctgttcagacttaaagttgctagagggcagaaaccccggacacactggtggcagccggaagaaaaacctatgccggtgctcgctctgacccccaaacaaaggcaggaggagctcgagcagaagagagcagttgtgcccaagaaggaggctagcgtgtcagatgtcgagcctgaagaaaccgaggccgcgtccgatgaggtcaagttgtctccattcgcttgggtgatggtagttgctgtcatgcccttcgctcttttgtggatgttcatcaaggcacccattaaatccaaattgtgggttctgggcatcggggcagtgatctattggctcttcttcagttga

SEQ ID NO: 13289 - RNA, 1812 nt, synthetic construct
  source 1..1812: mol_type = other RNA
atgagtgactctaacaaacatcaatccgctgagacagtccaggaccccagcccaaaacttactaggcaacagatatatgataggattcgtcagtcatcaaaggacgattacatcttacgcgaaatgatccggctggggttctggaaatccgacaaggaccagccctccttgacagagaggtttgtggcgaaacgcacagctctcatcacccggctgcggactttgacccaactcgataggctttatagcgaccccgagaaggcactagctgccatgcacaaagctcgaaaaaaggccgcactggagaagagagagcagaccagaatcgcacggaatcagacaagatttgagaaggctctggcatggtaccagcgccagcgagaggccttcacctttctgggcgaatccgtatccgggggattggcccgcaagactagcgatcccttgcggctttctcgatatcagcttatgcacttccagtctgttgcagaggtcgccggctcaatggctatacctatgtctgagctccggttcctgtgttaccgaaaggaagtttctcctgttagccattaccaggattttgaagtagctaagaagtccggaggtaccagaatcattagcgcacctatgccacgcatgaaacgagcgcagtactggctactggatgccgttctgaccaggatcccggtgcacgatgccgcgcatggattcgtcccggagagaagtatcgttagcaacgcccggcctcatgttggaaaggccgtcgtgatcaacctggacctcaaggatttcttccccaccatttcgtacaggagagtgaagggcatgtttcaccagctaggttactccgaagagttagcaacaaccttcgcgctgattgctactaaacctgtcacgcaggccgtggaaatggacggcaagatttggcacgtcgcacagggcgagcacgtactgcctcagggctctccctgtagccctgcgatttccaatctgctgtgccgcagaatggacgctagactgcagggtatggccgataagttgggctttacatatactaggtacgccgacgacctcacgttcagtagcgatgacgtgtccaaagtacaaagcttattatggcgatgcaagcagatagtggccgatgagggattcgtcgtgcaccctgagaaaacccgtgtgatgaggcgccaccaaaggcaagaggtgactggcgtggtggtaaatgatgggctgtctgtggaacgtaaaaccctgaaacagttcagggcagtgctgcggcaggtggaactcgatggacccgctgggaaacaatgggggaaaggggaactgtttcagtcactggcgggatatgccaactttgtcgctatggtcaaccccgaaaaggggattccattgcagaagcaggtagtgcgcctcaaaagacagtacggattttcagtgcctaaggggaagatgggcgaacttaataaacgtctttttcggctgaaggtggccaggggtgagtcgccaagaagtcgctggtggcaaccacatgaaaagccagccccggaattggctctgacccagcaacagaaggccgcacaacggcaggcagccaaagcagactccgtcagtccacaggtcgttacacccgccgctaccagtgagactgactcagagacagacccaacagccttcagccccatgatgtgggtgatgatgatgttaactcttccatttgctctcctctggatgctcgtgacggcctcatggaaaacgaagctctgggttctctctctaggctatgtgctgtattggctgttctttggttga

SEQ ID NO: 13290 - RNA, 1824 nt, synthetic construct
  source 1..1824: mol_type = other RNA
atgcgcaattccgacccctcacagaataacagcaacaacaacaataattccgttctgccccccgaaccttctcccaaacttaccagacagcagatttacgacagaataaggcagtcctctaaagacgagtacatcctgtctgaaatgatccgcctgggcttctggcagaaagacaggactaagccatctatcgccgaaaaattcatcgagaagcgatcagccctactgtccagactgagagagctgacacgtctgaacaggctgtatcaggatccagagaaggctctcctcgccctgcataaaacacgcaagaaagctgccttggaaaagcgggagcagattagaataaaccacaaccttgcacgttacgaaaaagcgcttaggtggcataagaagcaacagacccattttacttatctaggcgatgccggatacggagataaggcactgactgcaggcctgcaacagacgacgtgcgatacagcgaggttaacggcgcacggtttacccgcgtttagccacgtcggggagctcgcagacgcaatgggaatcagcactagcgagctgcgtttcctctgctaccagaaagacgtgagtacagtcagccactaccagcatttcgcactgagcaaaaaaaccggcgggacccgactgatatccgctcccatgccgagaatgaagagggcacagtattggctgctcgacaatgtgttaaatcttctgccaatccacgatgccgctcatggatttatccagggtaggagcatcgtaactaatgccaaaccccacactaataagcaagttgtgatcaaccttgatctcaaggactttttcccaagtattacttatccccgggtcaaggggatctttaagcaatctggctattccgaagccctggccactaccttcgccctgatcgcaaccaagagtgacacccaggccgttgagatggatgggcagacataccatattgctaacggcaagcgcgagctacctcaagggtcgccatgtagcccggcgataaccaacgtcctgtgtagacggctagacgcacgactccaggggatggctcacaaactgggtttcacctatacacgatatgccgacgatctcacattttcaagtgacgagacagataaaatacagtacgtcttatggcgctgccagcggattgttactgatgagggatttaccctccatccggataagacacgggtgatgcggaaacaccagaagcaagaggtaacaggcatcgtggtgaatgacggtttgtctgtggaccgccctacccttaaacgatttagagcagtcgttcgccaaattgagcttgatggacactatggaaagcattgggggactggagagctgtttcagtcgttgaccgggtacgccaactttgtggctatggtggcaccagaaaagggcattcctttgcagaagcaggtggctcacttgaagaggcagtacaacattcccgtggctgccggtaaaattacggccctcaataagagactcttccggttaaaagcagccaagggcgaggctccacgggaagcttggtggcaacctgccgaaaaacccgctcctgtccttgccctgacccaacagcagatggatgcccagaagcaacaggcaaggcaggccgcgaaggccaaccaagctaatacacatagtgcccacccagaaatggctcctgaccacacgaaccctgctttcatctcaggtggcaacgaaacaaataccgcctcccctaatcgcttcggctcaccagtagtgtggaccgtggttgtggtactgctcttgttgaaaattttcgtgtactga

SEQ ID NO: 13291 - RNA, 1899 nt, synthetic construct
  source 1..1899: mol_type = other RNA
atgagcgacagcagctcccaaagcacatcccggagtaactcatcaaacgctagccatcaggaggcctcggtgactgattctgcaccaaaacttaccaggcagcagatatatgaccgaattcgcgaatcctctaaagatgaatacattctccaggaaatgatccggctgggcttttggaacaaggatgacgaacagcctagtctcactcaggagtttatcgagcgcagatccgagctcaccagaaagctgcgcgagctttctgatctcgactccctctacgcagaccccgagaaggctttggaagctctccacaaggagagaaaaaaagccgcgctggaaaagagggaacagacaaggcaggccctaaaccagaagcgttatgatcgtgctctcgcatggtacaaccagcaaaaggagactttcacttggctgggggacgatgtgagtctgggattgaagaataaagaaaatgatgatggccggctggaggagagggagctgccaacatttgagaacattgctgccctagcgggggccatgggcatctcagttagcgagttaaggtttttggcgtatcagaaggatgtgtcaaacgtctctcattaccagcgattctcaatcgctaagaagactggcggactccggcacatttccgcaccaatgcctcggttaaaaagagctcaatattggttgctggacaacatcctggctaaactttctgtgcacgacgccgcccacggttttgtgaccggtcgctcaatagtttccaacgcccaaccccacgtcggcaaagccgttgtcatcaatatggatctgaaggacttcttcccgtccatcagctacaagagggtaaagggactgttccagtcccaagggtacagcgaggagcttgccacagtgttcgggcttctcaccactgagtccgagacacaggagctggagatggatggccaaacctggttcgtggctcagggagaaagaagactgccccagggttctccctgcagtccagcaattacaaatgttatgtgccggcggttagacgcacgtctgcagggtatggcggataaactggggttcgcctatacccgctatgctgacgacctgaccttcagtacggattcggccgaaaaagcccaggcactcttgtggcgagccaaacaaatagtggtgtcagaagggtttaccctccaccctgacaagacgagagttatgcgcaggcaccaaaaacaggaagtaaccggtgtggtggtcaatgagaaattgagcatagaccgaaagaccttgaagagatttcgcgcaacactgaagcagattgagttggacggacccgatgggaagcattggggtgcaggagaactgtttgcctctatggagggctatgcgaatttcgtcgcaatggtggacgccgaaaaggggattccattacagaagacactggtacacctgaaacgtcagcatggggtgacaacgaaacatggaaaagtgaccgagcttaataaaaggctgctgagagtcaaagcagccaatggcgaaaaccccaaggaaggatggtggcaacccgaagagaagccggcccctgaacttgagctcacgccaaatcaaatcgctgagcgaaagagggctattaaaaggcaacggaatcaggaacagcgcgagaatcagggcgctaactctgaatggcaggatgcagacttcaaccaggacaatgaggccaaccagggcgatggctggagtgacctagaaagcgatgctaaaaagaaatggactactcgggagtacatcctaggactgctctttcttcctatcgttctggtaatgctttttttcaaggccccttggaatattaagtgtatcgtcgtgggcgtcttatggctgctgtacttgtacctgaactga

SEQ ID NO: 13292 - RNA, 1851 nt, synthetic construct
  source 1..1851: mol_type = other RNA
atgagtgatacctctcaccactcaagccaaagtgacagccaggaggctacactgtcggattccgcccccaagctgacgcgacaagagatctacgatcggatcagggaaacttcaaaggacgagtatattctgcaggagatgatacgactcggcttctgggacaaagacgaggagcaacccaatcttacacaggaattcattgaacgccgagccgagctgatgcgtaagatgagagagctctcacagttggattcactctattccgaccccgaaaaggccttggaagctcttcataaggaaagaaagaaggcggccctcgagaaaagagagcaaacacgccaggccaggaatcaggagcggtacgagcgcgctctggcttggtatcacaaacagaaagagagctttacgtggctcggggacgatgtctcactcggacttgtgaacaaggaatccgacgctggaaaattagagaatcaggacctcccccattttgaaaacatcgcctccctcgcccaggctatggggatttccgtgagtgagctgcggttcctcgcctaccagaaagatgtcagcaatgtgtcccattaccagaggttcactatagcgaagaagagcgggggtgaaagacacatctctgctccaatgcctcggctcaaacgcgctcagtactggttactggacaatgtgctcgagaaactgaccgtccaccaggccgcacatggttttgtgtctggcaagagtatagttacaaacgcccagccccacgtcgggaaggctgttgttatcaacatggaccttaaagatttctttccaagcattagctacaaaagggtgaaaggtctgtttcgtgcccaaggatactctgaagagctggctacagtcttcggtcttttgaccaccgagccagaagtgcaagaattggaaatggatggcaaaacctggttcgtagcccagggagagcgccgattaccacagggctccccctgtagcccagccatcaccaacgccctatgccgaaggctagacgcacgcttgcaggggatggcagacaaactggggtttacgtactccagatatgcagacgacctcacattttccacagacgagcctgataaggttcaaagtctgttgtggagggccaagcaaatcgtgagtgatgaagggtttactctgcatcccgaaaagacaagggtgatgcggagacatcagaagcaggaagtgaccggcgtcgtggtcaacgacaaactgtctgttgataggaagaccttgaaacgttttagggccgtgctgaagcagattgagttggacggtccagagggaaagacatggggagcgggcgatctattccgctctctggaaggctatgccaatttcgtcgccatggttgatcctgagaagggaattccacttcagaagactctggtgcaccttaaaagacagtacggcattcagactaaacacggcaaggtcactgcacttaataaacggctgcttcgggcaaaggcagcgaaaggcgaagcgtcaagagagaattggtggcagcctgaagagaagcctgagccggagctggaactgactcccaaccagaaggcagaacaaaaacgggcagagcagtcggcacgtagggcagagcaaagagccaacaccgagagccagaacgtagaatctgagcagggagatggctgggacgagctggattctgatgctaacaaggtttggacccctcgggaatatgtgctggtgactctgatgttacctctggtgctgatccacctcttcttccgcgctccgtggaatgtaaagtgcatcgtggtaggggtattatggctattgtacctgtatctgacctga

SEQ ID NO: 13293 - RNA, 1779 nt, synthetic construct
  source 1..1779: mol_type = other RNA
atgagtgagtcaagcacaaaactcactaggcaagagatttacgataagatacgcaaaagctccaaagaagaatacatcctggatgagatgaaaaggctggggttctggcgcaacgatgaagagcaacccaatctgacccaagaatttgtcgagaaaagagcacagctgatggcacagctgcgggaattgagctcccaggacgagctttatagtgacccagagaaggccctggcacatctgcaccaggaacggaagaaggcagctcttgaaaaacgtgaacaggttagacagactcggaacaaaactcgatacgaaaatgctttgaattggtatcagaagcagcagaaggaaataacctatctgggagagaaattctctgccggcttgagtgagaagattagtgacaagtctaaactcactagccagggtctgccttattttgccgatagccaggcccttgctcagggcatgggcatctccataggagagctaagatttctgtgttaccaaaaggaggtgtctcaaacaagccattacaagaagtttgcaatagagaagaagaccgggggcaagaggcacatctctgcccccatgcctcgtctcaaacgggcacagtattggctgttggaaaatgtgcttgcacctgttaaactgcactcagcggcacacgggtttgttccgggaaggagcatcttatctaacgctcttccccacatcaacaagggggtggtagtgaattttgatctaaaagacttcttcccatctatctcctatgctcgcgtgaaggggctcttctgcaagcagggctattccgaagaactgggcaccctctttgccctcttagctacagagccagatacagaggctgtggccatggacggtcagatttggcatattgaccagggaccccggattctgcctcaaggagccccttgctccccagccatcacaaacatcctatgtcgcagattggacgcaaggctggccggtatggctgagaagctaggcttcgcgtacacgcgatatgcagatgacctctcttttagttctgatgagcctaacaaagtgcagtccctgctctggcgcgtaaaacagatcgttacgtcggagggattcttgctgcacccagacaagacgaaagttatgcgccggcaccagaagcaagaggtgaccggcgtcgtcgtgaatgagaaggcctcagtagaccgaaagacactgaaaagattcagggctatcctccatcaaatcgacctctacgggcctgaggggaaatcctggggtccaggcgccctttttcctagcctcgaaggatatgccaacttcgtcgccatgctggatgcccaaaaggggattcccttacagaagcagctggtgcatatcaaaagaaagtacggcgtgaaaacccggtcgtcaaaagtcacccagctgaacaagagacttatgcgagtcaaagccgggttgggcgaagctccccgtgagaattggtggcagcccgcggagaagccagaaccgattttagagcttactcccaagcagcaagccgcccagaagcaggccaggaaggtgaccggaccagtcgagcaggaatacgcggagagtgcttcagagcaaaatccccagtcagaggcagaagaagacactaaactgtccacaaaggattacatattcattggcttgttcatgccgatcgctttagcgcagatgatttacaaagctagctggaaaaccaagatcaaactcatggtggtaggaactattatttggctgctgtttggttga

SEQ ID NO: 13294 - RNA, 1710 nt, synthetic construct
  source 1..1710: mol_type = other RNA
atgagcgaatctccaaaattgacaagacagcaactatacgagcggatccgcgagacgagcaaagaagaggtgatcctggcagaaatgatccgtctcggattttgggatggcgagcagaaaaaacctgaccttaccgcagaatttatcgcgcaacgagcagctttggagaagagactggccgaacttgggcaacagcagcaactctattcagatccccagaaggcattaagggagctccacaaggccaggaagaaggccgccctcgagaaacgggaacagactagaattgcccgaaaccaagcacgctatgagagagcacagcagtggcatcagaagcaacagtccgaaatttcttggctgggggaaggcttttcctttggcctctctgatacgacacagaatgaggcaaggctgaaacagcagaatctgccgttgttagctgattcccagaccctggctaccctgatgggcatcaccattaatgaacttcgttttctgtgcttccaaaaggacgtttcccgtattaaccattaccgcagattcagtctgctgaaaaagtcagggggggagcgactgatatcggcacccatgcctcgccttaaaagggcccaatactggatattggagaacatcctcaacagagttaaactgcacgatgccgcgcacggattcgtagccggaagatccatccttacgaacgccctccctcatgtgggtcgcgctgtcgtcattaatctagatatggagaactttttccctacagttagctatcgccgagtgaagggcctgttccgacagctggggtatggagaacaaattgccaccgagctagccctgttgactactgagccagaaaccgagcaggtagtgctagacggtgaaaattggtttgtgcagcagggagagagattcttgccacagggagctccgtctagccccgccataagcaacataatctgtaggagactggacagccggttacacgcgatggctcacaagcttggcttcgcttacacaaggtatgccgacgacatgacctttagttgtgccgacaaccgtgggaatgtccagcagctcctgtggcggtgcaaacagattgtgcaggacgaggggttccgcgttcatccccagaagactcgggtcatgaggaaacctcagcagcaacaggtgaccggaatcgtggtaaatgagaagccttccctcgatagaaagactctcaagcggtttcgcgcactgctgttccagatcgccaaggacggtatggaagggaaacggtggggccccggagaattgatggcctctatcgagggttacgccaatttcgttgccttagtcgctcccggcaagggtattcccctccagaaacaggtgacagatatcaaaaggcagtacggctatgctacacagcctggcaggataactgcactgaacaagaagctttttcgcgctaaggctgctcggggtgaatccccaagggactcgtggtggcaagcacaaggcccgagtgcgccagagctcgagcaaaccgccctgcagaagcaggctcttaggcgagcggcttcagccgcggaagatgtgccaagcgctgcaaagaacgcctctgtgcccgatgacttcgcagagacaccccctgagcggccaaaaaaaagttcacggttatggtggtggttcctggccttcgtggtctacctgatttttagatgggcctga

SEQ ID NO: 13295 - RNA, 1704 nt, synthetic construct
  source 1..1704: mol_type = other RNA
atgagcgagacacccaagttgacacggcaacagatctatgagcgcatccgcgaaactagcaaggaagagtacattcaggcagagatgatccggctcggattttgggatgcaacgcaagagaagcctgacttgacgactgagttcattacaaggcgcgcggctcttgagaagcaactggccgagcttgggagaaaacagcagctctacagcgatccccaaaaggctctccgggaattgcataaagcccgcaagaaagcggccctcgagaagagagaacagacccggatcgcccgaaacaaagcacgctatgagcgtgcccagcagtggcacgaaaagcagcgctcagaaatcacctatttaggcgcaggctattcatttgggcttgacgagacaacccatgatgacgctaggctgcagcagcaccacctcccccagttagctaattcccaggccctagccacggccatgggcatcactctgaatgagctaaggttcctttgtttccagaaggaagtgtctcggattaaccactacaggcgcttttccctcatgaagaagaacggtggacagcggctaatctccgcaccgatgcctcggctgaaaagagcccagtactggattctggagaatatcctgaacagagtgcccctgcacgatgccgcgcatggcttcgtaaccggccgtagcatactatctaacgccctgccacatgtgaaccaggctattgtcgtgaaccttgatatggagaattttttccccacagtgaattacaggagagtgaagggtgtttttagacaattggggtatagtgagcagattgcaaccgaactggccttattgacaacagaacctgaggccgagcaggtggttctggacggggaaaattggtttgtgcagcagggagaacgatttctgccccaaggggcaccatcttccccagccctgtcgaatataatatgtcgaaggctggatagtcggatgcatggaatggctaacaagttggggtttacttataccaggtacgctgacgacatgacattctcttgcgccgacaaaagcgccaacgtccagcagctgctgtggcgctgcaaacaaattgtgcaggacgagggctttagacttcacagcgagaagaccagggtaatgagaaagccccagaagcaagaagttactggcattgtcgtcaatgaaaagccttccctggatcgtaagactctcaaacggtttagggcgctgctgttccaaattgctaaggatggtatcgaaggaaaaagatggggcgccggagagcttatggcctctttggaagggtacgcaaacttcgtagcccaggtggcgcccgataagggcatcccactccagaaacaggtcacggatctgaaacgacgcttcggttatgccacccgtcctggacgaattaccgcactcaataaaactctcttccgggctaaagctgcacgaggcgaagcgccgagagacaactggtggcaggctcagggtccaagtgcaccagttttagagctgacaatgcagcaaaagcaggccatgcgcagaccggtttcagtgaccagtccaacttcccctaataacgacacacctcggaccgtgaatgccgacgcacctgctcaccaacccgctaggacctcagtcaaatggtggataatcctcatcgctataatcctgtacttcctgatgaggaaatga

SEQ ID NO: 13296 - RNA, 1611 nt, synthetic construct
  source 1..1611: mol_type = other RNA
atgagtgagtctccaaaactgacccggcaacagatctacgagcggatccgcgaaacttctaaggaggagtacatacttgcggagatgatcagacttgggttctgggacgcctcccaggaaaagcctgacctgacagcagagttcatcgcggaaagggctgccttgcagaagaaactagccagtttaggtgagcgccagaggctgtacgacgatccccagaaggctttgagagagctgcataagacccggaagaaagctgctcttgagaaacgcgagcagacacgcatagcgaggaatcaggccagatacgaacgggcccagaggtggcaccagacacagcaaagcactatcacctggttgggagagggctactcgttcggactcgacgatacaacacacaatgaagcacgcctggcacaacagaacctgcctccattggccgatagtcaggctttggccagcgccatgggcattacgctaaatgaattacgcttcctctgttttcagaaagccgtcagccgtgtcaatcattatcggcgattctctatcgctaagaagtctggcggcgagcgatttatttcagcaccgatgccaagaatgaaaagggctcagtattggatcctcgagaacatactgaatcgcgttgcactgcacgatgccgcacatggctttgtggctggccggagcatactgaccaacgccctgccccatgtcaaccgtgcaattgtggtgaacctggatatggagaacttctttcccaccgtgtcatacagacgggtgaaaggcctgttccggcagttagggtacgccgagcagctggcaaccgaactggctcttctgactaccgagcccgaggccgaacaagtcgcgcttgacggagaaaactggttcattcagcaaggtgaacgcaccctgcctcagggagctccatcttcaccagcaatctccaatatcatttgcaggagactcgatagccggctccacgcgatggctcagaaactaggctttacgtatactcgctatgccgatgacatgacattttcatccgcagacaaaaccgccaacgttcaacagctgctttggaggtgcaaacagatcgttaatgatgagggttttagactccacccggagaagactcgagtgatgagaaagccgcagaaacaagaagtaactgggattgttgtaaatgagaagccatccgtggaccgtaagacattgaagaggttccgtgctttattgtttcagatcgccaaggacggcacacaagggaaacgatggggagcgggagaactcatggccagcctggaagggtacgctaacttcgtcgccctcattgctcccgagaaaggcattcctctgcagaagcaggtgactgaccttaagcggcagtatggttatgtgacgcagcccgggagaattaccgccctgaacaagaagctctttagagccagagctgccaggggagaggcacctagggaaaaatggtggcaggcacaagggccagcagctcctgtactcgaacagaccccccagcaaaagcagcccgcacctcaaccagcccctgtgtcctcccagcccgaacctcaaagtttcgccgcccgaaggggttga

SEQ ID NO: 13297 - RNA, 1701 nt, synthetic construct
  source 1..1701: mol_type = other RNA
atgagcgagtccagtaagctaacccgtcagcagatatacgagaggattagggaaacttccaaggaggagtatattctggccgagatgatacgtttggggttctgggatgagacacaagataagcccgcgctcactgcagaattcattgcccaacgtgctgcattacagaagcagctcgccgagctcggacagaaacagcgcctgtatgacgatccacaaaaggctttaagggagctccacaagactcgaaaaaaagctgccctggaaaagagggaacagacaaggatagcaagaaatgaggcacggtacgcgcgcgcactgcaatggcaccagaagcagcaggccgaaatcacctggctcggcgaaggtgttagctttggattggccgatactgcccacaatgaagcacggcttcaggcccagaagttaccactcctggccgactcacaagctctggcatccgccatgggaattacgattaatgaactcaggtttctgtgcttccaaaaaaatgttagcagagtgaaccattatcggcgcttctctctggccaaaaaaaatggtggggagcgcctcatcagtgcccctatgccccgcatgaagcgagctcagtactggattctggaaaacatcctgaatcgtgtcaagttgcatgaggccgcccacgggttcgtaactggtcgcagtatcttgtctaacgctcttccgcacgtaaatcaagcgatcgtggtcaaccttgatatggagaacttctttcctaccgtgaactatagaagggtcaaaggcctgttcagacagctcggctacgccgagcagctggctactgagttggcactgttgaccaccgaacctgaggtgacgcaggtcgcccttgacggcgagacatggttcgtacaggaggacgccagatttcttccccaaggcgcgccaacatcaccagctatcagcaatataatctgtcgccggctggattcacggctgcaagcgatggcacagaaactcgggtttgtgtacacgagatatgcggatgacatgaccttttcttgcgcccagccctccgccaacgttcaacagctcctatggaggtgtaagcaaatcgtgcaggacgagggcttcaagatccatcccgagaagacacgcgtgatgcggaaaccccagaagcaggaggtgaccggcattgtggtgaatgagaagccgtctgtcgataggaaaaccctgaagaggtttagagctcttttattccagattgccaaggacggcatggaagggaagcggtggggatccggggaactgatggccagcttagaagggtatgctaactttgtcgccatggtggcgcctgaaaaaggaatagtgctgcagaaacaggtcactgacttgaagcggcagtacggttacaccactcagccaggacgaattaccgccctgaacaaacagctgtttcgagctaaggctgctagaggcgaaagcccccgagacaactggtggcaggcacaagaagctcctcctccagtacttgaacagacagcccaacagcaggcaacacagaaagccaccagttcggcaacagaggctctacatttcgatgcacagcctgagacacacgcaggacaggtgcccgacaaatcaagatctccactgcggttcttttgggttctgatcctcgttcttctaatcatgatcctggctagaatgttttga

SEQ ID NO: 13298 - RNA, 1764 nt, synthetic construct
  source 1..1764: mol_type = other RNA
atgtcggaagagaagaagctcacacggcaggagatttaccagcgaatccgagagacttccaaggacgagtatatactttctgaaatggtacgtttaggcttttggcctgataattcggagaaacctaccctctctgaggcgtttatcaagaagcgcactgagctgcaagcggcactgagggaactgggacagcaacagatgctatactctgaccccgaaaaggctctgaaggaaatgcacaaacagagaaagcaagccgctctcgctaagagagaggagacaaggagaaagaggaatgaggagcgcttccagagggctcagcattggagagaggtgcaggcacatcaaattacctacttaggcgagggggtgagcggaggccttgaagacgcgaccgccgatgaggccagacttcggagccagaatctgcccataattaatgccgcagaggagctcgcaactgcgatgggtgtgactctcaacgagctgcgattcctggcttattcaaaagaagtgtctaagctgagccactaccagcagttcgcaatcgcaaagaagaccggtggtgtccgcgaaataagcgctcccatgcctaggatgaagcgcgctcagtattgggtcctggataacatattggcaccactcacactgcacgaggccgcccacggattcgtggtcgaacggtccatcgtgtcaaatgcccagccgcatgtcggcaaggacgtggttattaacctcgacttgaaagatttcttccccactgtaagctatgctagaattaaaggcgcctttcggcacttggggtactccgagcagatcgcaacaattctgggactgttatgctcacagcccaagactcaggaagttgaaatggatggccagaaatggtttgtcagcgaaggggaacggttcttaccccaaggagctcccacgagtccggccatctccaacgtcatctgccgaaaactcgacagacggctacagtccatggctgcgaagctgggctttacgtatacgagatacgccgacgacgttaccttcagtgctgacgggaaatccgacgatgatgtcaagcgacttctttggaggtgtcgctctatcattaaggacgagggcttcgtcgtgcacccagacaaaacccgtatcatgagaaaacatcggcgtcaagaggtaaccggggtcgtggttaacgacaaggcctctgtggagaggaaacagctgaagaggtttcgggctttgctgttccaaatcgatcgcgatggtcctgcgggaaaatcatggggtcgcggggagctgtttgcggcaatagatggttttgccaactacgttgccatggtaaatccagttaaaggagtgcctcttcagcaaaaagtggcccaactgaagctgaagtatggagtgaaggttaagcctagtagggtgttggccctgaacaagaaacgtatgaggctcaaagctgccaaaggggaagccccaagagaagattggtggcaggctcaggcatccgctgcacctgaattggagaaaaccgccgaacaggtgaaggaagaacgcaaggcagagaaagccgagcagcagacacaggccgtacccgctgcctcaagtgcagatccggcccctgtgcggacaagcacaccagtgcagagccagcagcaagcacaacccagtgctccagccccagagggcgaatcccatgccaaaaccgggtggatcatgctagctattggcattcttatctacctggccatgaaaatgctcggctga

SEQ ID NO: 13299 - RNA, 1728 nt, synthetic construct
  source 1..1728: mol_type = other RNA
atgtcagatgggaacaaacttaccagacagcagctatatcagagaatacgggaaacctctaaagacgaatacatcctttctgaaatgaagcgcttgggcttctggcccgaagatagcgacaaaccttctctagccgaggaattcattaatgagaagagcgagatttccaagaaactgcgtgagctggggcaaaagcagggtttgtattccgaccctgaggccgctctgaaggagttacacaaacaacgcaagaagcaggcgttggagcgacgggagcaaaagcgtcaggagaggaatcaagcacgctacgatagggccagtcggtggtataccacccagcagaagctcatcacatatgtgggcgaccacttctcaaagtccttaaacaacgtggaatcccacgaggataagcttaaacagcaagggctccctgtcctccactcttcaaaagatctggcaggcgccatgggaatcacgctcaatgagttgaggtttctggcataccagaaagacgtttccgcagtaaaccattaccagcatttcgagatcctcaagaagaccggcggatcacggctgatttcagcacccatgccccgcctgaagagggctcagtactgggtgctggctaatgtcctggaaccgctgagcattcatgacgcggcacacgggtttgtgccaaaaagatccattgtaagcaatgccatccctcacgtggggaaggacattgtcatcaacctggatttgaaggacttttttccgactgtgacctacccccgaatcaagggggtatttcacactctgggatacagcgagcacctagccactattctgggattactctgtactcagtctaacatccaggaagtggagctggacggccaaacctggtttgtgggcaatggagagaggtacttgccacagggggcccccactagcccaaacttaacgaacatactttgcagaaaactggacgccagactcaatggcatggccgagaaacttggattcacatataccaggtatgcagatgacctgacatttagcagtgatagtaaggacgaacagcaggtcaagaagcttctgtggcgctgtagaaaaatagtccaggatgagggtttcgtgatccatcccaaaaaaacccgaatcatgcgacgtcataaaaagcaggaagtgacaggcatcaccgtgaacgataagatgggcgttgataagaagaccctcaaacggttccgcgcggtgttatttcaaattgacaaggacggtccagatgggaagacttgggggaatggtgatatcttctgcgccatcgacggttacgctaactacgtggccatggtttcgcccgataaaggcattgctttgcagcaacaagtagctcatataaaaaggaagtatggagtgaacgttaagaaaggcaaggttctgtcgctcaataagaagctactgagacttaaagccgctgctggagaacatccacggcaggagtggtggcaggctctcccacctgcgaaacctgaaaaagagaagacggccgaagaaattaaacaatctaaggtcacagaccagcaggagaaaagtaaggaccgggataataaaaaccactggacacaggccaatacaaacctgtcccaggatgacaagaaagttagttccacaggctacaatatgctgaaaatattcctcttcgtcactgcactggctatcgcctatagctttctgaagaactga

SEQ ID NO: 13300 - RNA, 1725 nt, synthetic construct
  source 1..1725: mol_type = other RNA
atgagcgcttcctctccaggaaagctaactcgtcagcagctctacgacttaattcgcgaatccagcaaagatgaatacatactcagcgagatgatcagactgggctactggaacgaggacagtgggaagccgagcttgcccgctgaattgattgctcggaaaggggagctagagcgggaattccaggcccttctgaaaaagcaacagcagtaccaagatccgcagaaggcgcttaaagagctgcataagcagcgaaaggcagaagcactgaagcggcgcgaagagacgaaacagaataataacgaggctcggtatcagcgtgccgtgaattggcataacaaaaaccaagccgagataacctacctgggcgaggatttctcggcgggcctacagggttcatttaccgacagagaaaggctgactaaccaagaactgccagtgatagactccagtctcgcattggccaaggccatggggatttctattaatgagctccgctttctttcctttggccgcaagacatctaaaactacacattaccagcagtttcttatagagaaaaagacaggaggcacacggcgaatttctgcccccatgcctaggctcaaacggctccaatactggatcctgggaaacattctggaaaaactgccactgcacgacactgcccacggctttgtggcgcaaagatccatagtcaccaatgccaagcctcacgtcggagccgacgtagtggtcaacatggatttaaaggactttttccccacagtgacttataagcggatcaagggactcttttgcaagcttgggtatagcgaacaggtcgccaccgtacttgccctgttatgttctgagcccgaaattgacgaagtagagttggatggtgagactttctacgttgctaggggagagcgatatttgccccagggagcccctacatccccagcaatcagcaatttactctgcagaaatctggacaggcgtgtgttcggcgcgagtaaaaagctggatttcacctatactaggtatgccgatgacctaaccttcagtgggaccagaaagtctgcacaccagttaaggaagttgctgtggagagtggaacagatcgttatcgacgagggcttcgtggtgcacccagataaaacccgcattatgaggaagaatgcccggcaggaggtgacaggcctggttgtcaaccagaagttgagcgttgatagaaagacactgaaacaattccgcgctctgctgtttcagattgaaaaagatgggatcgagggaaaggtctgggggaaggggcagctgatcccgtcaatcgagggttatgccaactttgtagctatggtgaatcctgagaaaggcctcgcactccagaaacgagttactcagattaagaagcagtacggattcgaggtcaaaccaggtaaactggccgctctgaacaagaagattatgcgcgtgaaagctaccagaggcgaggcgcctagggaagactggtggcaggcagagcctaaaccctcacccgtgaaggagaataccgcagaacagctgaaagcccagaagaaagcaaaggcaatcgagaagaaagaagctgaacaatcattgcctgaacattccaccaacgagcaacgagagattgaaaacacggaggatacaaataacatcggtacgctgatgatctacatagctatcggcctccttcttatcgtgatcttcctcgggtcgtga

SEQ ID NO: 13301 - RNA, 1704 nt, synthetic construct
  source 1..1704: mol_type = other RNA
atgcaaactagcgctccagggaagctgactaggcagcagctgtacgacctcattaaacagagcagtaaagacgggtatatcctgaaagaaatgatccgtcttggcttttggaacgaaacgacaggcaaaccttccctgacccaggaatttattaccagaaaaggggaactcgagaagcaatattctcagttgctgtcactgcaccacaagtatcagagcacagagtctctgctgaaagatttccacaaacagcgcaaagccaaggcactcttgaacagggaggagacaaaattgaagaacaagcaaatcaagttcgaaaaggcccagaactggtttaagcgaaatttaaccgagatcttatacctcggagaaaatgtgagcgctggtctgaatgggaagtttacggaccatgacaagctgaagtcaaattcgctgcctgttatagaaaactttgagacattggcacagtccattggcgtatctgtgagcgaaatacgcttcctgtcctatgatagaaaggtgagtaaagtttcccattaccagcaattcctcatcgccaaaaaaacaggtgggacgcgaaagatttccgcgccaatgccccgtctaaaacatgtgcagtactggattcttaccaacatcttagaaaaggtggcgatacacgattccgcccacggtttcgttaccggaaagtcaatcgtcacaaatgctaagccacacgtaggtgctgatgtggtcatcaacatggacttggaaaacttctttcccacagtcaactacaaacggattaagggcgtgttctgcaatttaggatacagcgagaagattagcaccgtgctggctcttctgtgctctgagtcggataactgtgaggtcgtcctcgatggccaaacttattataggaatcagggggaacgagtacttcctcagggagcacctacatcccccgctttgaccaatatactgtgtcggaagttggataggcggatgttgggcatgtccgataagctcgggttcaagtatactagatacgcagacgacctaaccttcagtagttcacagcagaccgcccataacctgcagaagcttttctggcgcgtgaaccagattatccccgatgagggctttattctgcaccccgacaagacccgcgtgatgcgcagaaataataaacaggaggtgactggagtagtcgtgaatgagaagctgagtgtggatcggaaaaccctaaagaaatttcgggccctgctgtttcagattaacaaggacggagtgggcgacaagacatggggcaaaggggcactgattccatctatcgagggatacgccaattttgtctatatggtgaacccgattaaaggcgttgccttacagaaagccgttgtgctcatcaaacaaaaatacggcatgccagttaagcctcacaaactctcactcctgaacaagaagcttatgaggctcaaagctaaggagggactcctgcccaagaaggattggtggatccctaaacagaagactactccccttgtcgaacttactcagaaacaaaatgaggaggccaagatcgagcataaacagcagatcacggacgacaatagaaacgtcaatatactaaccccgcaatctgacaaaccaaagagctacggttatgttttttacgtgatagcggtggtaattttcatcctgttccaaatcttcaacaagtga

SEQ ID NO: 13302 - RNA, 1782 nt, synthetic construct
  source 1..1782: mol_type = other RNA
atgtctgaccagcagtctacaccagcatccccctcccggcttactaggcaacagctgtacgatcgtattcgcgagagtagcaaggacgaatatatcctggcagaaatgaaaaggttgggcttttgggatgcctcagaggatcggccttctctgagcgagtccctcatcatcaagcaaggagaactcgaacgcgaactccgagagctgttggctaaacagcgacagctcaagaatccagaaaaagccttaaaggccatgcacaagcagaggatgaaagaagcacgcgataaacgggaggtaactcggcagcatcaggccgaggagcgctatcagcggagtctggcttggtacaacaaatctcaacaaaccctgagctatctgggcgagaaagtgagttcaagactggattccgtcgaggcacagcaagcgagattattggacaaccacctgcctattattaaaagctatctacagctggccaccatgatgggagtctctctggcggaattgagattcttggcatttagcaggaatgtgagccaggtgtctcactatcaacactttctcctgccaaagaagaatggagggacgagacttataagcgcacctatgccgagactgaagcgtgttcagtactgggtgcaggctaatatactagagtcggtggctctccacgacgccgcacatgggtttgtgaccaagagatcaatagtctccaatgccgaacctcacgttgggaaggctgtagtgatcaatatggaccttgcggacttctttccgacaatcagttatccccgtgtgaaaggcgtcttctcccacctgggatacggcgaaggtattgccacggttctggcccttattacaaccgcacagactgtcacacccgtggagctggacggcaagcagtactttgttggtcagggtgtccggcatctgccacaaggagcccccagttccccagccctcaccaacattatctgcagacgcctggacaagaggattcttggaacggcgcaaaaactggggttcgcttacaccaggtatgccgacgatctgagtttctcctctgagcagggtgaaccggccaaggtgaggcagcttttgtggcgaatcaaacgcatcgtcaaagaagaggggtttgccgtgcacccaaacaaaactagggtaatgtaccggcataagcggcaagaggtgaccggtgtggtagtaaacgacaaacccagcgttgacagaaggacattgaaacgctttagagctttactgttccagatcgaaaaggatgggatcactgggaagtcttgggggacaaagtcaggcaaagagtccgcggccctaattccatcaatcgatggctacgctaactacgtggctatggtgtcgcccgaaaaaggcgtcaaactgcagcaacaggtggcaaaaatcaagcagcagcaaggattccaggttagccccaagcgcgttatggcacttaatcgaaagctcttcaagcaaaaggccatgaaaggcgaggcccctcgagactcatggtggcaacctgctgaaaagcagcctccagtcaaggagctcacatcactccagttagaagctgagaagcaacaggagaaggttgagtgtagcgccgagcagcaggctgataagaaacagcctctggtggagcaggtgcagcctcccgtccagattcatactaagcccaagacccagcagttccagttcgataaacaccattactgggtgattttctggatcggcctacttctcctcttactgatgatatttaactga

SEQ ID NO: 13303 - RNA, 1770 nt, synthetic construct
  source 1..1770: mol_type = other RNA
atgtctgagattagccctggaaaactgacacggcagcagctgtatgatcgcattagggaatcttccaaagacgaatacatactggaagaaatgaagcgcttaggattctgggacgagagtgagcaacctccagaggccgaagagttgattaaagagaaggctagactgcgcaaagaactcaacaagctgctgagaaataaaagactgatggatgaccctgagaaggcgctggagcttatgcacaaagagcggaagaagaaagccctggagaagcggaaagaaaccaagaaagagcggattaagtccgcctacgagcgagcattgaactggtttaagcttaaccagaaagagatcacctacttaggtgagaacacaaaaattgagatctcacagacagaaacaaacgagcaaaagctgaaccagcagaatctgcccaagtttgtcgaaagctctgagctggctgaagccatgggcctgtgcttgtcagagcttaggtttttaacctacactcgagacgttagcaaagtgactcattatcagaggttttccctagtgaaaaagagcggaggcgtaagacacatatccgcccctatgccacgtctgaaacgcatacagtattgggtgaaaaccaacatcctcgatacgctgccacttcacgactgcgcgcacggcttcgtgaaggagcgtagtatcgtttccaatgccgcaccacatatcggacagtccattgtcatcaacatggacctcaaggattttttccccactattacttataagagggtcaaaggactgttccaacagctcggctacaacgagaagatctccattctatttgcactcctgactacagaaccccactgtgatgagctcagcctagacaccgaaacatactacgtggcccaaggcaagaggctacttcctcaaggcgctccgacttcacccgctatcgcgaatctgatctgccgcagactcgaccggcgaattagtgattgtgcaaagaagctggggtttgaatatacaagatacgctgacgatcttaccttcagcattaaggacaatgattcagacaaggtgcggaagcttctgtggagagtcaaagctatcattaaggacgaaggtttcaatttacatcctgaaaaaacacggattatgaggagtcaccagcagcaggaggttactggtatagtggtcaatgaaaagatcaacctctcgaggaaaaaactgaagcgcttgcgcgccactctcttccagatcgaaaaagacgggttcagcggtaaaaattgggatgattccaaggatatcctgagaagtctgaccggattcgtgaattactatgcaatggtcgaccccgctaagagcgtgaagtacaaggagcaactaaagagaatcattcaaaagcatccgtatgagatctccaaaacgccctttatcggcaagctcaagaaatctgtattcattgaaaagagcaagcaggggttgtccccttgggacgactggtggcagcccgttgaaaaaacggagccagagctcattcttcccaaggaaaatgagaaacaggattcacgacggaaagcaaccgatagtatcgaatctacctcttcgtctcagtcaaacagggggagtacccgaaacaggtcttcagagctcccagagcttatagggaaagggttctttacagtgaccttgataataatcgccgtagccttggctaaggtgagcccactgatcttgctgttagccggctatctgatctaccgtctctggaaatga

SEQ ID NO: 13304 - RNA, 1671 nt, synthetic construct
  source 1..1671: mol_type = other RNA
atgtctcaactgacccggcagcaactgtacgataagattaaggaaacaagcaaagacgaatacatcctgtccgagatgcaaagactgggatattggaaggaggatgctcagcccacgctcgctgcctctctcattaagaggcgtggcgacctgcagagacagatcaatgcgcttagcagccagattacagatccccaggccgcactgaaagctatacaccaggagaggatggcagccgccagacagcagagaatagacacgaaggtgaaacgcgaagttgatcgttatcaccgagcacaggcttggcatgagaagcagcagaaccacatccattatctaggggatgcagctggattcaaaccctctgctgctgccgacgtctcggacgcagaacggttaaacagtcttggattgcccgtttattccaacgccgcagagttagcggcggggatgggaataactctcaacgagttacgatttctgacatatagcaatcaggttagtcgcgtatgccactaccagcactttgctatgcagaaaaagagcggcggtactcgcttgatttctgcccccatgcctagattaaagaggcttcagtactgggtcctcgataatatcctccaacctctcgagctgactgagcaagctcacggtttcgtgaccggccgctccattgtctccaatgcccagccgcacctggctcagaaggtagttatcaatatggacctgaaggacttcttcccaaccgtgacttacccaagaattaagggcacttttgcgcagctaggctataacaacgaagtcgcaagcctgctggcactcttgtgctccgaagccgatactcagacggtggagatggatgggcagcggtactacttaaattccacgtcaaggcgtcttcctcagggcgccccaacctcacctgccttgtcaaatgttatttgtaggaccctggacaagaggctacaaggcctcgcgacaaaacacggctttgcctacacaaggtatgccgacgacctgaccttctctggaacagacactgcggcagtgcctgctctcctgtacggtgctaaagcaaccgtgaccgcagaaggatttaacgtgcatcctgacaaaacacgcatcatgaaacaagggtctaagcaggaggtcacagggattgtggtcaatcagcacctgtccgtggataacaaaaagctgaagcaattcagagccctgctatttcagattgataaagacgggtacggggacaagtcgtggggcaatggatacaacatcttggcctcaataaaaagctatgcccattatgtacgcatggtcaaccctgaaaaaggttcacaattcctgcagcagatcgccgctatccaacagaagcatggaaagcccaacgtggccatgaagttcagtactacccagtttcgggaacgagccgctcaaggtaaacttccactggatgcaatgcatgtggcccccatcaagccggctcccacattggacgatacaatccagcatcgggatgttctgccacaggtggaggccgcactcggccttagtgtgcctgaagccgtagaaaccgagccagagtctacccccgccactaccccggagacaccaaatcaaccacaggggctggtgagcacccttatgtccttgctccggggcaaaagttga

SEQ ID NO: 13305 - RNA, 1680 nt, synthetic construct
  source 1..1680: mol_type = other RNA
atgacgaaccttacccgacagcagatctacgaccaaataaaagctactagtaaggaacagttcattctctctgagatgcagcgactggggtattggccaaaccccgaggcacccacactccactcagagctgatcaaaaggaagacccagctgcagcagggcatccgggagctctcacagcaggttgacgatcctcaggccgctcttaaacagcttcataagacacgcatggcagaggccttggccaaaagagagcaaacgaagatcaacagggaactgaaacggtacgaaaaagctttaagctggcatgagaggcggcaaaatcagctagactatctgggggatgccgcagggtataagccctcccccaacccacaggacagccattcacaaactttactgcactaccatttgcctgtctgttccacaggcaaagagctggccgcgcttatgggggtgactctaaacgagctcagatttctgacttacaccaatcaggtatctacagtacagcattatcagcaatttgccttagctaaaaagactggcggaactagactcatttccgctccaatgcctcggctgaagaggctgcagtattggatactggagcaggtgctccagccactagcactaaccgatcaggcccatggtttcgtccagggcagaagtatcgtgacaaatgcccggccgcacttgggccaagccgtagttatcaacctggatctcaaagacttctttccaacgattacttatccccgcatcaagggggtcttcgaacagctgggttacaaccacgagattgcaaccctgtttgctctgttgtgctcagaaccaattacacagacagtggagctggacgggcagcgctactatctggcacaaaatcctcgtagactgcctcagggggcgccaacctctccttacctcagcaatttaattaccagacagcttgataagagactgcagggactcgctcagaaatacggttttgtgtacacaaggtacgctgacgatctgactttctccagcgccagtaccgaagctcccacttgcggtcttctccactggattaaggccatcgtgcaggaagaaggcttccaactgcatcctgataaaaccaggataatgcacaagggccgacgacaggaggtgaccggattggtcgtgaaccagcagttgaatatcgagcgccaaaccttgaagcaatttcgcgcactcctgttccaaatccagaaagatggctatgtgggcaagagctggggaaagaatcgcaacctgcttgcctccataaagtcctacgcccactatgtgcggatggttaatccggtgaaaggtgaacagttcctgcagcagattgccgtgattcagcagacgcacggcgtccccgctcaaacccttaagtactccacacaagactttcgtcaacgttctgcccagggacagctgcctcttgctaccatgcaaatcgcccaggcatctcacaagccccagctcgaggacataattcagtatagcgaagtcatcgaacaaatccgggcggagctaaagttagcaccgccccagacaagcttgaataccgagacaagtcctccatacccaccccctatctcagaaccggcgtctctgattcacaacgttatctcgttgttcagtggactctttaggggaaaactgtga

SEQ ID NO: 13306 - RNA, 1731 nt, synthetic construct
  source 1..1731: mol_type = other RNA
atgacccagttgtccaggcaagaactgtatgacaagatcaaggagacatctaaggacgagtacattctgtcggaaatgcagcgcctaggttactggaaggaaggggagaaaccctccgttgcagagacattaatcaagaaaaaggcagagcttcagactgagatcaataaattgtctcgggaaattaaggatcccaaagaagcactgaaggctatacataagcagcgcatggcggaagcaaggcagagaaggattgatactaaagttaagcaagagttgaagcgattcaagagtgctgaagaatggcacaagcgaaaacagaacaagatcgaatacctgggtaacgcatgcagcaccaacagcaaaagtgatgagactgctaagaataccaattcggataaacttcgcctgcatcagctgccgacctgttccaccgcaattcagctcgccgaggccatagccatcaccctgaacgagctaagatttctgtgttacaccaacgaggtttccaaaattacacactaccagcgctttggtatccataaaaagaccggaggggtcagacttatcagcgccccaatgccgaggctgaagcgtcttcaatactgggtccttgacaacattctccagaaaattccactctccaacaatgctcatggattcgtgcccctgcggtcaatcgtgactaatgcgcaacctcacgtaggcaagaaagtggtgatcaacatggatctgaaagactttttcccaaccgtggggtatccgcggattaaaggactgttcgccaaccaggggtacggcgaggaagtgtcaatactgctcgctctcatctgcagcgaacctgacacgcagacagtcgagatggatgggcaacggtactatatacacagcaaggagaggttcctcccacaaggagcgcctacttcacccgccatctctaatatcatttgctaccgtatggataaacggctgcagggcctggccaaaaagtatggctttgtctatacccgctacgctgatgacctgaccttttccagtcaggacatcgataagattatgcccctcctgaactgggtcaaagccacggtaacggaggagggcttcgttgtgcacccagagaaaacacgcataatgcaccaaggcgtgcggcaggaagtcactggaattgtagtgaatgagcagctctccgtaaatagaaagcaccttaaacagttccgtgctctactctttcaaatcaaaaaggacggatatggaaacaaaaagtgggggaagggcggatctctattgcccacattaaagggctatgcgcatttcgtcaagatggtgaaccctttgaagggacagcagttcttgactcagatccaggagataatccaactgcacgggtatccaaatgagacgcctaaacagggtaggtcaacaagtgactttagaaaagccgcagcccagggcaagcttcctttgggtagcatgcaggttgcccaacccactctgccccccgatattaataaaatgatccagcacagagacgtgctcgacctcgtgcgagaggaattaggcctgccagccttagaggaccctaagcagaagaaggaaacagggagttctgataaacctatggtgcagccactgacagctgaggacgaaaacagatcccatgtgaacgaaaatgacattaattcaagcggctttttctctaggatcaagagcctgtttgggggcgataagtga

SEQ ID NO: 13307 - RNA, 1689 nt, synthetic construct
  source 1..1689: mol_type = other RNA
atgacgcagctgtcccggcaggagctgtatgacaagattaaagagacttccaaggacgagtacatcctttctgaaatgaagcgactgggttactggaaagagggtgacaagccatccgtcgccgcaacccttattaaacgcaagactgagctccagacagaaatttacaaactcagcagggagatcaaggatcctaaggcagctcttcaggccattcataaacagaggatggcggaagccagacaaagaagagtcgacacaaaggtggcgtatgagttgagacgttaccaacgtgcgaccgattggtatcagagaaagctctctacaattgactatctgggatcagcatgcgtgttaactcaggagaagaagcagaaaatcaaagtgctggataccgcaaaacttgctcgctaccagctcccgaatataagcacagctaaagagttggccgaacagatgggagtgacactaaatgagctccgatttctgtgctacactaacgaagtttccaagataactcactatcaaaggttcggcatacataagaagaccggtgggacccggatgatttctgctcctatgcccaggttgaagcgcctgcagtattgggtgctggataatctcttacaaaagattccgctagctgagcaggcccacggatttgtccccagtaaaagtatcgtcaccaacgctaaacctcatattgggaagaaagtagtcattaacatggacctgaagaatttctttccgactgtttcatacccccgtataaaaggggtgtttctgtctcaggggtacaatgatgaagtagccacattgtttgcactgatctgttctgagccagagacacagacagttgaaatggatggacagcggtactatattcactccaagcaacggtaccttccccagggtgctcccacctcccccaacataagcaatatcatctgttacaaactggataagcggctgcagggcctagccaacaagtacggcttcgtgtacaccagatatgccgatgatatgacgtttagcagcaacgacgcgtccaaggttaaagcactcctaaactgggtgaaggccacagtgaccgaagaagggttcatcatccaccccgaaaaaacgaggatcatgcatcagggggctaggcaagaggtgaccggccttgtggtgaatgaaaagctcagtgtgtcacgaaagcagttgaaacagtttcgggcactgctctatcaaatcaagaaggatgggtatgacggcaaacagtggggtaaaggcggcagcttgctgccaaccatcaaaggattcgcgcacttcgtaaaaatggtcaatgccgaaaagggagagaagttcctggcaaacattaaggagattatagatctgcacggctatcctgacgccgataagaaacagaacaaaacttctgacgactttcgcaaggctgccgctcagggaaagctgcctctgaacagtatgaggatcgccactgctcctccaccaccagacatcaataccatgatccaaaacactgacgttttggatctggtccgcaaagagctgggtcttagcgaaaacaaccctgaaacgaccaatgacacagccatctcatcggcccaaagtgaagacaatagagaggagggctcagccggcttcttagcacgcttaaagacattcctcgggggagagaaatga

SEQ ID NO: 13308 - RNA, 1587 nt, synthetic construct
  source 1..1587: mol_type = other RNA
atgggcttgtctcgtcaggaactgtacgagcaaattaaggccagtagtaaggaggggtacatattagccgagatgcagaggctgggattttggactgagtcagagccacaacccgcccgcgaactgatcgctagaaaggcagaaatccaacaggaaatcgcgagcctcagtgcgaagatcaaggatcccgaagcagctctaaagctgattcataagcagcgaatggctgcggctctggaaaaacgacttcagactcgcatcaagcgcgagcttaagcggtttcagtcagcccatctgcaccatcaaaacaagcagaagaagcttataacactcggtgacgccgcacattttgggcctaagcaacaggccacccagtcagaaaaattgcaggcctataagctgcctgaaattgatacagccctggagctggccgaacacgcagggattaccctcaacgagttaagattcctgacgtactctcgtcgtgtgtccaaattatcccactatcagcggtttgaaatggcaaaaaaaactggcggcactagactgatttctgctcctatgccacgcctgaaacgattacagtactggattcttgagcacatccttaatccactccctgtaacccctgccgcacacgggtttgtccctcagaagggcatactgtccaatgccaggccccacatcgggaaaaaagtggtcatcaacctggacttgaaggacttctttcccacaatctcctaccctcgcgtgaagggcttgtttctgagcttggggtatggaaatgaggtcgctacgttgctcagccttctgtgtacagaggccgagagtcagcaggtggagatcgacgggcaaagatacttcattgcagcggaccagcggagacttcctcagggcagtccctgctcacccgctattagcaaccagatctgtaaaaggctggacaaacgacttgctggactggcgcagaagtggaattttgcttatactaggtatgcagatgacctaaccttcagcgccgatagctcacagtatctgggagccctgttcaaaggactccggcagatattgaaagccgagggtttcgttctccacccggacaagaccaggatcatgcatcagggtgcccggcaagaagtcaccggcctcgtggtgaaccaaggcctgtccgtgagcgcgtccactctaaagcgcttcagggctctcctgttccaactcgataaggacgggctcaacggtaagacatgggctggacactcctcgaccgagcccggattcttagaaagactgcagggcttcgcacagtacattcggatggtccagcccgagaagggccaaaaactctgcgctcatctgcaggccattaggcagaaatacccggatacaggcctactctctgcccactctaccctgccaaaaggcaaaaaaacggcctttcggcagaaatctgcaaatgcagagctgccgttgccaggtcagagggttgccccagtacccccaccaccaagactggccgagacaatacttgatagaggaatcttggcagaggttgaagccgcttggcaggctcagggagggcaagtgtga

SEQ ID NO: 13309 - RNA, 1665 nt, synthetic construct
  source 1..1665: mol_type = other RNA
atgcagttactcagtatccttgaccagttggggtttgggctgtcgtctcccaagcttaaagtggtcttcttttgcctgaacctgctcccaatgagcgaccacaggatgacccgacagcagatctacgacaggatccgccaaaccagcaaggaggagtatatcttagaggaaatgaagcgtctgggtttctgggacacgacagaggaggccccaaaaatttcagaagagctcatccaaaagaagggtgcactccggagggaactccgcgaacttatggaaaaacagcggatgttccgcgacaaagagcggatgttggcagaaatgagaaagaaacgaatggcagacgcactggccagaagggaagagactaaggagagaaggaaagcagaaaaggaggcacgcgccaaagcctggcaggagaagaaagagcggtctatcgtgttcctgggcaaagactatagcgcagggctgtcggaagaagaagccgatttggcgaaactggccgctctgaatttgcctgcgtttaaggacatcaaagaactggcagaggctatggacatttctgtgggccgcctgcgttatctgtgctttcagagaaagttgtcaaccgtgagccattatgaacgcttttacctggctaagaaaaccggtggaaagaggctcatttccgcccctagaccgatgcttaagaacgctcaatactggctgctggagaatgtgctggcccggcttgaaatgcatgaggctgcacatgggtttgttcctgaacggtccattgtctctaacgccaaactgcacgaaaagaaggagctcgtaatcaacatggacctaaaagatttcttccccacggtgacatacccacgagtgaaaggcatgttcaaaggactgggatactccgagcagcaatccataatctttgcgttactcactacagagcctgaggtggaccaggtcgaaatcgatggccaactgtactatgctcagaaaggcgagcgctatctaccacaaggggctcccacttccccggctatcacaaactggttgtgtagacggatggaccgccgattcgagggggttgccaaaaagctcggctggacatacagtaggtacgctgatgatttgagcttttctgctaatgacacctcaaatataagccgaataatatggcaggcccaacagatcatacaggatgagggatttgtgattcacccaaagaagttaaagattatgaggaagggccggagacaagaggtgaccggccttactgttaatgagcaggttgcagtcgatagaaagaccctgaagaagttccgggcttgtctccacactattgagacaaagggctatcaggctgctgaatggggacaggggttcatcctcgcgagtattaagggtttcgccaactatgtcagaatggtgcaggccgagaagggacaggccctgtgcgaacaggtagatcgtattctagcaaaggaggagaataaacaggcctggaaagcctacttcgctaaccctagtaggaagaagtacgcctacgaagcccagaaacagcaggccaccattgaagccaatgcagtagattttggctcttcaggacttgcggaatccctaactcccgtcgatccccaacagaaagatgaggagcagtggtggagcctgtggtga

SEQ ID NO: 13310 - RNA, 1503 nt, synthetic construct
  source 1..1503: mol_type = other RNA
atgactcgccaggagatctgggaccgcatcaaagagctgggcggacgggacgagttcattctccacgagatgaaaaggcttgggttctgggatgtgagcgagggcgttcctcagttatccgagagtctgcgtgagcagcgaaaatctctggaaggcgagctgaaagaagccctgcagcagcaggccgtatataagaacaagaagaagatgttacgggacatgcgccagaaacgcatggctgaggccaaggccaggcgggttgaaaccaaagaaagaagggagcgccaaagggccgagaaggctgcagcctgggctgaagcccagcagcaagacattggttggttagggccggctgtgtccgctggtcttcagcagaaagaaagcaacgtcccccagctggaatcattcgggcttccagtgtttaatggggttaaggggctcgctgaggctatgaatctgcccctgaatgaactccgattcctggcttttgaccgtcaagtgtcaagaacatgtcactatcagagattcaaagtcgcaaagaaaacagggggattccgggagattagcgcccctgctcccaggctgaagaaagcccaacactggattttggatcatttgctgtacaagctccagctacacgaggcggcacacggttttgtgccacagcggtcaatactgtccaatgcactcccacatgtgggcgcacaggtggttataaacatggacgttaaggatttctttccgtctgttagctatcgacgggtcaaaggcgtgttccaaagcctaggctactccgaacaactggcaaccatactcggtctaatttgcacagaacctcaaactgacgaagtgaccttggatggacaaaggtttttcgtggctaagggagatagacgacttccccaaggcgcccccacttctcctgcaatcactaacattctgtgccggggattggatcggagattcgaaggaatggccaaagcactgggatggacatacacgcgctacgccgatgacctgacatttagtaagaaggccaccgatgctagagacgtgaatagagtcctctggcaggcaaggcagatcgtagagaatgagggatttgtattgcatcccgataaaatcaaagttatgagaaaagggacccgacaggaggtgaccggggtggtagtcaatgagaaaccaaatgtgtctcgtgccaagctcaagcagtttagggccgtgttgcataggatcgagacgcagggtctttccgcggctgatttcggcaaaggtcaggtcctggaaagtatccagggctttgccaactacgtctggatgattaacccagagaagggcgcggctctgaaggcccaggtcaagaacatcctcgccaaacccgaattacaacaggtgctggcacagaagaacacttatcctgaaaagggcaaggtggcgatctttacaccttacaaggacaaggaggtccagccactttcgaccgactggtggcgcctctggtga

SEQ ID NO: 13311 - RNA, 1554 nt, synthetic construct
  source 1..1554: mol_type = other RNA
atgaccaggcaggaactgtacgacgagatcaagaaaactagcaaagattcctacatactctctgagatgaaacgacttggattttgggacagcgcaaaaccaaaggtagctcaggagctcattgaaaagaaaactgcccttcagaaagagttgaatggcttatctaccaaaattaggaatcccgaagccgtcataaaagacattcacaaacagcgcatggcagacgccctccttcgccgagaagaaaccaaggcaaagaaggaaaagatctttcaggagaacctagccaaacgccaagagaaaaagaacagtgagctgggcttcatcggccatgctttcatggctgatctcgacgagaaggagtcgaatcagaagctactgaacgagaacaacctgttcttgattaaagatgcgaaagatctggcctcaaaaatgggcattacgctgaaggagctgagatttcttacacacacacagaagctgtctaacagaacagattacgtgcacttcaagatggttaagaaaagtgggggttttcgggagatctctgcgccaaagccgcagctgaaaagactgcagtactggatcctagaaaacatcctgaacaaggtggccgtaagcaacgaggcacatggatttgttgctaagcgtagcatcgtgtccaatgctaagccacatctgcagaaagctctggtgattaattgcgatctcgaaaatttctttcccacactgtcctatgcccgggtcaaaggcctgtttaaatctctcgggtactccgtggagcttgccactatcttggcgatattgaccaccgaagcagaacaaaaagaggttctgttagatggtgagaagctgtatttatatacagggaagaggtacctgccccagggatcgcctgcttcacctatgattaccaatctcatttgtcgcaaattagacaaacggatgagtggaatctcaaagtccttagacttcaactacacccggtatgctgacgatatgactttctcctcagacacttacctcaacatcaacaagatgatgttctggatcaaggggattgtgaaagaagaaggatttatacttcaccccaaaaaaaccaagattatgaagaaaggtgctagacacgaagtgactggcatagtggtgaatgagaagttgtccgtgaaccgtaaaaatctgaagaagttcagggccctattgtatcagatcgaggagtctggtctggaaggcaaacggtggcagggaaaatccgagaatctcatggcaagcgtgtgggggtatgccaattttatcaatatggtagaccctgagaagggggcgaagtacaagaaacaagttgaagtccttttggagaagtatccactgggcaacctgggatcaagcagcggggaatttagggccaagagcgccaagggcgagcaaccctgggaaagtaaggtccaggagatcgaggcaaagacactcgaacctgaaatgcaggtgaaggaagtcgccgagcaaaaggagacgccgtctttcgtcaataacattctcagtatgttcagaaagtga

SEQ ID NO: 13312 - RNA, 1563 nt, synthetic construct
  source 1..1563: mol_type = other RNA
atgacccgacaggagctgtatgatgagatcaagaaaacatcgaaagatagttacatcctgacagagatgaaacgcctgggtttctgggacaacgctaaaccaaaaatgcctgaagagcttatagagaagaaaaccgagctgcagcacgagcttaaccagctctcaaccaagatcaaaaatcccgctagcgttattaaggaaatacacaagcagcgaatggctgacgccctcgttcggagggaagagacgaaagccaaacgtgaggcacaggcgcagaaaaaggctaaggaacgggcagagaaaaaggaaaataagctcggcttcatagggcattcgtttattcatgacgacgaaacctccgctaagctagaactgctggttaccaacaaccttttcttaataaaggacgcaaaggatctggcaaataagatggggattgacctcaaggccctacggtttttaacctacacccagaaactctcaaggcaatccaactacgttcacttcaagatggctaaaaagacgggaggattcagggaaattagtgccccgaaaccccagctgaagaggctgcagtactggatccttgagaatatcttgaacaaagtggcagtccatgagaaggcacatgggttcgtgacaaacaagagcattatgtccaatgctcagccgcatattgggaaggccgtagttatcaattgcgatctcgagaacttctttcctacattggactatggaagagtcaaaggcctcttcaaatctctaggttactctgctgaggtggccacaatcctcgctatcttgactaccgaagcccaacaaaaagaggtgactctcgatggcgagaagctttacttatacaccggcaagagatacctaccccaaggatctcctgcctcccctatgatcactaaccttatatgtcgcaaactcgataagcgtatgtcaggcatcgcggactccttggcgtttacttatactaggtatgccgacgacatgacttttagcgccaccgcctatcagaacattaataagatgatgttctggatcaagaaggtgactaaggaagagggtttcatcttacacagcaagaagacaaaaattatgaagaaaggggcatgccacgaggtcacagggattgtggtcaatgaaaaactctctgtaaatcggaaagagctgaaaaagtttagagctctgctgtaccagatcgaacagcacgggttggaaggtaaaagctggcagggaaaaacagagaatttgatggcaagcgtgctgggctatgccaatttcattaatatggtggatccagtgaagggcgccgactatctgaagagagtgaaggccctgctgcagaaataccccatgccttcactgggcctgtctgataagacctttcgcattaaatccgcggagggcaagcaaccctgggagtctaagccagtatttcttgtcacagaagagacgcgcgtggtcagcagtaaagaactgggagaagaggcctccaagacgactctggaaaacccaagttttctgaacaacatcttggatatgtttagaaagtga

SEQ ID NO: 13313 - RNA, 1566 nt, synthetic construct
  source 1..1566: mol_type = other RNA
atgaccaggcaagaactctatgacgagataaaaaagacttccaaggactcatacatcctcagcgaaatgaaaagactcggcttttggaataatagcaagcctaaagttgccacagagctgatagagaagaagaccaaactgcagcaagagctaaatcagctctctactaagattaagaatccagaagctgtgatcaaggacattcacaagcagcgaatggccgacgcgctggtgcgaagagaggagactaaggccaagagggaagcaaaggagcaggaggcaataaagaataggcgcgagaagaaggagaataacattgggtttatcggaggcagttttatttcagatattaacgagcaagaggctaatacagaattactgaaaagcaacaacctatttctcattaaagacagcagagacttggcgaacaagatgggcatcaatcttaaacagctcagattcttgacctacacccagaagttaagcaacagaacggactatgtacgtttcaagatggccaagaagaccgggggctttagggaaatttcggcaccaaagcctaaactgaaacgattgcagtactggatccttgacaatatcctaaacaaagtggaggtcagtgagcaaacccatgggttcgtcgttaaaaggtcaatcatctcaaacgcaacaccccatattaatcgcgccgttgtgataaactgcgatctgcagaatttctttcccaccctgtcctacccgcgggtcaaaggactgttcaaaagcctggggtactctgctgaaattgctacaatccttgccatattgaccaccgaagccgaacagaaagaggtggtgctggatggtgaaaagctgtatctgtatactggaaagcggtatctgccccaaggctcccccgcaagtcctatgatcactaatcttatctgtcgtaagatggataaacggatgcagggcatagccactacactgaactttacatacacccgctacgctgatgatatgacattctctgcgaacgaataccccaacatcaataagatgctctattgggtaaaaggtatcaccaaggaggagggcttcactctgcacccagagaaaacacgcattatgaaaaagggttcctgccaggaggtaaccggagtggtggtgaatgagaaggcctctgtcaacaagaaggagctgaaaaaattccgggcacttttataccagatcgaacaaacaggaattgaggggaagagttggcacggcaaatctgaaaatctggtcgccgtcatttggggatatgcaaacttcatcaagatggtggactccgaaaagggggctaaatatatggctcaggtgaaagctatcatggaaaaatacccttctttgaacattacctccacaacgaacgaatttcgggtcaagagcgccaaaggcgagcagccgtgggaagatgagatcatagaagaaatcgaagaggtgacggaggtagtgacggatcagactaaaactaacgttcaggagaaagaggttcctaccacaccatcgtacattaacaacatcctcaatatgttccgcaagtga

SEQ ID NO: 13314 - RNA, 1890 nt, synthetic construct
  source 1..1890: mol_type = other RNA
atgtttaattctgcacctggccagttaaccaggcaggagctttatgataaaatacgcgaaaccagcaaggacgagtacattctggcggagatgaagcgactggggttctgggaatctgacgatgacaagcctgaggtgcccgagactataattaagaggcgtggcgagctgcagcgccagcttaatgacctgcttaagcagcagagactctacagcgatccggaggaagccttaaaggctttgagaaaagaacgaatgcaggcggccctgcagaaacgcgtcgaaacccggaagaagaaggcagacgaacgccatgagagggccttgacctggcatgagaaacagcagcacacaataagttggcttggtgaagctgtatccctgggactgacggccccaacagcagacagtaatgcctctcaccaagggtccactacgtctctctcaagcgaccaagccgtgtcagcccatggcgcaaatactcaaaacgaagccgtaaataatgcctccggcatgaaacaccaggatctccccaccttcgacaaccacaaggctctggctgaaagcatcggcataactctgaacgaactcagatttctctccttccagaggagtaccagcaaggtgtcacactatcagcactttcagatcgccaagaaaacaggcggatttcgagagatcagtgccccgatgccaaggctgaaaagagcccagtattgggtgttggacaatatcctatgccacgtgcctctgcatgaggcagcacatgggttcgttgccggacgcagtatcctaactaatgcaaaaccacatgtgggccaggctgtcgtcgtaaacctcgatttgcagaacttcttccccacgatttcgtatcggcgcatcaaaggcctattccacaaaatgggatatgacgagagcatcgcgaccgttttagctttgctctgctctgaggccgatacccaaaagatggaattggatggggagcaatggtttgtgcagcagggagagcaacacctaccccagggggctccaacttctcccacaatttccaatattatttgtcgctccttagacgtccgcctgcagggccttgccaaaaagcacggcttcaactacagtcggtacgcagacgatatgaccttctcaggggataagacagctagagagtcactgcgcaagctgctgtggggggttcaagccatcgtggctgatgagggtttcatcctccatcccgataaaacaaggattatgaacaaaggtcagcagcaagaagtgacaggaatcgtggtcaacgattaccctagcatcgatcggaagaccttgagaaggttcagagcactcctgcaccaggtggagcagactggcatccaagggaagagctggaacggtgtttcagagccagaacatctgctgaggtccatgctgggcttttctaatttcgtggctatggttctccccgagaagggcgaggcttttaagcagcaagcaaaagccctgtacgaaaagcactctaacaaagtaggtacaaaaacaattggacagctgcgaaaggccgaatttcgaaaacgggctgctgctggtcaagcaccctgggagagctggaaggaggccccagttaaaatcgcgccagtccgtgagaagactgtggatgagcttcaggaagagcggaaccaggtgctcgccgaaagacgtgaggcgaaaaaaattgaaaaggaacaacaggatcggcagcgttcacggaggggagggtttcctggcgcaagtagatccgactcccggagagaagacgacaggtggaatcttcctgaggactcctcgggagacaacggtcctaacgtcatcattcggtttttagggttcatagggagcctgtttaccggaaagaagtga

SEQ ID NO: 13315 - RNA, 1680 nt, synthetic construct
  source 1..1680: mol_type = other RNA
atgagtaatagcaattctcgccagcagtggtatgacagaataagggcatccagtaaggatgcggtgatccttgccgaaatgaaaaggctgggattttggcaggacactgatgttccaaccctttccgagacaatcattcagcgtcgttccgagctacagtctgaactgagtagattatatcatcagaagaatctgtaccaacaccccgaacaggctctaaaagccatgaggaagcaacgcatgcagaaggcacgtgagcaacgcgctctgacgcaacgcaagcaggccgagctgagacaacagcgagccaggaactggtatgaacagcatcagaacggcattgtgtggctgggggaagggatttctgccggtctgcaggacctttccagtgacatcgaacgccttcaggctcacgacttgccagtgctgcattcccctaagatgctcgcggaggccatgggcataaccctcaacgaacttagattcttggcgtaccaacggaagaccagccggattaaccattaccagcggttccagattgtgaaaaagactgggggtttgcgggacatcgcggcacctatgccacggttgaaacgcgtgcagtactggctgctggacaatattctccacaagctggctttgcacaatgccgctcatgggttcgtgctcggacgaagcatcatttctaacgcacagcctcacacagccaaggcactggtcatcaatctggatctggagaatttcttcccgtccatcagatacgcccgtgtcaaggggctctttaaaagcttaggttatagcgaaagcctcgctacagttctggggctcctttgtactgaggccgcagtggatgagataatcctcgatggcgagacgtggttcgtcatgagaggtgagcgacacctaccccagggcgcacctacaagtcctatgatttcaaacctcctcactcgaagcttagatagaaggctgcagggaatcgctaccaagtatggctacgcttacactaggtacgctgacgatcttagcttctcgtgcgagaaaccatataccgccaatgtaaccaggcttctgtgggccgtacggcagacggtgcaggaagaaggctttaaactccatccagacaagacacggttgatgcaccagggacgcagacaggaggtcaccggactagtggtgaaccaacacctctcacttgagaggaaaacattgcggcgattcagggcactactgcaacagatcgagcacaccggctggcagggaaagcactggaacggcgtaactgacccgatcaggctgcagcagtttgtttggggctatgcacattttgtggctatggttctgccagataaaggtgcgcagtttaaagcccagctgaacagaatccagcacatacattttggcggggtagtcaacaaaaaataccagtcagctcagaattccaaggcccagttccgcgtcttatcagctaaagcacaagcccccctcgtctcgtggaagcaagcacaagcccgccccctggttctgctggaaacaatccaacagcccttagcccaaacccagcacgagcccgtggagcaagccgcttctgggattattgaacagcagtctgccgttactgaggtgaagcaggcacctctggctggattggtggcctggctgagatcattgctgcggtga

SEQ ID NO: 13316 - RNA, 1905 nt, synthetic construct
  source 1..1905: mol_type = other RNA
atgtccgaacgtactcccactagggcggagctgttagcccggattgcccagtcctctaaagacgccgtggtattagcagaaatgcaacgcctcggtttctggccaaaagatactacgcaaccgaccttagaggccgctctaatagagcgtgaggccgaactggcccaggcactcaatggcctgcaagaggaactgcgggtcaagggggatccacaagccgccctgaaggccatgcggcaagaaagaatggccagagccagagagcaacgcgaggcccacgcacaggcaagggaacagcaacgctacgagcgggcccttcggtggcatcaagccagaacacagcaggccggcttccttgggctaggggtcagtggtggactccaggcagaagctgaccccgcagcatgtgctgcccgactcgagaggcatggcctgccagtcctgaatacagctctcgaactggcggaggctatgggcctgtccgttcccgaactgaagtttctgtgcttccaccgggaggtagccacgacgactcactaccgtagatttaaccttccaaaaaagaccggcggagtcaggacaattagcgcccccatgcctagactgaagagagcgcagtattgggtgttggaccaggtccttgctaaagtagcctgtcatgaagccgcgcatgggtttgtgcctggtcgtagcatcgttagcaatgctgctccccactgcgggcaggcagtggttataaacctggacctgaaagactttttcccatcaattcacttccctaggatcaaaggtgtgtttaaagggctcgggtatggcgaagcagtggcttccatgctcgcgctcctatgtagcgagaacgcctgcgatgagctagaggttgatggagagcgcttttttgtcggaggaaagggtcgagacagggttttgccccagggagcccctacctcccctatgctgaccaacatattgtgccgtaagctagaccggcgcttgcaggggcttgcacagaagctgggattcacatacaccaggtacgcagacgatctcaccttcagtgctagtgatgaaggggcggcgagggtaggcagtctccttcgacaggtgcaccatgtccttcgatcggaaggcttcacaccgcatccagataagcagcgggttatgagacaaggggccaggcaggaggtcacaggcgtggtagtgaatgcaaagccctccgtgtctcgcacagaacgcagaaagttgagagcagccttgcacagggctaacacccagggcctcggtgctgctacttggcagggacagcccgctaccaatgaggtgctgaccggctatgcccgcttcgtgcgcatggtgtcagctcagcagggccagccgttactgcagcaggcactggccctgccttctgctaaaaccgccgcaactgccgcccgaggcaactcatttagacagagggccactcaaggtcaggcccccttgaggcagcaaggtggggagtggtggcaggtcatcccacctccagtgccccagttagctctgacagcgggacagatcaaggccgcccggcaagagcgactgaacgcagaaagagctgcgcgacagagcgcacttcaggcccaaaggttggccgacggcaattcaagcgcttctcggcctagcgcagctagcactggcgcttctgcagcagagcacacggagcaccagaataccgctgctcctgtggcttggtggcgcttcttcttccagctgtttatcatcattaagcttgcagcctcctttaaatctgccctcgtgttgatgctgggcgccctgatcctcggacaggcactgatgacacgctcactcgggtggggacggtttgcgctgaccgtgattgttctcgctctggtgggaagtctgttacggtga

SEQ ID NO: 13317 - RNA, 1902 nt, synthetic construct
  source 1..1902: mol_type = other RNA
atgacagagagaacccccactagagccgagctcctggccaggattgccctatctagcaaagatgcagttgtgctggcagaaatgcagcgcctaggcttttggcctaaggatgccgctcagccaaccctcgagtccgcactgatccagcgagaagctgaacttcagcaggcgctgaatgaattgcaggacgaacttcgggtcaagggagatccacaggcggccctgcaagctatgcggcaggcaaggatggcccgagctagggagcaacgggaggctcatgctcaggtacgggagaaggctcgctatgagcgagctttacgctggcaccaggcgagagacacggaagtgggatttctggggctgggcgttagtgggggtttgcaggccgatgctgaccctgccgggacaacagctagactggtgaggagcgggttgccagcacttagcaccccgctggaactagctcaggccatgggcttaggcctccctgagttgaagtttttgtgtttccatcgagaagttgcccggaccactcattaccgccgcttcgacttgccaaagaaaacagggggcgtcagaacaatctccgctcccatgcctaggctcaagcgagcccagtactgggtactggaccagatcctggtgaaagttccttgtcacgacgccgcacatggcttcatgccgggacgcagcatcgtgagcaatgcagcgccacattgcgcccaagccgtggtcattaacctcgatttgaaggacttttttcctagcatccacttcccccgtataaaaggagtatttcagggtctgggctatggtgaggccgtggcatcgttgctggccctcctgtgctcggaaaacgtgtgtgacgaactggaggtcgatggcgagcgatttttcgtcggcgggaagggtcgtgaacgggtcctaccccaaggcgcccctacatcaccaatgctcactaatattctgtgccgtaaactggaccggcgtttacagggcctggctgacaaactgggctttacatacaccagatatgctgatgacctcaccttctcagccagtgaggaaggtgctactagagtggggtccctgctgcggcaagtgcaccacgtgctgcgttcagagggcttcacaccccacccggacaagcagcgggttatgcgccagggtgctcgccaagaggttactggcgtcgtggtgaacgcaaagccctccgtgtccaggaccgagcgacggaaactgagggctgccctgcaccgcgcaaagactcagggactggccgctgccacttggcaaggtcaggctgcctctagagatgtgttggtaggctacgccaggtttgtgagaatggtcagtgctccccaaggccaggcactccttcaacaggccctcgcgttaccgggaacggctccttctgcagcggctgcaagagcggatgccttcagggtcatggcggccaaaggacaggcaccccagaggagacaaggagcatggtggcagcccacccctcctccattacctcagctggcccttacagcccagcaggttaaaaccgcccgccaggagaggcttaatgccgagcgggctgcacgccaagcagccaaaagacccgcagctcccgcccaaggaagggatgcaaacacccaggccccagggatgagtcacacgcagggacacaccccagatgcccccacaacttcagcaccaccagtatcttggtggagattcttcctccagctgtttattctcatccgggttgcggtggggttgaagagcgccctcttcctgatgctgggggctctttgcctggggcatgcgctcatgactcggaggcagggatggattagatttgcactaaccctcgtgatacttgccgtgttatcctctttcacgaagctttga

SEQ ID NO: 13318 - RNA, 1905 nt, synthetic construct
  source 1..1905: mol_type = other RNA
atgtctgagcgcgtgcccacacgggctgagttattggcccgcatagccctcagcagcaaggacgccgtcgtcctgtctgagatgcagaggctcgggttctggccgcagaatgcaacccagccgactatagaggcggccctgatagaaagagaggtggaactgcagaaagcccttagcgagctccaagatgagctgagagtaaagggcgacccccaggctgcactgcaggcaatgcggaaggaacgaatggccagggccagagaacaaagggaagccaatgctcaggctagagagcgtcaacggcacgagcgcgcaatgcggtggcatgaagcccggaaaaccgaggccgggtatttgggggacggtgtgagtgggggcctacaggtcgatgctgaggcagccgcagtcaaggccagactgcagtcacggaatttgcctgccctatctaccccccttgaactcgcgcaagcgatggggctgaccttgcccgagctcaaatttctctgcttccaccgggaggttgcccgtactacccattaccggcgattttccttaccaaagaagacaggcggcgttcggacaatctccgccccaatgccccggttaaaacgcgcccagtattgggtgctagataacttactcgcaaaggtgccatgccacgacgccgctcatggcttccttcctggccgctccattgttactaatgctgctccccattgtgcaaaggcggtcgtcataaatctggaccttaaggactttttcccatctatccactttccacggattaagggagtctttcagggactgggttacggagaaagcgtagcttcacttcttgcactgctgtgctcggagaacgcctgtgacgagctcgaagtggatggggaaaggttcttcgtaggcggcaaagggcgagatcgcgttcttccccagggagccccaacctcccctatgctcacaaacattctgtgtcgtaagttggatcgccgtctgcagggcctggcctctaagctgggattcgcctacactcgatacgctgacgatctgactttttcagcccctgctgagtcagccgataaggtgggccggttattgcgccaggttcaccatgtgttgcacgacgaggggttcaccccgcaccctgacaagcagagggtgatgcgaaggggagccaggcaggaagtgacgggtgttgttgtgaacgctaaaccgagcgtgagccgagaggagaggagaaaactgcgcgcggctctccacagagctggtcagcagggtgtagaagccgccacgtggcagggacatgctgccactcgcgacgttctcgtcggttatgcgaggtttgtgaaaatggtggatgctcgacagggccaacctctgcttcagcaagctctggctcttcccggagcaaacgccagtttggcagccggtaagccagatgtgttcaggattcaggctgcaaagggagaagcccccgcaagaaaacaaggagcgtggtggcagccagcacctagtccagagcctcaactggcactgacagcaatgcagatcaaaaccgccaggcaggaacgtctgaacgccgaacgcgcagccagaaatgaggctaaaaggcaggagcaaatcgccagaggggaggctcccgctcctagaagaccccaacccagcgctgaagcaatggcatccgcggcgcaaatgacaggcgccgtccacaagccaattgcgtggtggagatacgctatccagctcgtcatcgtgatcaggctggctgtaggcctgaaatcccctctggtcttcatgttgggcatgctgtgggtgggatatgccgtgatgacgcgccagctagggtggtggcggtttgcaattgcaatcctgggcatcgccattctagggagtgtgctcaacgtgtga

SEQ ID NO: 13319 - RNA, 1887 nt, synthetic construct
  source 1..1887: mol_type = other RNA
atgtcagagaggatgccgacgcgcgcggaattgctggctcgcatcgcagcctcttccaaggaggacgtcgtgctcgccgagatgcgaaggttgggctactggcccggcgaagcaggtcaaccagtgatccaggcggccttgctcgaacgtgaagctgagctgcagcaggctctgtcggcgctgcaggaggagttgcgggttaaaggtgatcctcaggctgcccttcaagcgatgaggcgcgagcgcatggcacaggcacgagaacagagggaggctagggctcaggcccgagaaagggaaaggtatgagcgtgccctgagatggcatgagcgcagaaaaatggaggcaggctacttaggcccaggagtttctggtgggctgggggcagaagtcgacccagaggctgtgaaagccagattagccgcagcaggactccccgcccttacaaccccttcagagttggctcaggccatgggactcagtctgcctgagctcagattcctgtgcttccaccgcgaagtggccagaacaacccattatcgacggttccagctaccaaaaaagactggaggggtgaggactatctcctctccgatgccccggctgaaacgggctcagtattgggtcctggataacctgctggcaaaggtgccatcccatgcagccgcccatggtttcctgccaggaaggagcatcgtgagcaacgctgctcctcactgcggacaggacgtggtgattaatcttgacctcaaggacttctttcccagcatacacttcccccgcataaagggcgttttcagagggctcggctacggcgatgcggtagcctcactgctagccctgctgtgtagcgagaatgtctgtgacgagctctctgtggatggcgagcggttctttgtggggggaaaaggccgggagcgtgtcctacctcaaggcgctccaaccagtccgatgctcaccaacctcctgtgccgcaagttagacagacgtctgcagggcttggccttgaaactgggcttttcttacactcggtatgccgatgacttatccttttccgccgctggtgatgccgctcagcgtgtagggcgtctacttcgacaggtgcaccatgttctgcgggacgaggggtttactccccacccagataagcagagggtaatgcggcggggagcaagacaggaagtaaccggagtggtcgtgaatgacaagcccagcgtgtctagagccgcacggagacagctacgagctgcgctgcacagagccggcagacagggtgttcaagccgccacctggcaaggcgaagcagccacacgcgacgtgctggtgggctatgcacgatttgttcacatggtgaacgccgcgcaagggcagcccttacttaagcaggcccttgcgctgcctggagcaagttcacacgctcccaggcctgatgcattcagagcccaggccgtgaagggagtagcacctgctcggaggagtggtccctggtgggaagtcgtccccgctccagagcctcagctggcactcacagcagggcagatgcaagccgcccgccaagcaaggctcaatgctgaaagggctcagaggagcggaaaacccgccgtggccccatcagctcaacctgctactgcgacgccaggagcacgaccggttgccagacctgcgcctgttgccgaacaacccgtgccgtggaaacggtacgggctccaggtctttgggtacgcatttatggctcttgtgctgcattccgccgcttttttgttccttgccctgatttggcactcccagagtctgaagaagcgcgatctgggctggggtcggtttgggctgggggtattcgtcttaagcattgttgccgtcatgcttaagggcttgctcgctcgctga

SEQ ID NO: 13320 - RNA, 1917 nt, synthetic construct
  source 1..1917: mol_type = other RNA
atgtctgatagaatccctacgcgggcggagctcatcgcgcgtattatgctctcgtccaaggatgctgtcgtgttagccgagatgcagcgcttgggtttttggcctgccgacgccgggaaaccaactcttgaatcagcgctgattcagagggaggtggagttggaacaggcactgcaggggctctacgcccagcttagggttaagggggaccccgaagccgcactgaaggccatgagagaggagcgtatggcacgagcccgggagcaaagagaggccaccgctcaggctcgagaaagacggcggtttgagcgcgctttacggtggcacgaggctcggaagaccgacattggctatctcggagcgggagtgtccggtggactgcaaccacctcctgctgctgctcccgcaaggaccctgcagccaggtctaccgccattggcctctcccctggagctagcccaggctatgggcatcgcccttggcgagcttaaatttctggggtttcatcgcgaagtggcccgcagcacacattatcggaggtttaccctccccaaaaaaacagggggagagcgcacgatctcagcccctatgccgcgcttgaagcgggctcagtattgggtcctggataatatcctcgctaaggtcccatgccacgacgcagctcacggtttcttgcccgggcgctctattgtaacaaatgcggcgcctcactgcgcaagggccgttgttatcaacctggatctcaaagatttctttcccagcattggctatcccaggattaagggcgtgttccagggactcggctacgacgaacgcgtagccggcgtcctggctctcctgtgtagcgaaaatgcatgcgacgagctggaggtggacggcgaacggttcttcgtgggtgggaaggggagggatcgggtgttgcctcagggtgcgccaacatcccccatgttgactaacatactgtgtagaaaactggaccgccgactacagggcctagcagataagatggggtacacgtacaccaggtatgccgacgacctgacttttagtgcaccacccgaagctgccgaccgtgtaggtcgcctgctgaggcaagtcgatcatgtgctgcatgacgaggggttcactccgcacccggataagcagagagtgatgagggccggatcacgacaggaagtcaccggggtggttgtcaatcagaaacccagtgtctccagggatgaaaggcggcgcctgagagcagccctgcacaatgctcagagaaacggaatcgaagcagctacctggcagggcaggcctgctacacgagaaactcttgtgggatatgctcgattcgtacagatggttgacgcccaccagggagccggcctttttgcccaagctcttgccctgccaggaggggctcatgccgctagacctgccagagcaggcgccttcagaagatctgcggcccagggccaggctccagctttagcacgtggagcctggtggcaaccagccgaaagacctgcgccacgcttagcacagaccgccggtcagatgaaggccgccagacaggaacggttaaacgctgagcgagccgagcgtaacgctgcagccaaacccgcacgagatgccgcaagagaggaggcgcggaggcatgagcagcaagagagaagggcagcacaacgggccgccgcagaaactgctcggcaaagcctccgccagcaacccgcacttacatggcgacactggctccaatacgcaatccagctctacatagtgataagagtagccaccggaatgaagagtgctgtcgtgttcgccgcaggaatggcctgggtgggctacagcatgatgacaaggaaaactggctggctgcgtttcatcgttgccatggttgtgatcgcgctggtgggcgctatgattcgcctgtga

SEQ ID NO: 13321 - RNA, 1887 nt, synthetic construct
  source 1..1887: mol_type = other RNA
atgagcgccccgcagccaactagggccgaactgttggagagattgcgaaagtccagcaaggacgctgtgatactcgaggaaatgcagcgactgggcttttggccggcaggctctggagctcccacagttgaagaggcaatgatccagcgcgaggtcgaactcgcaaaggccctggaacaggtgagaagccagctgggcacacgtaccgatcctgagtctgcccttaaacagatgcgcaaggaacgaatggcggaggctagagctcgcagggaggccaacgcccaagcgagagaacagcggaggctcgataatgcgctccggtggcacgagaggtccggacaagagattgcctatttgggcgaccaggtgtcagccgggttgtatcccggtcacgcagctgtgaggccagagaggttagcgcggcatggcctccctctcttcgaaacccccctgcagttagcaaccgccatgggagtcccactcgccgagctgaagtttctggggtttcaccgagaggtggcaaggacgtcacactatcgtcggttccgcctgccaaagaaaaccgggggcgagagaactataagcgcacccatgcctaggctcaagagggctcagtactgggtgctagataatattctggcaagggttccagtccatgcggcagctcatgggttcgtcccgggacgaagcatcactagtaacgccgctccacattgcggccaagccgtcgtaatcaacctggacctgaaagacttctttcctggcgtggcctttcctcggatccggggtgtcttcaggggccttgggtacggggaggacgttgccactgttctcgcccttctatgctctgagaaccccgccgatgagcttgtggtggacggcgagctattcttcgtggggcgtaagggacgcgaccggacgttaccacagggagcccctaccagtcccatgctgacaaatgtactgtgtcgcaagctggatagacggcttcagggtcttgccgggcgctttgggtttgcttacacacgctacgccgatgacttaacctttagtgctccaccagagggctctgcatctgtcggcaggctgcttaggcaggttcaccacatcctgcatgatgaagggttcacaccgcaccctgacaagcagcgggtaatgagatccggcgcgcggcaagaagtgacgggagttgtggtgaacagagaaccctcagtggcccggagctcaaggagacgcctcagagccgcattgcaccgagctcagaaaagcggcgtcgcccaagcacactgggaaggtgctcccgccaatgccggccaactacagggccatgcccaatttgtgcgctccgtgaatgcccgtcagggtgcaccgctcgtagcacaggcacgaatgctggtgcggtcacctcatacactggcggcagctggttcgggtgctgcgtttcggcaaagagcagccgctggtcaggctcccatgaggccaggagatcgcgcctggtggagtcctgctgctaaagcggccccccaactccagctgactcaggagcagaaaaaagccgaacgagccgaacgacgggctagacggcgtgacgaggctagagctgcagctcaacccgccaggggtgaaagagctgctggagccggacctggccctttcactaccccacccgagattcccattagctggtggcgcttcgggttccagctgttctttgtcctgtggttcgcatccgcaacccgctcttccttggtgtttatggggggagcggcctggttcgggtggagtttagcccagagacgccagggatggcctcgttttctgctgggaatgttgattgtcttccttgcctccgttgtaatccagggcttctggaggcacagatattga

SEQ ID NO: 13322 - RNA, 1866 nt, synthetic construct
  source 1..1866: mol_type = other RNA
atgagcgagcgggtgccgacgcgcgcagaattactggctagaattcaggcctcaagcaaagacgctgtggtgctggctgagatgcagaggcttggtttctggccagccggctctggcactcctactctcgaagcggctctgattgagcgggaagtcgaactgactaaggcgctggacggtctacacgccgagcttagagtgaagggtgaccctgaggccgctcttctggctatgagaaaagagaggatggctcaagcaagagagcgccgagaggcaacagcccaagccagggaacaacgccggtttgagcgggctcagcgctggcatgaggctcgaaagaccgacgctggatatctgggagccggcgtgagtgctggccttcaagctcctgctgccgaaggaagggcattggcccccggactaccacctttggcatcccccctggccttagcgcaggcaatggggatcgccctcccggaactgaagttcctgtgtttccatcgagaggtcgctcgcacaacccattaccgccggttcacccttcccaaaaagaccggtggagagcgtacgatctccgccccaatgccccgtttaaagagggcccagtattgggtactcgacaacgtgctcgccaaagtcccactccacggggcagcccacggatttgttcctggcagatccattgtgtctaatgccgcacctcacaccggcaaagcagttgttatcaacctggacctcaaggacttctttccgtccgttacatatccccggataaaaggggtgttccgagccctgggctatggggagcatgtggcgactacattggctctcctgtgcagcgaaaatgcggccgatgagctggaggtcgacggggaacggttcttcgtcggcggaaaggggcgggatagagtgcttccccaaggggctccaaccagtcccatgctcaccaacatactctgccgcaggctggatcgccgtttgaagggcctggccgcaaagctgggctttacctacacccgatacgcggacgatctgaccttctctgctgcacctgagggtacaacacaggtcggccagctgctcagaagggtacaccacgtgttgagggacgagggattcacccctcacccggataagcagcgcgtcatgcgggcctcaagcaggcaggaggtgactggcatcgttgtcaacgagaagcctagcgtctcccgaacagagagaaggcgtctacgcgccgcgttgcatacagcccagcggaaaggactggaagcggcaacatggcagggacagcccgcaacgagagataccctggtggggtacgctagatttgttcagatggtagatgccaggcaaggcgcagccttacttccccgcgctctagccttacccgggtcagcagctgccgttagtccatttccatcaagatttaggcggcaggctgctaagggcgaagcccctacactggccagtgggacttggtggcaacccgccgaaccagcagctccaactcttgctctgaccgcgggccaggtcaaagctgctagacaggaacggttgaatgcagaaagagccgcacgcagggccgatgctgaagcagaagtggagcggatgtccgcaacagaggatgtagcccacggtgaggatgcagacgacactcctactacggcacagccacccatccgatggtggtcgctggcgattcagttttttttggtggtgcagctcgcctctggtgccaaaagcgccatagtttttaccctgggaatcgcctggctcgtgttctctttggtgactcgtaaaaccggctggtggaggttcgtgtttgccatgatgtgtatcctggccattgtagccgggctcaagtga

SEQ ID NO: 13323 - RNA, 1974 nt, synthetic construct
  source 1..1974: mol_type = other RNA
atgagcgacagggtcctgactagagcggaaattatcgagaggatccgggcgtccagcaaagacgccgtggtgctggaagagatgcagcgaatgggcttttggccagccggtgacggaaaacccggcattgaggcagcccttatcgaacgagaaattgaactgactagagctctggacgaggttcaggcaactttgcgcacgcacagcgaccctgaagccgctatgaaggcgatgcgggagcagagaatggcagagagtagagccagacgggaggctacagcgcaggctagggagcagcgaaggcacgagagggccttacggtggcatgctgcgcgcagaaccgacgcaggttacctgggcgctggagtgagcggcggattgcagtctccggctgctgatgccatacacactaccgacgccaccggagtcacaggggaaccaggagcaaagccaagggcactgctggatggactcccagctctggcaaccccactggatctagccggtgccatggggttgactctgcctgaactcaagtttctctgcttccaccgtgaagtcgcacggacgacccactaccgcaggtttctattgcctaagaaaacagggggccagagaacaatatctgccccgatgccgcgactcaaacgggcacagtattgggtactcgatcaactgttagcgaaggttccgtgccatgcagccgcccatggtttccttcccggtcgagggatcgtgagcaacgcagcccctcatacgggtcgtgccgtagtcatcaacttagacattcaggatttctttcccacaatcacgttcccccggatcaaaggcgtgttccgagggttgggctatgacgagcgtgtggcaacaatgttggccctcctttgttccgagaacccctgtgatgaactggaggtggatggagagcggtttttcgtcggcggcaaggggcgtgatagagtcttgccacagggcgctcctacatcccccatgctcactaatgtattatgccgcaagatggaccgtcgtctgcagggactagccgacaaactggggtttacctacacccgctatgcagacgacctgacatttagtgcttctggcgagggggctgccaaagtcggcaccttgctccggcaggctcgacacgttctcctggacgaggggttcacaccccatcctgataagcagcgcgtaatgcgcgcaggatctcgccaagaggtgaccggcgttgtggtgaatgagaaaccttccgtctcacgcgaagagcggagaaagctgagggcagcccttcacaaggcgacgagagatggggttgaagccgccacatggcatggccaccctgccacaagggaggtgctagtcggatacggcaggtttgtggcgatggttgataggcaacaaggggccaccctgctgaagcaagcactggcccttcccggcggaagtgccaagaaaagatcggcatttggcgccctctttcgaaagaaagccgctgaaggtgaggccccaactctggccaggggagcatggtggcaaccagccgatcggcctgaaccagtgctgcagcagactgctgcccagattagagcggcccggcaggaaagaattaatgccgctagaaccgaacgcaggggaggagcagctccaaagcccgaccagtaccaacaacgccgccaggagcagtcaaaccgcgcagcagagaatgctgctaggtggagcgccgctacttccgctgcctctggtgctgctcctagggctggacaccccattaactggggcttatatgcccggcagttcggggtgatgacccttgcggccttccttatagccagttggctcgtgttcttcggcggtctggctcacctcgcactgagaatcaaaactcggtcaaccgggtggggggagttctggatcggcctgatccttctcatagcggctgccgtgaagttctttccccattcaaccgcatga

SEQ ID NO: 13324 - RNA, 1917 nt, synthetic construct
  source 1..1917: mol_type = other RNA
atgtccgacagggtcccaacaagggctgaaatcgtggaacgaatcagggcttccagcaaggacgcttttgtgttggaggagatgcagcggcttggattctggcccgcaggagaaggcaagccgtccatcgaggcggccctcatacagcgggagctcgagttgatgaaggcgctggaggatatgcagcaggaattacgctcacactctgaccctgaagcagccctaaaacgtatgcgcgaggaacgacttgcccaagctcgggccaagcgggaagccactgctcaagcgagagagcaaaggaggcacgagcgggccctaagatggcatgaggcccgcaaaacagatgccggatatctgggcgagggagttagtggagggcttcgcccagcagctgctggtgctcctgcaaggcctctggcagatgggttacccaccctggccacccccttggaacttgcccgtgcgatgggcttaaccctgccagagctcaaattcctgtgtttccacagagaggtggcacggactagtcactaccgacgcttcctcctgccaaaaaagactggagggcagcgtacgatttcagctcccatgccgagactgaagcgggcccagtactgggtacttgaccaggtccttgccaaagttccaagccacgccgcggctcatggttttcttcccgggcgcagtatcgtcaccaatgccacgccccatgcgggcagggaagtcgtaataaacctggacattcaggactttttccccacaataaccttcccacggatcaaaggcgtattcagagggctcggctatgacgagagggtggctactatgctggcccttctgtgttcggagaatccgtgcgacgagctggaagtcgacggggagagattttttgtgggcgggaagggtcgcgacagggtgttacctcagggggcacccacctcccctatgctgactaacgttctgtgcagaaaaatggaccggcggctccaaggcatcgcggacaagttaggatttgcatacacccggtatgctgatgacctcaccttcagcgcatctggcgaaggggccggtcaagtgggtacactcctgagacaagtgcgacacgtcctgaaggatgaggggttcacgcctcacccggacaaacagcgagtgatgcgggccggctctagacaggaggttacaggcgtcgtggtgaacgataaaccctcagtgagcagagaggagcgtcgaaagttacgcgccgcgcttcacaaggcgtccagggaaggggtcgaagccgctacatggcagggccagcctgccactagggaggtactcgttgggtacggacggtttgtggccatggtcgatcgagaacagggggcccccctactcaagcaggctctagcactgccaggtggtgcagctaagcggcgtagcgcgtttggcgccctgtttcgccaaaaagctgctgccggagaagcccccgttttggctcgaggcgcttggtggcaaccagccgaacctccagagcctgtgctgcagcagaccgcaggccagatcaaggccgctcgccaagccaggctcaacgatgaaagaacagcacgtagggggggaaaaccacccgcaccttcacgcgccgatcagagaagggcagaacaggcccagagactggctgatcatgaggcacagcgcgccgcaagaagatctgcaggtgctgctccaggagcagccggagcagatagaccttggctcttgtatgtgaaacagtttgccttgctgctaggaattgctgccggattgaagagcgagctgattctgtacgccggcgtgattcatttgttgctgcgcattaagagtcgggatcgcggttggtgggagttctggctcggcatcggcctgctggttctggtgaatgccctcctgttcaggaggtga

SEQ ID NO: 13325 - RNA, 1944 nt, synthetic construct
  source 1..1944: mol_type = other RNA
atgactgagaggatgccgacaagagcagacttgatcgaaaggataaggacgtcgtccaaggacgcagtggtgctccaggagatgcagagactggggttctggccgcaaggcgaggcacaacctacccttgaggcagccttgattgagcgtgaggcagaggtcacccaggccttgcaaggtctgcaggagcggctgcgagtgattcagaaccctgaagcggctctgcaggcaatgcggaagcagcgcatgcaggaaagcctcatacgccgcgaagccgccgcgcaattgagagaacagcgccggcacgagcgagccttacgatggcacgaggctcgcaaaacccaggtgccttatctgggtgctggagtctccggggggctgagtctgccaactgctcaggcccccgctcgtgctctacaagccggtctgccctcactcgatactcccatggccttggcccaagcgatgggcttgaccctcccggagctgaagtttcttaccttccatagggaggttgccagaacgcatcactacaggcgcttcctattgcccaagaagactgggggacatcgtaccatcagcgcacctatgccacgcttaaaacgggcccagtattgggtgcttgacaatgtgttagcccaggtcccctgtcatgcagccgcacacggcttccttccagggagatctatcctcacaaacgccaagccccatgtggggcaggatgtggtgatcaatctcgatattcagaacttcttccccaccatcacatttcctcgcatcaagggggtatttcagggtctgggataccccgaaccagtagcaactatgctcgccctactttgctctgaaaatccatgtgacgagctggtagtggacggcgaagccttttttgtcgggggcaagggcagagacagggtgcttccacagggcgccccgacatctcccatgctgacaaacgttttgtgccgacgtatggaccggcgtcttcagggcctggcccacaaactggggttcacctacactagatacgccgatgatcttacattttcagggtctggagaggctgcagccctggttggcaaattgctgcggcaggtcagacacgtgctcaaggacgaaggctttacccctcatccagccaaacagcacgttatgcgggctggcgcaaggcagcaggttacaggcgtcgtcgtgaacgatcagcctagcgtaagtcgacaggaacggcgcaagctgagagctgcgctgcatagggcacgccatcagggcatggaagctgccacatggcacgaccaaccagccacccgggaggtattactgggctatagtcgattcgtcgcgatggttgatgccgcccaaggcgctcccctgattgcacaggctatgagattacccggaccagccgctcctccaagaagcggagatgccgccgcgtttcggactaaatcagccgagggtcaagccccccaactgaagcgcggatcctggtggcaacctgccgaaaggcccgcaccagttctccagctcaccgatgcgcagaggaaagacgccaggagggacaagagagcggctgccctagggcaacctagccctgctgctgtgggaggagctccctctcgagctgcagtggcgagtgccggtcttgcaggcactcctgttccaggggccacaggaggtgcaagcgctgcttcagctaggggagcagctgatgcggctcaccccgcaaatgcaacgaaactcccaccgcctccttgggcccagtatggatttcagtccagcctgctgctgttcctgtggattgctggtgtgtcctcctttgtggtggtcgggggattcgcacacatggccttccggttcaagaaaagagagggcggatggaatggcttttggaccggtctgggggtgctactcctcatccagtggctcgtccgggctctgacgtga

SEQ ID NO: 13326 - RNA, 1872 nt, synthetic construct
  source 1..1872: mol_type = other RNA
atgacagccaggcagcccactagagctgagctgattgagcggatcgccgcgtcctccaaagatgctgtcgtgctggacgagatgcgcagatttgggttctggcctgccgacgcaggcaagccatctgtcgaggctgccctgattgagcgtgaggcagagctggtccaggccctgaatcgactccaggcagtggtgagagagcgtggtgaccccgtagccgctctcaaggctatgcgcaaagcccggatggctcaagctcgggaacgtcgagagacgaccgcccaggcacgcgaacagaaacgacacgaaagggcgctcagatggcatgcggcaagggctagtcacgccgggtacctgggacaaggtgtgtcgggcggtctacaggctcctacagacgcggaagctgctttggccaggctccgcgaaggagggctcccattgttggccacaccgcaagctctcgccgaggctatgggcctgtctgtgccagagctgaagttcctgtcattccatcgagaggtggcaagagtgactcactatcgccgctttgcactacccaaaaaaaccggcggtgaacgcattatatctgctccaatgccccggctgaagcgggcacagtattgggtgctcgacaatgtcctagcaaaggtcccctgtcacgccgccgcacatgggtttctccccggaaggagcatcgtaactaacgcagccccacacgcaggccaaggtgtggtgatcaacctggatctgaaagatttctttccaggggtggcctaccccagaatcaagggcgtgttcgccgcccttggctaccctgaggctgtagcaactgtgctggcactgctgtgcagtgagaacgtaagcgacacccttgaggtcgatggggaaccgttccacgtaggcggaacggcccgtgaacgggttttgccgcaaggcgccccaacaagcccaatgttaacaaatatattgtgccgtcggctcgatcgacgccttcagggcttagctgccaagctgggctttcgctataccagatacgcagatgacttgactttttccgctagcggggatggtgaggcgcttgtcggacggttgctgcggcaggtgcaccatgttctcaaggacgagggattcactccacatccagataaacagcacgtgatgaggaggggggcgagacaggaggttaccggagtggtggtgaatgatgggcctagcgtttccaggacacagagacgggcgttaagggccgccctgcatagagcaggtacagcgggtggcgggcaagctacatggaacggaactcccgcctcacgggacacgctgcttggacaggctcagttcgtgagaatggtgaacgcaacacagggaggcaagctggtcacagccgctagggcccttccggttggtggagaagccgttaggccccgggctgctgacacctttagacaacgctcagccagaggcgaagcccccttacgggcagaaggggcatggtgggttcctgcccctaggcctgtgcctcagctgcagctgaccgcaggccagattcaagcgcagaggcaggccgctagacaggcacgacagcaagccgctcgagctacggaacctgcccctgctgcaaccgaaaccgccaccgagactgctaccgccgaaggagacacaccagtccttacccctccccaggttgccgtaccctgggtgacttttggaatccaggccggcttaatgatgctcgtcgccgcgagatctggatccgcactggcccttctgctggcaagtggctggttgggctatgccctactccgcaggaagttcgggtggctgaggtacgctgttgcccttgcggtcctcacccgcctgaccttggggtga

SEQ ID NO: 13327 - RNA, 1923 nt, synthetic construct
  source 1..1923: mol_type = other RNA
atgtcgggagagagacagcccaccagggccgagttgatcgcgaggattgccgccagttccaaggatgccgtcgtgctcaaagagatgcagagaagtggcttttggcctgctgatgccgccgcccctacagttgaagcagccctaatacagcgcgaggccgagctagtgcaggtcctcaacaagctgcaggccgaactgcgggagaagggagatcctcagggggccctgaaggcaatgagacagcagagaatggctgaggctcgtgaacgtcgcgaggccactgcccaaaagctggagagggagagatacgaaagggcagttcagtggagggagcggagccgtcacgagatcgggtacctcggccagggggtttctgcagggttgcaggctcgtgctgacaacgcggggagccacgaaaagcttcaaagagagggcctgcccctcttagacacaccccaggccctggcagacgctatgggagttccagtagcagaactgcgttttctcgccttccaccgcgaagtggcccgcactcagcactatcgacgcttctcactgcccaaaaagaccggcggtgttcggaccatcagtgccccgatgccacgattgaagagagcccagtactgggtccttgataatttgctcgccaaagtaccggtgcacgcggctgctcatgggttcctgccaggaaagtctattgtgagcaatgccgcgccacatgtaggacaagccgtcgtcatcaatctggatctaaaggacttctttccttccgtcagcttcccccggattaagggagtgtttcgagcattgggatatggcgaagccacggctacccttcttgctttgctgtgctccgagaatgtgtgcgatgaactgcaagtggatggggagcgcttctttgtgggtcgcactgcccgggagagggttttgccacaaggggctcccaccagcccaatgctcacaaacatcctctgtcggacgcttgataagaggctccagggcatagccacaaagcttggatttacgtatacccggtacgccgacgacctgtccttcagcgcttcaggtaacgctgccggcctcacagggcgactcttgagacaggtgcatcacattctgaaagccgagggttttactcctcatccggacaaacagcacgtcatgcatgcaggtagacggcaagaagtgaccggcgtggtagtgaaccagcagccggcagtctcacgggagcagagaagagctctccgcgcggctctgcatcgggctaagcataaagggctggacgccgcaacatggcaaggcgagcctgctgcgaggaacgtgctgcttggctatgcacagttcgtcgccatggtgaatgcacgccacggtgccccgctccttgctcaagcaaaagcccttccctctgcagccactccagcagccaaagtgcccccttcacagttcaggcagcatgccgcagctggtaaggcacctcctcgagcgaatggcctgtggtggcaacctgcccccaaacctgaacccgtgctgctgaaaactgcggggcagatcaaagcagaaaggagagcccacctggccgctcaaagggcagagagagacgcggcccgcaaagctgcggaaatagcctcttccccccggagggctttacgagcagcgatgcaggctgcggctgcagctccagctccagaaggcggagcacctcaggaaacccacgccccactgctgccactgattcggtggcccttagttattgcacaggccgccctattggtatacttaagtgtcaagctgaaatcccccggcctctttttagctggcggactgtggctaggctggcgagtgatgaggcgcaagtttggatggccatcttacttcctggctctgttcgttatcggctttgtggcagggatcctgcacttatga

SEQ ID NO: 13328 - RNA, 1893 nt, synthetic construct
  source 1..1893: mol_type = other RNA
atgtctgaccgacagccaaccagggctgaattgatcgcgcggatcgctgctagtactaaggatgccgtggtgctccaggaaatgcagcggctaggcttctggccccagggttctggcgagcctggaattgaggccgctctgatcgaacgggaggctgcactggtgcagcgcttgaacgccctgcaggcggagttaaagattgtgggtgatccccaggcagccctgcaagctatgaggagagagcgtatggctgcagccaaagctcggagagaggccaccgcacaggctagagagcaacggcgccacgaacgagcactgcaatggctggaacgctcccgcgacgcaataggccatctggggcacggcgttagcgcaggtctttcccctcagcccctcgaagccgacgataggcgacgcctggaggccactggtcttccgtgtattgatactcctctcgctttggcccaggcgatgggtataggggtagccgagcttaagtttctttgcttccaccgtgaggttgcgcgcacccagcattatcgtaggtttgggatccctaagaagaccgggggagtccggacgatttctgcgcctatgccacgcctcaagcgagcccagtattgggtcttggacgcccttcttgccaaggtccccctccacgctgctgcccatggcttcgttcctgggcgttccatagtcagcaacgcggcaccccatgctgggagagacttggtgatcaacctggatctgaaggacttcttccccagcatcacgttcgccaggattaaaggggtgttccggcgcctgggataccctgagcagatagcaactctgttgggactcctttgctctgagaatgtgtgtgacgagctgcaggtggatggagagagattttacgtgggccgtaccgccagagaacgcgtcttgccgcaaggggcaccaaccagtcccatgctgacaaatattctgtgccgacggctggatagaagattgcagggcgttgcggccaagttgggctttacatacactcggtatgctgacgatctaaccttctctgcctgtggcgaggctgctggtaggagcgataggctcctccggcaggtccactttatcttaagggatgagggcttcaccccacatcctgacaaacaacgggtgatgcgggctgcctcccgacaggaagtgacagggatcgtagtcaatgagcggccgggcgtgagcagagaacagagacgtgcactgagggcggcattacaccgggcccagcaaaaaggaatggaagctgccacttggcaaggccagccggctaggaaggacgtgctggtgggatttgctcaattcgttgccatggttcagcccgcgcaaggacaggccttactcgctagggccaaagcactgccagccaccggaacaaaagctgccgccgcagccccatcaaggtttagagagttcgccggacagggaaaggcaccgccaagagctgctgggccttggtgggaacctgccccaaaacccctccccgttctgcagaagacggcaggccagctgcgagaggaacgcagagccaggctggccgaagctagagcgttacgagaaggtagacctcctcgcactgctgccaccccaacagcaccttcggcctccggtagccccccatcaagtgccacagcacccacaggcccaaatgcaaaagccggacccgtcaactgggacgcctggctactccagctgggcatgatggtgctgatgagtgtgcgcctgcactcagcggtctttttcctactgggggcaatttggatgggatcaaggcttgtgcgcaggcggtttgggtggccatcctttatcgccgtacttctcgccgtaggcctcgcagcagagtggctgaaaccctga

SEQ ID NO: 13329 - RNA, 2016 nt, synthetic construct
  source 1..2016: mol_type = other RNA
atgagcaaccctcagcccacccgtgccgagattttcgagagaatcaagcagtcctctaagcaagaagttatcctcgaagagatgcaacgactcggcttttggcccaggtccgaaggacagccggaagtggctgctgacctaattcagcgggaaggggaactgcaacgagagctcgcggaattgaataagaagctggcggtaaagcggaaccctgagcgcgctttacgcgaaatgaggaagcagaggatgaaagacgccagagacaagagagaggtcaccaaacgagctcaggcccaacagcgttatgacaaggccctgctttggcacgaaaaaagggcatctcacgttgcttatctgggccccggcgtgagcgcatccttgcatgagaactcttctgctacccaggagcagggcgataagggcaaacccaaacgtgccagagatagggccgtgcccgatcttcagcgactcaccctgaacggtcttcccgcacttatttccgctgcccagctggcagaatctatgggcgtttctgtagccgagttaagattcctctcttttcaccgagaggtcgcccgaacgaaccactatcacagctttacactgcccaagaagactggtggggaaagactcatatcggctcctatgccgcggctcaaacgcgcacagtactgggtgcttgataacgtactggcaaagatgcccgcgcacgatgccgcccatgggtttttagcggggaggtccatcataagcaacgctaaacctcacgccggacaggatgtcgttattaatctggacgtgaaggactttttcccctcaatagcttttgggcgcatcaagggggtgtttaggcagctggggtatggcgagagtattgccacagtgttcgccctcttgtgctccgagaatcgtgcgcaggcctggcaagtcgacggtgagaggctgttcgtaggaggaaaggctcgcgagagggtgttaccgcagggagcacccacttcacctatgctgaccaacctgctgtgtcgcagaatggaccggcggctgttaggactggctaaacagctcggcttcgtttacaccagatatgccgacgacctaaccttcagcgcctcaggcgaacccgcaagggataatgtgggcaaactcctgagcagggtgcggtggatcctacgggacgaaggatttacccctcatccggataaagagcgggtgatgaggaaaggccggcggcaagaggtgactggattggtcgtcaattccgatacgcccagtgttagccgagagactcgccgcagactgagagccgcactacatcgcgcgtcccagccagatgccgcctcaaagccagcacattggcagggtcacactgcccagcctagtcagcttctggggctggctaccttcgtccaccagatcgaccccaaacagggcaaaacgctcctggccgatgctcagcagctcatgcgcagcccaatcgacagagccaacgacgcagcgaagagtgctagcagggcagatgcagcccagcagtcattccgagtactggccgcagccggaaagcctccagtcttggcagatggcaaaaattggtggcagcctgcaccacccgcaacacctgtgctggagaagacagatcagcagcggagagaagagcgtcaggctactagacgtcaacaggcagcggccgcagctccaccaccaagttcaacaagaaggaacgagaggccacaacaagccgcccatgaacaacagggcgacgcccagcctcaaaatgaggcccctccacgctttgaccctgaccaatacgctccgccaccacggaatgtcatgacttactgggcccaaatcgctatcagttttttccttgggtcgattctccataatcggttgattacaattttcgcgatggtggctgtgatagctttgtactacatgcggcgccagcgctgggatgttttcatggggatcctggtggtggctacacttctgggttacttggtgagaggtatgggatga

SEQ ID NO: 13330 - RNA, 2022 nt, synthetic construct
  source 1..2022: mol_type = other RNA
atgtcgaacccacagccgacccgcgcagaaatctacgaacggatttcacagtcctccaagcaggaggtcatactcgaagagatgcagcggcttggcttctgggccaaggatagcgggcagccccaactggcagaagaactcatccgtcgtgaaggcgagctgcagagggagctgtctgagctgcacaaacagctagctgtcagacgtgacccagagcgggccctgagagagatgcggaaacaaagaatgaaggacgctagggacaagagagaggttactaaacgggcccaggctcagcagcgttatgaaaaggcactcgcttggcacgacaagcgggcaactcacgtgggttacctgggaccaggtgtatcagccagtctgcaggatgccgacgagcctatcgctcagagcgataaaaaaccgaagcgagcacgagatcgagcagtgccagatctgacgaggttagctgtcaatggcttacctgccctgacctcagccgctcagctcgcacagagcatgggggtcagtgtagcggaactgagatttcttagctttcaccgggaagtggccaggtcccaccactaccactcattcacactccccaagaagacaggtggagagcgccttattagtgcccctatgccgagacttaagcgtgcgcagtattgggtgctggataacgtgctcgcaaagatgcctgcacacgatgctgcgcatggctttctcgccggccggagtatcatctccaatgccaaacctcatgccgggcaggacgtcgtgatcaatctcgacgttaaggatttttttccctccattgcattcgggcggatcaaaggcgtctttagacagttgggttatggcgagaaaattgccacagtgttcgcactcctgtgttcggaaaacagggcccaagtgtggcaggtggatggcgagaagctgttcgtcggggggaaggcacgagagagagtcttgccccagggagccccaacatctcccatgttaactaatcttctatgcaggcgaatggataggagattgcaaggcttggctgctcagctcggattcgtttatacacgatacgccgatgatctaaccttctccgcatcaggcgaggcggcccatgacaatgtgggcaggctgctcggtcgtgttaggtggatactgcgcgatgagggctttactcctcatccagacaaggaacgggtgatgcgcaaaggtaggcgacaggaagtgaccggactcgtagtaaacggggacacgccaagcgtctctcgcgagacaaggcggagactgagggcagccctgcatagggctagccaacctggcgctgctgcgaaacctgcgcattgggaaggtcatgccgcccagccctctcagctgttggggttggctacttttgtgcaccagattgacgccaggcaagggaagcctctgcttgccagcgcacaacagcttatgcgcaatcctatcgacagggccaacgacgcactgctggctgcatcccgagccgatcgcgcaacaactaccaacgccggagatttccgccgcttatctgctgcaggacatccccccgtgagagctgacggcaaaacctggtggcaaccagccgagccgtcagctccagtgctggaaaagaccgaccagcagagacgcgaggaccggaaagccgcgagacaaagcgctcagccacagccccagcttcagctgcagccccaaaccgggggaaacgcgaatggaaccgccagaacgagccagtccggaaatagacagcagaacgcttctcagactgccccccaatctgaccctcccaaggagcggggcacacggaacatgatggtgtattgggcccaaattgccatcacctttttcctaggcagtattctccacaaccggttaatcaccatattcgctatggtagccgtcattgctttgtactacatgcgcaaacaacgctgggacgtgttcatggggatactggtggttgcgactttgctggggtacctggttcgcggagttggatga

SEQ ID NO: 13331 - RNA, 2037 nt, synthetic construct
  source 1..2037: mol_type = other RNA
atgagcaacccacagcctactagagccgagatctacgagagaatagcgcagtctagtaagcaggaggtcattctcgacgaaatgcagcgcctgggcttttggcccaaagccgaaggccagccacaactggccgcagagctgattcaccgtgagggcgagctccagcgggagctttctgaattgaaccagcagctgggagttcggagagatccagagagggcgttgagggaaatgcgcaagcagaggatgaagaacgctcgggagaaacgtgagacaaccaaaagggaacaggctaagaagagacacgagcgcgctcttgcatggcacgcaagacgtgcttcccatgtcggttatttgggacctggagtgtctgctgcactcgttgacgggccactcacccagcaagaacaggaacagaccagcaggcgaacgagggaccgagccatcccagatttgcctagactcgcccggcatggtctacccgcattatccagcgccgcacagttggctgagagcatgggcgtctctgtggcagagctgcgctttcttagtttccatcgcgaagtggctcgcacacaccactatcactccttcacactccccaaaaaaacaggtggcgagcgcctcatctcggccccaatgcctaggctgaagcgggctcagtactgggtactggataacgtgctgaataaaatacccgcccatgaagccgcccacggtttcttagctggccggtctatcataagtaatgctgctcctcacgcgggacaggatgtggttatcaacctggacgtgaaggatttctttccaagcattgccttcgccaggattaagggagtgttcaggcagttgggttatggtgaaggcgtggcaacagttctggccctgctgtgctcagaaaaccgggcgcaagcctggcaggtcgatggagagaggctgttcgtagggggcaaagcgcgtgaaagagtgttgccccaaggcgcccctacatccccaatggtcaccaatctgctttgtcgtcgtatggatcggcggctacaggggctcgctagacagctggggttcgtgtacaccagatacgccgatgacctgacgttttctgcatcgggcgaagccgctagagatcatgtggggaagctgctgggccgggtcagatggattctccgcgacgagggctttaccccgcatcccgataaggagcgggtaatgcgaaaaggcagacgccaagaagtgactggactggtggtcaacggcccttcacccagcgtgagtcgcaagactaggcggcgattgagggccgccctgcatagagcctcaaggagtgctgcagacgcaagtacctccactcaggctcattggcagggacagcaggcgcaaccgagccagttactggggctcgcccagttcgtgcaccagattaatgccagacaagggcgccaactcctagccgacgcccagcaactgatgcggtcccctcttgaccgggccaatgacgccttgctagcggcctccaggcaggatcagagaagcgcaagcagctcctcacccgcatcttttcgcgcattagctgcagcgggaagggctcccgttcgaaccaatggcgagccttggtggcaacctgctgccgctcttgagcccgtgctcgagcagactgacttacagaggcgagaagctcgccaacttgcccgacacggggcctcaagtgcgtctggagcctcctctaataggagatcctccagtgacagccactttgggagaggaccgcagtcagggtcatccaggcaagaggatcaggggaacgcctctggtcgctttagcttcgacgacgcagcaggacgggacgatcaaggagctagcaaagacaagccagcaggccgactcggtacgtattggatgcagatggttatttgcttcgttatgggctcaatcctgcacaatcgcctgatcactatttttgcaatgatcgctgtcatcgtactttactacatgcgacggcagagatgggatgtgtttatgggggtactggtcggcctgtga

SEQ ID NO: 13332 - RNA, 2022 nt, synthetic construct
  source 1..2022: mol_type = other RNA
atgtcggctccacagcccacacgggcagagatttacgaccgcatcaagacttcgtccaaacaggaggtgatactcgaagagatgcagcgcatgggcttttggccgcagggggaaggggaacctcaagtcgcagcggaccttattcagcgagagggtgagctacagcgggagatgtctgagttgagagagcagcttgcagtccgcaggaatccagaacgggcactgagagaaatgcgaaagcagcgcatgaagcaggccagggaccaacgcgaggaaaccaggcgtagacacgcccaggagagacacgacaaagccctggcctggcatgggacaagagcctctcacatggggtaccttggacccggagtctctgccgctctacacgctcccggacaagatggcagtgccgacggtgcctcaggacgcaaacctgcaagggagagaagcgctccagatctccggcggctagccctgaacggattacccgccctgacaagtggagcacagcttgcagaagctatgggggttagtgtggctgagctgaggttcctgtctttccatagagaagttgcccggacccatcactatcattcctttacactccctaagaagacagggggcgagagacagataagcgctcccatgccccggctgaagagagctcagtactgggtgctggacaatgtcctggcaaagatgcccgcccacgatgctgcccacgggtttctggccggcagatccattgtgagtaatgcaaggccccacgctggccaggatgtagttatcaacctggacgtgaaggatttcttcccctcaatcgcttttggcaggatcaagggggtctttcgccagctgggctacggcgagggaattgcgactgttctcgccctgctttgctccgagaatagggcccaggcctggtccgtggacggtgaaaggctgttcgtgggcggtaaagcacgagaacgagtgttacctcagggggcgccgacctctccaatgttaaccaacctgttatgccgcagactggatcggaggttgcagggcctggcggcacaattgggcttcgcgtatacgcgctatgccgacgacctcacctttagcgccagcggcgacgcagcacgtgatcatgtcggcaagctcttgtcccgcgtgcgttggatactgcacgacgaaggcttcactcctcatccggataaagagagggtgatgcgtaaggggcgtaggcaagaggtaactggtttggtcgtcaacggaagtcagcccggcgtgagcagacagatgcggcgaaaacttagagcagcgctacaccgagcatcccacgccgctcctggagatgcaccagctgcccattggcaggggcaggctgctcaaccctcacaactgctgggacttgctcagttcgttcagcaggtggacgcccaacaaggaaaagccctgctggcgtccgccagacaactcgtaagggatccagtggcccgggtaaatgacgctctccgggaagcagccgctgaagaccgacttgcagccgcgtcagaggccgctgtttcctttcgccaggccgctgccagtggtcgttcacctgtgagggcgaatggggagggctggtggcaacctgaacagaaagccgccccagtgctggaacagaccgatcagcagagacgagaagcccggcagcaagctaggcggcaatctcttgcagctgcctcacccgcgagcccagagactgcacctgggaacggtgctcgcagagtccagggtgttcctgcagagggcgtgtctccggctcagcctggtaaagccccagaggcttctggactcccaccagtccgacggatgctcaggtactggagccagatgggactgtgttttctgctcggaagcattctccataacagattgatcacgattttcgccatggtgatggtgatcgccttgtattatatgcgcaagcagcggtgggatctgttcgcaggcgttctcgtgatcgccaccttgttagggtacctagtacgcagctga

SEQ ID NO: 13333 - RNA, 2010 nt, synthetic construct
  source 1..2010: mol_type = other RNA
atgtcgcagcctcagcccactagagccgaaatctacgagcgcattaaagccagctctaaacaggaggtaatcctggaggaaatgcagcgcctcggcttttggcccaaagacgagggacaaccgcagttggccgctgcccatatccagagggaaggcgaactacagcgggaactggccgaactgcgacagcagatcgccgtgagacagaatcctgagcgggctctgcgccagatgagaaaggagcggatgcagaaggcgttggcccagagggaagagactaagcggcgccaggcccaggagcgacatgacaaggccctcgcctggcatgctaggaggtctacccacgttggctaccttgggcccggggtcagtgctgcactccaagacgccgcgagagacggaaccgagcgtaggcaagccgatccccaacgccttgccagacacggactccctcagctcgccgatgccgcacagttagcccaggcaatgggaataactgtggccgagcttcgcttcctagggtttcacagagaggtggcgaggacacatcattatcatagctttaccctgcccaaaaagacaggaggcgagcgccttatatcagccccaatgcccagactcaagagagcccagtattgggttctggataacatcctggctaaagtgcctgcacacgatgcagcacacgggtttctggccggccgtagtatcgtgagtaatgctgcgccgcacgcaggacacgacgtggttataaacctggacgtcaaggatttcttccctagcatcgcatttggcaggatcaaaggggtgttcagacacctgggctacggcgaggccatggccactttgctcgctctcttgtgttccgagaacagggcccaagcctggcaggtggacggagagaaattgtttgtagggggaaaggcccgagagagagtgctgccacaaggcgcccccacctctccaatgctgacgaacttgctctgcaggcgcctagatcggcgactcctgggcttagcccgacagcttgggttcgtgtatacccggtacgccgatgacctgacgttctctgcgtcgggagaagctgccagggacaacgtcggacgactgctgggtcgggtgagatggattctccgggatgaaggtttcacaccccatcccgataaagaaagagtcatgcgcaaggggcggaggcaggaagttacagggcttgtcgtgaacgcagacaagcctggtgtgtctcgccagaccagacgccgtctgagagcagcgcttcaccgcgctacccaagcaggcaccggcttaccaggccagtccgtacagcctgcccaagtcccccactggcagggacaaccagcccatgcttcacagctgttggggatggcccagttcgtccaccaggtggacccagttcagggcggtcccctattggcacaagcccggcagctcacacgtagccccgttgaccgggcgaatgacgcactgctggaggcatcaaggcaggatcgagcagctgctagggctaaaccccctgccaatgctactttccggaggttggctgccggtggtcaagctccagcgttagccagcggcaagccatggtggcaaccagcagccccagcagctcctgtgctggagaagactgatcagcagcggcgggaacagagacaggaggaacggcaagcggctaggcaagctgcaggtccggctccaggagcagcttccacactgccagctgcaagcacatcccctagcccttcacctagtcctgctgctcccgatccgaatccaccggcttccaagcgtcctcccatggctgggctgcttacttattgggcgcagattgtcatttgctttctccttggtacggtatttcaggcccgtctgatcaccttaattggcattgtgctggtggtgattctgcgctacaggagaatacagcgctgggacgtcttcggagccgcaatggtcgtggcagtactggttggcctcgggttacgactgtcctga

SEQ ID NO: 13334 - RNA, 1896 nt, synthetic construct
  source 1..1896: mol_type = other RNA
atgtctcagccccagcccacccgcgctgagatatatgaaaggatcaaggcctcctccaagcaggaggtcatcctggaggagatgcagaggctcggcttctggcctaagggtgagggtcagccacagctcgctgctgcccacatccagcgggaaggcgagctgcagcgcgaattggcagagcttaggcagcagatcgccgtgagacagaaccccgaaagagctctgcgccagatgaggaaagaacggatgcagaaagctcttgcacaacgggaagagacaaaacgtcggcaggcccaggagcgtcacgataaagccctcgcatggcatgcccggcgttcgactcacgtgggataccttgggccaggcgtaagcgccgccttacaagatgcagcgcgcgacggtactgaacgacgccaagcggatccccaacggttagctcggcacggcctgccacagttagcggatgcggcccagttagcccaggccatggggattacagtggccgagctgcggttcctcgggttccacagagaggttgcccgaacacaccactaccatagcttcaccctgcccaaaaagaccggcggcgaaaggctcatctcagctccaatgcctaggctgaagcgcgctcagtactgggtgcttgacaatatcttggccaaggttcccgctcatgacgcagcccatggattcctggcgggacggagtattgtgagcaatgccgctccgcatgccggacacgacgtcgttataaacctggatgtaaaggactttttccctagcatcgccttcggacgcattaaaggcgtgtttcgacacctcggctatggcgaggcgatggccacccttctggctctgctgtgctccgagaaccgcgctcaagcatggcaagtagacggcgagaagttgtttgtcggggggaaggcgagagaacgcgtgttgccacagggtgcgcccacgtctccaatgctgactaatctcctttgtagaaggctggaccgtagactactgggcctggcaaggcagttggggtttgtgtatacacgctacgccgacgacctgacatttagcgctagtggcgaagccgcccgtgataacgtgggaaggctcctgggacgagttaggtggattctgcgcgacgaaggcttcaccccacacccggacaaagagcgagttatgagaaaggggagacggcaagaagtcacgggcctggtggtcaatgccgataagcctggggtgtctagacagacgagacgacgcctacgcgccgccttgcacagagcaacccaggctggtactggtctgccgggcctacctggacagagcgtacagcctgctcaggcaccccactggcaaggccagccagcacatgcatctcagctcctcgggatggcccagtttgtgcatcaggtcgatcctgtgcaggggggccccttgctagctcaagccagacaactcactaggagtcccgtcgatcgggccaacgacgcactgctggaggcatccaggcaggatagagcagccgcacgtgccaaaccccctcaaactccacgatcaggtgcgtggcagcctgctgggagacatcttaggtggccagctgcatctcatggaggaagccgaccccaccctcaaaggccgtgctggaggcgacctaccagttcaggggcaagtagcgctaggaggaatggtcgcccaccagggaggcggttagccttgccaccggcatcacaggctccctgccctagacaccggcccttacaccggcatcggcaccatcgaccccatcggacacgcattagacctcaccgtaaaggaaggcggtggcctgcatgctccccaaccggaagacgctcaagatccgcttcttgttgggccccgtgttccagacccggatga

SEQ ID NO: 13335 - RNA, 1983 nt, synthetic construct
  source 1..1983: mol_type = other RNA
atgtcccagccgcagcccacaagggcggagatttacgagaggataaaggcgtcctctaagcaggaggtgatcctggaagagatgcagcggttgggcttttggccgaagggcgagggtcaaccacaactcgcagccgcccacattcagagagagggcgagctccacagagaactcgccgaactgcgaaggcagcttgctgtgcgacaggaccccgagcgtgctctaagacagatgcgcaaggaacgcatgcagaaagcgctggccaggagggaggaaactagaagacgccaggcccgggaaaggcatgacaaagccctggcctggcacgcacgaagggatacacacgtgggatacctgggccctggagtatcagccggactgcacgagccccgcgatgaagctcaacagcctgcagctagagatcgccggcaggcagatccccagcgattagcccgacacggcctacctgagttggccgacgcagctcagctagcgaccgccatgggcatcaccgttgcagaactccgttttctgggcttccacagggaggtggcgcgaacccatcattatcacagcttcacactgcccaagaaaacaggcgggcagcgcctgatctctgcccctatgccccggttaaagcgcgcccagtactgggtgttggataatatactcgccaaagtccccgcccatgacgccgcacatggcttcttggccggtcgttccatcgtgtcgaacgctgccccccatgcaggccacgatgtggtcatcaacttagacgtcaaagacttctttccctccattgcctttgggcggatcaaaggcgtctttcgccaactcggctacggtgaggctatggccaccctcctggccctcctgtgctcagaaaatagagcacaggcatggcaggttgacggggagaagctgtttgtaggggggaaggcgagggagagagtcctcccacagggagccccaacttctcccatgctgacgaacctgctgtgccggaggctggacagacggctgcttggattggctcgtcagcttggattcacttatacccggtatgccgatgatttaacgtttagcgcctcaggacaggctgcccaagaccacgtgggcaggcttctggggagagtgcggtggattctccgggacgaaggtttcacacctcaccctgacaaagaaagagtcatgcgcaggggtcggaggcaagaggtgactggcctggtcgtgaacggagagcagcctggggttagccgcgagactcggagaaggttgcgggcagcattacacagagctgctcaggcagttcccgggcaacggccacattggcaagggcatgccgcgcagcccagtcagttgctgggccttgctcagttcgtgcatcaggttagaccggcccaaggaggggctcttctccgacaagcgcgacaactattaaggagccctctggagcgcgctaatgaagccctgatcgaggcgagtagacaggatagagcacgcgcccccgaagcccaagctttcaggcagagagcagctgctggtcaggcacctgcactcgccagcggaaagccatggtggcagccagctgcaccagcagctcctgtgctcgagaagaccgatcagcagcgccgggaagagcgtcaagagcagcgccagcagcagaggcaggaacagcagcaggctgccagagcacaagcacacgctgccgctgcaccagctcctcaagctgcgagtgccccagcccttccacaagaacctgctccacctcccccggccaagtctgctctgccaggacttctgacatattgggcccagattattatatgtttcgtcctgggtactgtgtttcagacgcggctggtaaccctaattggcatcgttttgaccgtgatactcaaatggcgacgcctgcagcgttgggacgtgttcgccggagccatggtaatcgcggtcctgctggggcttgtgttgaaaccgtga

SEQ ID NO: 13336 - RNA, 2073 nt, synthetic construct
  source 1..2073: mol_type = other RNA
atgcggtgttctaccttctggagactgctgatcgggagtactgccgccgccaccaaggaaggacgcatgtcacagcagagcacaagtcgggctctaacccgggcagaaatctatgaacgtatcaaagcatctagccggcaggaagtgattctggaggagatgcaacgcctgggattctggccgaaagccgatggggagccgagactggcagctgagcacatcgaacgagaggcccacctccagcgcgagttagcagagctgagagcccagatcgcagtaagagagaatcccgaaagagccctccgccagatgagaaaacagcgaatgcagcaggcccttgcgcagcgcgaggaaactaagagacagcaggccagactgcggcacgaaaaggcattggattggcatgcccggagggcgacacatgtgggttatctcgggcctggcgtgtcagccgcattgtcacctgctgctagccagggaagccccgctaggaaagctgcattgacggacgcccctaagcttataggctctggtctgccagtcctagaatcagccgctcagatggcccaagccatgggcgtcactgtggccgaactgcggtttctttcctttcatagggaagtcgcccgtagccaccattaccacagtttcaccctgcccaaaaaaaccgggggccaacggctaattagcgctccaatgcctaggctcaagagagcccagtactgggtcctcgataatatactgggtagagtgcctgcgcatgaggccgcacacggctttcttgcaggccggtctatcctcagtaacgcccttccccacctcgggagagacgtcgttatcaacctggatgttcgggacttcttcccctccatttcctttgcccgtattaagggagtgttcgttcgcctcggctacggagaggcagtggcgacagtgctggcactgttgtgttctgagaaccgggcgcaggcttggcaagtagacggcgaaaggttgttcattggtggaaaggctagggaacgagtactcccacagggggcacccacctcgcctatgttaactaacctgttgtgcagaaggttagaccgccgcctgcaagggttagccagccagctgggctttgcgtatacccgttacgctgacgacctcacctttagtgcttccggtgaggcggctagggacaatgtgggcaggttgctgggccgagttcgctggattctgagggatgaagggttcacaccacaccctgagaaggagcgcgtcatgaggaaggggcgtcgccaagaggttacgggggtcgtggtgaacaacgctcagccagggtcttcgaggcagatgagaaaacagctgcgcgctgccttacaccaagcagctcgacatggggccggtgcctctgataagccagcccactggcagggacagacagcacaggtcagccagctgctgggactagcccagtttgtgcatcagatcaatcccagacagggactcgcgctcgtcgaacaagcccggtccttaggaaagggcccgctggagtccgctaatcaagccctcacgcaggcggcaagggaggatagggagcgcaaggctgcctctgctgggtttcgtaggagcgcggcccaaggtcaagctccagtgcgagcgaatggtcagccctggtggcaacctgcaccggcagaaccccctgttttggagcagactgaccagcagaggagggagctacgacagcaggccagaagagagatgcactccctccaggcaggatcctccgcccaagcagcttcaggcgagcgagctatggcagaaggaccaactcctgcccccgctgtacagagtcaagccgcccatgagactgccccaccaacatcaggccccgctcttcggcgccttctgacctactgggcccaaattgtggtgtgcttcgtgctgggcaacctgttgcacacaagagtggtaaccctggtgggcatagcccttgtcgtggttctgtattaccggcggaaacagggttggggacttttcttcgctgctatggtgctggcagtcctcgttggcatggtgtttaaacagtga

SEQ ID NO: 13337 - RNA, 2025 nt, synthetic construct
  source 1..2025: mol_type = other RNA
atgagcacaccccagcctagcagggcccagatatacgaacggattaaagcctcctccaaacaggaggtggtcctggaggagatgcagcgcatgggcttttggcctaaggatgccggccagccacaacccgcagcagaactgatccagcgcgaaggagaactgcagcgcgagctgcagacactgagaaaccagttcgccgccaggaaggatccagagagggccctcagagaaatgcgtaagcagcgaatgcaggcagccagaacacagcgcgaagccacaaaacgcaagcaggctcaacagcgacacgacaaggctctggcctggcatcgggagagggcaacgcacatcgggtacttgggccccggcatcagtgcagggctacagacccctgcacaggacgaagccgctgttaaatcaacctccgaacgccaaagaagaggcccagatatggccaggcttgcacggcacggacttcccgagctgacttcaggggcccagttagctgaagctatgggcgtctccgtcgctgagctccggttcctttccttccacagggaggtcgctcgctctcaccattatcacagctttactctgcccaagaagacgggcggtgagcgcctgattagtgcgccaatgccacggctgaagagagcacagtactgggtgcttgaccaggtcttggccaaaatccctgcccatgacgccgcccacggattcctagcaggccgaagcatcatcagtaatgcgcagcctcatactgggcaggatgtggttattaacctggatgtaaaggactttttcccttctatagcatttggtcggataaagggggtgtttcgccagttggggtatggggagtctgtggcatctgtgttagccctgctgtgctcagagaacagggcccaagcctggttagtggacggcgagcgattattcgtaggcggcaaggcacgagaacgggttctgcctcaaggcgcgcccactagcccaatgttgaccaatctcctctgtaggagactggataggcgtctacaaggtctggctgcccagctcggctttgcttatacacgctacgccgacgacctcacatttagcgcctcaggagaggccgctcaggaacgtgttggtgcgttgctgcggcgtgtccggtggattctcagggacgagggattcaccccgcacccggacaaagagcgggtgatgaggaagggacgacggcaggaggtaaccggattggtggtgaacggtgccgccccctctgtgtccagacagaccagacgccaactccgagccgcgctgcatcaggctactcaagccggctctgctagtgccgccgttgcacctcattggcagggtcaggccgtgcaaccaagccagctgcttgggctagcgcagtttgttcaccaggtcgacgccaagcaaggacaggctcttctggcttccgcgcaacagctggcagcagtacccggtgcgcgcgtaaaccaggacttggctgatgctgctgcaagggataggcgcgcagctacaaggccgcttcctttcagacaggcagcggctgccgcacaagctccagtgagagccaatgggcaggcctggtggcagccagaagagaaagctgctcccgtgctggaacacaccgatcagcaacgtaaagagcaaaggcagcagttgcgtagagaggccgcagctgctcaaaccccagatgcggcatggggacgggctgaaccccataatagatcagcggaaagaaactccagtcaagagcctgctagccatgtcgcaccgaatcgagcatcgtcaagagccaacaaagggaaacctgctacgccacggagcctccccaggcttggaatgcacatcctgctcggcatcgcccaggggatgtctctgaataagcccctgatcaccgtgttcgccctcgccctcgccattactctctattacatgaaaaagcagcggtggggaatcttcattggcttagtcctggttgtgtcgtggcttgtgattgggtttactgcctactga

SEQ ID NO: 13338 - RNA, 1998 nt, synthetic construct
  source 1..1998: mol_type = other RNA
atggcggccccggctccgacaagagcagagttgctcgagcggatacgcgccagttctaaggacgccgttgttctggccgagatgcagagattgggcttttggcccagagacgaagccagaccggctccagccacagagctgatcgaacgcgaggccgctctcatgcgcgaattgggggagctccaagccgagctccacctacgaggtgatcccgagaaagccctccgggccatgaggcaggaaagattagcggcggcacgggctcaacgagacagtcgagcccgggagagagcccagcgacagtacgaacgggcccagcagtggcatgcccaacggcaacagcgcattgggtacctgggagccggggtttccgcaggactggaacgacccgcggatagacccgctgctcatgtcccactgcgcgctggacgctctgagcgactggctaggcacggactgccggcacttgacagcccacaagctcttgcccgggccatgggtgtagcattgggggagctgcgctttctcagcttccaccgcgaggtgggacgtcacacccactacagacgcttcacactgcctaaaaagtccgggggggaaaggctcatcagtgcccccatgcctcgtctcaaaagagcccagtattgggtcttggataatatcttggcaaaggtgcccgctcacgacgccgcacacggattcctacctggcaggagcgtcgtcggaaacgcccagccacattgcggccaggaagtggtagtgaatctggacgtcaaagacttcttccccagcataggttttggcagaattaaaggcgtgtttacgcatctggggtacgccgaacctgttgccaccgttctagccctgttatgtagcgagaaccgggccgatgaacttcaggtggatggcgagaggtggtttgtgggcggggcagcaggccaaagggtgttaccacaaggggcgcccacatcccccatgctcactaacctgctctgcagaagacttgaccgtcggctggccggcctcgctagaactctgggatttgcctatacccgatatgcggatgatctgtccttttcggcttctggagaggccgcacaacgcgtcggccctttgctaaggcgagtgcggtggatcttacgcgacgaagggttcgagccccaccctgacaaggaacgggtgatgaggaagggcgccagacaggaagtgactgggatcgtagtcaacgcggcccagccaggcgtgtctcgtcaatcacggcgcgctctaagggcagcgctgcatagggctagaaccgcaggtgcgggtccagctcactggcaaggtgagcccgcctcacgggagaggttgcttggctacgcccatttcgtgcagggggtaaacgaagcccagggtagggctctcgtccgagctgctgaagcccttcctctggccagcagggctgcagcatctcctgctgcagctcccggaactgcagcgggtgattttcgcattcgggcagcacaaggagaggctccagtgcgcgcccaaggaccttggtggcaaccagcctcaccccctgctccagtaaggcagagaactgatggggagattcgggaggccagggctgctcagcgacaagcagcagcggaagccaggcgtgcagctcaagcaggagcagcggttgcagcaccagctggacggagtggcaatggcagcccagctaggtcaggagctcctgcctcagttgataccgcccgtcaagctcggaatgctcgcgctgcaggcaggggtagaaaggccgacgcatctccgaggagccgcaagacctattggctgcagttattcgtggtgtggcttgcaggcacgttgtcggggtccgggtttgtgacagtgttcggcctgatctacctgcttggcgcctattgggcccggcaccagagatggtcccatttctccctggccatgctggccatcctcgttctggtccctgtgctgcgtagtattggcatactgtga

SEQ ID NO: 13339 - RNA, 2127 nt, synthetic construct
  source 1..2127: mol_type = other RNA
atggcagccccacagcctactcgggcagaactgatagaacggatcagggcctccagcaaagacgctgttgtcctggcagagatgcagcggttagggttctggcccggtggcgaatcacaacccgaaccggccgccgagttgatagagagggaggccgctcttataagagaactgggcgagctgcaggccgagttgcagttgaagggcgaccccgacaaggctctcagagccatgagacaggaaaggctggcagctgcccgagcccagagggaaagcaaggccagggagcgcgcccaacgccaatatgagcgggctctgcagtggcacgcacagaggcaacagcggatcgggtacctcggggctggtgtgtcagcagggctggagaggccagatggccaagcagcgcatgcccctctacgaccagctcgaccggaacgcctggcacaacacgggttacccgcccttgagcaccctcaggctcttgcgttggcaatgggcatcgaactgggcgagctccgctttctgagcttccacagggaggtggcgcgccatacgcactaccgacgctttaccctgccgaagaagagtggaggtgaacgccagattagcgctcccatgcctaggctaaagcgggcccagtactgggtgctggacaatatcctggccaaggtgccaactcatgacgccgcccatggctttctgcctggcagaagtattgttggtaacgctctgcctcattgcgcccaggacgtggtcatcaatctcgatgtcaaggatttcttccctagcattggctttggccgcattaagggcgtatttatgcgcctgggatacggcgagccagttgccacagtgttggccctcctctgctcagaaaaccgggctgacgaactgcaggtggacggtgagcggtggttcgtcggaggcacagctgggcagcgtctccttccgcagggagctcctaccagtcccatgctaacgaatctgttgtgtaggagactggaccgtcgactcactggcttggcccaggcattagggttcaactatacccggtatgcagacgatctgagtttttctgccagcggggatgccgcgcaaagagttggctctcttctccggcgtgtccgctggaccctgcgagatgaaggattcgaaccccaccccgataaagagagggtgatgcgcaaaggagcgcgccaggaggtcacagggattgtggtcaacgcccctcagcccggagtttcccgtcagtctcgcagggcccttagagccgcacttcatcgctcccacgccgagggacctgaccaagcacactggcaaggtcagtccgcctcacgggagcgtctgcttgggtacgcccacttcgtgcagggcgtgaatgaagaccaaggccgggcccttgtaatggccgcggaagctctgcccttagcttcccgagccgccgatggagtaggtgcagctgccgatgtcgacgctgttggtgcagatgctgccgcagccgcgactgacgcaaccacaccagccgctgcagtagggggctctagagccttagatgctgcagctgcggcagccggcacaacaatggcgatcgggctctttaaagccggaaaagccgacttcagagctcgggctgctcaaggattggcccccgttagggtggatggcccatggtggcaacctgctccgcctccacagccagtgcggcaacgaaccgacggagagatccgtgaggcaagagcggctagacgacaagccgctgcggaggctagaagagcagcacaacctggtgccgcagcacccgcaaatgccaggcatccaacccaggccggagcaagggcacaagccactgtggatgctgcccgtcaggcgagaagagggggaccaacagctccaggagccgatgaccggacggctgatgcagccaaaccccccaggagcgcgaaaacttattggatgcagctgttcgtggtatggctagctggctcttttaccagaaacggtctggtgaccgtgctggggttgatttacctcctcgggacctattggatgagacatcagcggtggtcccactttgccatcgccatggctgcgattgtcgctctagctactctcatgaggtcgctgtga

SEQ ID NO: 13340 - RNA, 2130 nt, synthetic construct
  source 1..2130: mol_type = other RNA
atgtctgctccgcagccaacaagggccgagttgctggaaaggatccgcgcatccagcaaggacgccgttgtgctggctgaaatgcaacgcctcggtttttggcctcagggcgagggagagcccaggttagctgctgagctgatagagagggaggccgaactgtctcagcagctcaatgccctgaggcaggaagcagcccagtatgccgaccctgagcaggcgcttaggcgcatgcgaagagagaggatggctgctgcacgggcccaaagggaagcgactcggcgacaacgtcacgaggcccgtcatgagcgggcactggcatggcacgcagaaagggatcgtcatatcggctggcttggagagggggttagcgctgccctccaacctgtggcacgcttacccgctgaccctgctccacgcagtgcccaaccaagtgccgaccaggctgacccctctgccaatgccgaacatgctgccgaaccagcaggtcaagcccgcgcagctacagctgatagaggtggggccgctagagcttcaaccccacgcaccgataggttggctcggcacgatctgcctctcctgactgatgcgcctgccttggccgacgcgatgggaatcggtgttcgtgagctccgtttcctggccacacaccgcgaggtgagcaggtccacgcattaccaaagattcaccgtcccgaaaaaaaccgggggcgagcggttgatttccgccccaatgcctcggctcaaacgcgcacagtactgggttctcgataatatccttgctaaggtgccggtccatgccgcggcccatggattcctacccggacacggaatcgtaggaaacgcacgaccccacgctgaccaggatgtcgtcattaacctggacctgcaggacttttttccctcagtgggccttccccgagtgaagggcgtcttccagcacctcgggtacggcgaagctgtggctacagtgctcgcccttctttgcaccgaggccagggccgacactctgaggatcgacggtgagacagtccacattgccggccgagccagggatcgggtgttaccacagggggccccttccagccctcagttgactaacatcctgtgtagacgtctggacagacgcttggcggccttagccgcaaccttgggcttcgcttataccagatatgcggacgacctatcctttagcgcctctggcgaagctgccgacagagtgggcgagttactgcggcgagccaggtggatagtgcgggacgaagggtttaccccccatccgacgaagcaggccgtgatgaggagagggagacagcagaccgtcaccgggctagtggttaacggcgcggctccgtcagtgtctagacggcagagacgccgattacgagccgccttgcatcgcgcccacacacagggtcttgctcaggcgcactggcagcagcagcccgttactcgtgcgcagctcattggctgggctcagtttgtgcaccaagtacagccagcacaggcgggcgccctgctttctcaagctcaggccctactacccgcagcacacgaagcgagcgccgctacagtgaatgccctcgcccaggcagcatcagccagaccagctggtggagggcgcctgagttttcgcgcagctgcagcacaagggcagaccccacccttagcatcggggaggtggtggcagattgcgcctaggcccacaccagtgcgagtgctgaccgatcaggagagacgggaacaaagacaagctagaagagccgctcaagcagccgccgctgaaccagcaactactgccgcaggagtgggccctgctggagctagacctggacagggcggtaggcggttgtccgatcccagaacggaggatgcaggacgggcaggtgtaccagcccccgatggacatgcccctcagagtcgcactcggcggcgacttggcacgtacgtcctccagctgatggcagcatggggcctcggcaacgttgtattccacgatcggctgttcacacaggtcgccctcgtaatgctggttttcctgtatctgatgcgccggcaaagttgggctctttggggggggacaatgctgttggctgcgctggtcgcatggagcctgcggttcctggggtga

SEQ ID NO: 13341 - RNA, 1923 nt, synthetic construct
  source 1..1923: mol_type = other RNA
atgctggcttttagagtgcgactacccgctgggagtcttcccatgtctgctccaccccccacaagtatgacaaggcaagagctgtatgagcggctacggactgccacaagagaggaggttactctgagcgaaatgcagaggctcggattttggcccaaggacgatcccggtgtgactgccgcacaggcgctgattcagcgggaagccgagttgtctagggccctcagagagctgtcttccgaactgcggggtaccgaagaccctgccctcgcactaaaggccatgcgcaaagagcgaatggctaaggcgagagctcggcgagaagagacgaaacagaggagcgcccgggagcggtttgaaagggccagtgcatggcatcatcgccacgccggggagatcctttacctgggggaagaagtttcagccggcctgaatgaggcaaggtccgatggcgacaagttggcacgcgctgccttacccgctctccatgacgctagggaattggcccaggccatgggcctgtcgctgcaagaactgcggttcttagctttcgacaggcgggcctctcgcatctcacactacagacgcttcgccatgccaaagaagactggcggcgagcggattatttctgcccccatgccacgactcaagcgctcccagtattgggttcttgacaacgtgctcgcacgcgctcctgtacatccggctgcccacggttttctcaaaggtaggtccatagtgagcaatgctgctccccacgttgcacaggcagtggtgatcaacgtggatcttaaagacttcttcccttccattgatatgcggcgggtagccggcgttttcggacagctgggctattctaaacaggtggccactacactggcccttctctgcaccgaggcagctaccgaacaagtcagcgtcgacggggagacatttttcgtggcgaggggagcacgagtcctcccacaaggagcgccaacaagccctgcactgaccaatattctctgtcgaagattggatgcccgcctccagggtgccgcagcaaagttagggttctcctatacccgatacgctgacgatctcacctttagcggccctgaggcgacacgcaagttagccgggaaactgctctggcgtgtaaggcagatcgtggcggacgaagggttcactccccacccccacaagcagcatgttatgcgtgcctcccagcgccagtccgttacagggatcgtcgtgaacgagaagcccacgatagagcgcgacaccctaagaagattcagagccactctgtttcaggtggaaaaggatggaccggctgggcggcaatggaacggcaaccctaatgtgctagccgccttggagggctacgcccagttcattaggatggtggacccagcgaaaggagcccctctgctggcaagagtgcgtgcagcgcgagagagatggtcagatgccccagccgccagtcttccaggacctgcaagaagaggaggcgattttcgtgcattatcagcccagggaaaagccccctgggagggcttttggcaagctgctccacctgccccaccggttctggaacagacccaggaacaagtaaccctggctaagaaagaaacaaggcgctgggctagtgtcgctcctgtggtcgagccatctgcggcagccgcagatgtcgcaaccgatgctgtagaggacggacctcaagtgcgggctccgtggagagcattgttatcacagtttttgatcgccctggtcctcgctctgacttaccgcacgccattgccggtcgccggcatactgctgcttagcaggaccagcaggagagacggtcgtcctcactggacgaggttcatctgcgctatggtgctgttggtcgcgcttgcagacgtgctgcacagatgggatctggggctgctttcgtga

SEQ ID NO: 13342 - RNA, 1845 nt, synthetic construct
  source 1..1845: mol_type = other RNA
atgaacgccaagtcaccagcgtcaatgtcccgccaggacctgtacgagaggctccggacctctagtcgcgaggaagtcaccctcgcagaaatgcagcgattgggcttctggcctgccaatgcggcaggtcgtcctgacgtggaagaactcatccgtcgcgaagcggagctgtcttccgccctacgcgaattgggctcagagctgagagctgtcgaagatcctgctgtggcactgagagctatgcgcaaggagcggatggctaaggccaaagcacggagagagacgaggcagaggagagcgagggagcgattcgagcgagcctctgcctggcatcagagacacgccagcgagattttgtatttgggcgagggagtgtctgctggcctaaacgacacacattccgacggggatagattagcccgggccgcgttaccacctcttaacgacgctagggagctggctcaggcaatgggactcactctgcaggagctgcgttttctggcattcgacaggcgggtgtcaaggataagccactatagacggtttgctatgccaaagaagacaggaggcgaacgcattatctctgcacccatgccgcgtctcaagcgaagtcagtactgggtcctcgataatgttctggccagagcaccagtccatcctgcggcacatggtttcctggcaggtcggagtatcgtgtctaatgctgctccccacgctggcagagcagttgtggtgaacgtagatctgaaagactttttcccgagcatcgacatgcgaagggtggccggtgtcttcgggcaacttggctattccaagcaagttgccaccactctggctctattatgcactgagtcggccaccgaggaggtcagtgtggatggggaaacgtttcacgtagcttacggaccgagagttttgccccagggagcacctacaagccctgctcttaccaatattctgtgtcggaggttagacgccaggctgcaaggcgccgctgccaaactgggattcgcgtacacaaggtatgcggatgatttgacatttagcgggactggggagtcaaggaaactggccggaaagctgctgtggagagtgcggcagatcgtgatcgacgagggctttaccccccaccccgacaaacagcacgtgatgcgcgactcccagaggcagtccgtcactggcatagtggtaaacgaaaagccgaccattgaccggcctactctgcgcagatttcgggccaccttgtttcaggtggagaaagacggccccgatgggaaggcctggaacggaaacacgaatgtgcttgccgcattagaagggtacgcccagttcgtacgaatggtggatcccgccaaaggtggcccacttctccagcgcgtcagggcagcaagagagcgttggagcactcctgctgggaccccagccgcaacacatagtacaggggactttcgggcccttagcgcgcagggtaaagctccctggcctggattctggcaagctggaccagctcccgccccagttgtcgagaaaacccaagtgcaggtcacactggccaaaaaggctgtccagcaagaacaaaaggaacgcgttgccgccctggcagatgcacaacccgatacgatgctggaagccccaccacaggcactgttgccctggagggctctactcccccagttcgttacagcctttctgttggccctcacttaccgaacccctctgccactcgctgggatgcttctcctggcccggaagtcccgtcgagatggtcggcttggctggggacgcttccttggcgtgatggttgccgtagtggtgctgcacgggctcctcagacgctggaattga

SEQ ID NO: 13343 - RNA, 1839 nt, synthetic construct
  source 1..1839: mol_type = other RNA
atgtctgataacactcccgcgcccatgacacgagctgcactgtacgctagactcagaacgcagagcagagaggaagttacactggctgaaatgcagcgtctcgggttctggcctgaaaacgatccgggaaaagccgtggcagagcagctgatccagcgtgaatcggagctggttcgggccttgcgcgagttgggctccgacctaagggtcgctgaggatcctgccttagccctgaaggccatgcataaggagagaaaagcaaaggctcgggcgcgccgagaagagacacgagagaggcgagcacgcgagcggtttgaaagggccaacgcatggcatcaacgcagggccggggaaattttgtacttgggacagggcgttagcgctggcctaggtgaggccaggtcagatgccgacaagcttgcccgagcagcactcccggccatgcacgatgcgaaggacctggcacaagccatggggctgtctctcccagaattgcggttcttggcttttgacaggcgcgtgtcgcgtatctctcattacagaaggttcgccgtgccaaaaaaaactggcggggagcgaataatctctgccccaatgccgagactgaagagggggcagtattgggtgcttgacaatctgttagcaagggcggccgttcatcccgctgcccatggattcagagctggaagaagcatagtcacaaacgctggtcctcacgtaggccgggcggtagtgatcaatgtggacctcaaagatttttttccctccattggcatgcagcgggtggccggtgtcttccgtcagttgggatattcaaaacagattgctaccatccttgcactgctgtgcactgaaagcgcaactgagcaggtgtcaattgacggagagacattccacgtcgcacacgggcccagagtcttgcctcagggtgctcccacttctcccgccctaaccaacatactgtgccgccgcctggacgcaaggttagagggagccgctgctaagctggggttcgcctacacaaggtatgccgacgacctgacattcagtggtggggaggaaacccggcgactagccggaaagctcctctggcgtgtgaggcaaatcgtggctgacgagggctttaccccacatcccgacaagcagcacgtgatgagggatagccaacggcaaggcgtcaccggcatcgtggttaatgagaagcctgctgtggaccgcactaccctgcggaggttcagagccacgctgtttcaggtcgaacgggatggccctgctgggaaggcgtggaacggcaatgccaatgtgctggctgctctggagggctacgcacagttcattaggatggtggatccagcaaagggcaccccactcttagctcgtgttcgggcggcgagagaacgctggagcgataccggatcacctgctgtgaccgtggccaaagccattagtgctgggaacttccgcgcccttagtgcccaagggaaggctccttggccaggattttggcaagctggcatggcgccagcccctgtactcgaaaaaacacaggaacaggtcgtagcaatgaaaaaggaggcacggcagcttgcacgatcccacgcagcgactagtcccacacccggtggcaaagcccgcaatgcacggtccctttggcacgccctcctcctgcagattctgatcgcctgttttttagccatcgcttttcggtccccatggccgatcattgccatgcttgctctgttctacctttccagaagagatcgcagcgcctattggaccagatttataggtattcagacgctggccgtcgcaggaatgctggccctcatgaaacactga

SEQ ID NO: 13344 - RNA, 1872 nt, synthetic construct
  source 1..1872: mol_type = other RNA
atgagtgactacccaactagtacgcgcgaggccttgtacgccagaattagggccagctccaggacggaggtcactctggaggaaatgaagcggctgggcttctggccagaagatgacaccagcctcgctgaggctgagcaactcattaaacgggaagccgaattgcagcaggcgttgtctgccctgggccgagaactgcgggaggttgaggatcccgccctcgctctcaaacggatgcgaaaagagcggatggccagggccaaggcgaagagagaagaaacacgacagagacgggctagagaaaggcacgaacgcgcgttagcatggcatgcaaggcgggccaaggagttgctgtacctgggggccggagtatctgcggggctgaacgaagcccgttccgatgcggatagactcgcccggcttagcctgccctcaatgcacgacgcacaggatctcgctaatgccatgggccttagcctggaggagctgaggttcctcgcatttgaaaggcgcgtgtcaaggattagccactatcggcgctttgcaatgcctaagaaagccggtggtgtgcgaatcatctccgcgcccatgcctaggctcaaaagggcccagtattgggtgcttgataatgtgcttgctagagctccggtccatccagccgctcacggctttctggctggtcggtcgattgtaagcaacgcagccccccatgtgggacaggctgtcgtcatcaatgtcgacctaaaagacttctttccttccatcgccctgccgagggttagaggcgtctttcgccagctcggctacggaaagcaggtggccacaactctggctctactatgcaccgagtcagcaaccgaaacggtgcaagttgacggagagacattccacgtagcccacggaccacgtgtgctccctcaaggggcaccgacatctcccgcattgacaaacatcctctgtcgccgccttgatgcaagattacagggcgctgcggctcggctagggtttcgttacaccaggtacgccgatgatttgacattcagtggcgacgagagtgtgcgtaagctggcagcaaaattgctgtggcgcgtgcggcagatagttatcgacgagggttttactccccatccagacaagcaacacgtaatgcgttctcacgcaaggcagtccgttaccggcattgtcgtgaacgagaagccggcagtagatcgagacacccttcgcagattcagagcggtcctgttccaggtcgagaaagacggacccgccgggaaacagtggaatgggaacgacaacgttctggccgccctggagggctatgcgcattttatacgcatggtggatgtggaaaagggggccccccttttggccagagtgagagccgctcgggctcgatggaatggtgatgctgctgctcccgatgccgtagctcgacgggctggtggacagttcagaatgttagccgctcaagggaaagcaccctggcctggcttctggcaagctgggactccacctgcccctgtgcttgagaagactcaggaacaggtgaagaccgaacgcacattagctagagaggaggcccgaccacgcaaggcagctgcatcaccagtgcctgcagacgacgcaattgcccggagggcagaaagaaccgctaggcgcaatccactcttaatcggaggcggccgaatgacctggtatgccgttgccctccagggagttgtcgcactgttgctgtccaggaagcttgactctaacactcccattctggccatgctggctctgtactggctaagcgtcagatataggcgtatgctgtgggtgcctttcatcgtggtgatgctgctgatatgggcggtgctggcccctcgctga

SEQ ID NO: 13345 - RNA, 1812 nt, synthetic construct
  source 1..1812: mol_type = other RNA
atgtatgagcgggtacgtgcaagcagccgggaggaagtgacactcgccgagatgcagcgccttgggttctggcccgctaacgatcctgggcttgctgcggccgaagaactgattcgcagggaagctgagctctctcaggccctgcgggccttaggcacagatgtgaggatagccgaagacccagtgctggcattgaaggccatgagaaaagagcggatggccaaggcacgcgcgagaagagaggaaacccgccagcgaagagcacgagaacggttcgaacgcgcatccgcctggcaccgaagacaggcttgcgagattctgtacttgggggaaggtgtcagtgctggcctaaatgaatcaagatccaatgttgacaagttagcccgtgccgccttaccagccctcgacgatgcccaagacctggccagagcaatggggctgacacttcaagagctacgctttttggcattcgaccgtcgggtgtcacgtataacccactataggcggttcgccctgccaaaaaaaaccggaggcgagagaatcatttccgcaccaatgccccgtcttaagcgggcccagtactgggtactggataagctgttagcgcatgcccccgtgcatcctgcggctcatggcttcctgaggggacgatccatagtgtccaatgccgctccacacgtaggccaggccgtcgttatcaacctcgatttgaaggacttttttccgagtatcggcatgcccaggatcaggggtgtgtttactcagctcggttatagtaagcaggtggctacaacgctggcactcctctgtaccgaggctgccactgaggaggtgagcgtagatggggaaactttccacgtcgcacatggaccgcgggttctgccccaaggagctccatcttcacctgctctgactaacctgctgtgcaggaggctcgacgctagacttcagggagctgcggcgaaactgggattcgcctatactcggtacgccgacgacctcactttctcgggtggcgaggcaacgaggaagcttgccgggaaactcctgtggagagttaagcaaattgtgatcgatgagggatttaccccacaccccgacaaacagcatgtcatgcgggattcccagcgccaaagcgtgaccggactggtggtgaatgcgaagcctagcttggagcgcgataccctgaggcgctttagggccacactctttcaggtcgagaaagacggccctgatgggaaggcatggaacgggaacacaaacgtgttggcagctctggagggctacgccaattttgtgcgcatggtcgaccccgcaaaaggcactccgctattagcacgggtcagggccgccagagagagatggacaggtgtgccacaggcccacagagctccgtctctgagtaaaaggagctctgactttcgggctctttctgctcagggcaaggcgccctgggaaggtttctggcaagcagctgctcccccacccccagaactggagcgtaccgcagagcagctggcccaggataagaaagcagcgcgaagacaacgccccgcctcaccagctgctgaaccttctggcgacctgggggtggttgatgttcctgccacccctgggttgcctcccgttccttggtcggctatcggcgtccagttgggactggccctagcctacggcattgatcagggaaagctcctgcccctcgcattcacggtcggattggcttttatggcctggcgagacagggaccctcactggcttcgcttcgggggtgtaatcgtgctgatggtccttctcagcgtgctacgatga

SEQ ID NO: 13346 - RNA, 1929 nt, synthetic construct
  source 1..1929: mol_type = other RNA
atgacctcacctaccccctcgccctccgaactaacacgggctcaactgtatgagcggatcagagcctccagcaaagaggaggtggtgcttactgagatgcagagacttggcttctggccagccgatagcggtaagccctcagtggaatccgcactgattaggagagaagctgaactgactcaggcgctgcagaggctcgggtctgagctccatcacctgcagaacccggaagctgccctgcgtatgctccgcaaagaacgtatggccaaggccaaggctcgcagagaggagacacgccagaagagagctctggttcgattcgagaaggctcaagcttggcgacagagacgggagcacgaggtgttgtaccttggcgccggtgtttctggaggtctgagtagggccgactcagatgctggcaaacttgcaggcttggccatgccagtcctccacaaagcagacgacctggctcaggccatgggaataaccctctccgaactgcggttccttgcatttgaacgcagagtgagccgcatctcacactacagacggtttgccatgccaaagaaaacaggcggggaacgtatcattagcgctcccatgcctaggcttaaacgcgcccagtattgggtcctcgacaatgtccttgctagggcaccgctacaccaggccgcacatgggtttgtgcctggccgttctattgtcagtaacgctgccccccacgttggccaagcggtagtgatcaacctggacttgaaggacttcttcccctccattggaatgccacgcattaagggcgtcttcgcccaattgggatactccgagcagctggccaccgtcttggccctactctgcaccgaagcccccacggataaagtgcggatagatggggagagatttttcgtcgcacacggatctagggctttaccccaaggagccccttcctcgcccgccttaactaacatactctgtcgtagactggacgcaagactccaggcctgtgcggccaagctcggcttcaagtatactcggtatgcagatgatctgactttctctggcgatgccgacgcgcggaagttagccggtaagctgctctggagggcgaagcagatcgtcattgacgaggggttcacgccccatccagataagcaacatgtgatgagggatgcccaacggcagatggtcaccggaatcgtggtgaaccagaaaccttccttggagcgcgagacactgaggcgctttagggctacattgtttcagctggagaaagatggtcctgagggcaaacaatggaatggtaatacgaatgtgatcgatgccctggaaggatacgcgcagtttatccgaatggtggacccagtcaaaggcctgccccttctggttcgagtacgcgccgctcgagcaagatggggagctgcaggaattgacatgaagctgatgcagagcaagcggtctagcgcttttcgagccctgtcagcacagggcaaagctccttgggatgggtggtggcaggctactctggccagtgcacctgttctggagaagaccgcggctcagctggccgtggaaaagaaggaacggaaggccgctgaggcaccaactgtacctcccgcaccagtgaatatgaaaaaaccggcagctgcacagacccccgttgccacacctgccgcagctgttcatgcacctccggccagtgacgccaccgcaaacccagcaccaggggctaaaccagacggggacaataacttccaggtagcgattgcggtacaggtggctctcatatgcgcattcgccttggccacccagagggttttaccgagtgcgtgcatggccgtgatcgtgttacaaagcgccatgctaaggaaacctcggtgggggtggtttctctttatcattcttatctggagcgctgtgacactgaagtggtga

SEQ ID NO: 13347 - RNA, 1896 nt, synthetic construct
  source 1..1896: mol_type = other RNA
atgtcagccaccgaatcgaagcccatcacgacccgcgccgaactgatggagcgtctgaggtcgtcttcccgacaggaggtcgttttgggcgagatgcagagacttggtttttggcccgccaacaaaggggagcccactgagctcgaggaagttgtacgccgggaagcagagctgagttccaccctgaaccgtctttctcaagagctccggacaatccaggaccccgaagccgctctgaaagctatgaggaaggagaggctggcaaaagcaaggcagaggcgggaagagacacgactgcgcagggcacaggagagattcgatagggccactgcttggcaccgcaggcgatccaccgagctgctgtacctgggcgagggtgtgtcagcaggcctgaatcaggccgaaagtgatgccggaaagctcgctcgatggtctttaccagtgatgaacaacgcctcagaattagcagcggccatgggcgtgacactgcctgagcttcggttcttaagctttgaaaggcgagtgagcagaatctcccattaccgcagatttgcgatgcccaagaaaactggcggtgagaggataattagcgccccaatgccgcgggtaaaacggctccaatactgggtgcttgataacatcctcgctaaagtccctctgcacagcgccgcacatggcttcgttcctggtagatccatagtatcaaatgcgcagccacatgtggggaaagctgtggtgatcaacctcgacctgaagaattttttcccttcaattgccctgcctcggattaagggggtcttccgggaactgggatacagtgatcagttggctaccacactggggttgatttgtaccgagacgccaacagaggaggtatctgtggacggggaaaagttctttgtggctaccggagaacgcgctttgccccagggtgctccaagcagtcctgccctcacaaatatcctgtgccgccggttagacgcccgtgttcagtcctgcgccgccaagctcgggtttatatatacacgttacgccgacgacctaacattctctggcgatgcagcagcgagaaagctggccggaaagctgctctggcgagttaagcaaattatcgccgacgagggattcacgccccacccagaaaagcagcacgtcatgtcactttctcagtgccagagtgttactgggatcgttgtgaataaaaagctcagcctggatagggatactcttcggcgcttccgggccaccctctttcaagttgaaaaggatggccccgccgggaaacagtggaatgggaacgagaatgtgattgacgccctcgtgggatatgcccagttcataaaaatggtggatgcagagcgcggagctccattgcttcagaaggcccgcatggtcagacagaaatggaacactgaggctccggtggtgagcgaagctgcggcaagagccagttccgggtttaggaagctatccgcacaaggcaaagagccttgggccgggttttggcaagctgccggaagcccagctccggtcttggagaaaacccagcaacagctgaaggaagagaagctcgctaaaagagaaaagcctgcggaaaagcccaaagcagctgctcacgccgacggacaggcagctagacagcagggcgtgactgcatctcctggaacccaagcacctgcacaaggcggccgcggtatgttcgcaggacgaccatgggtgtccattatcattcaggtgtatttcgcctttaccctgtgtctgaatttccgtactccgttgccccttgtcgtcgccatcgtactgggctatcaggcgtggagagactacagcggtcattggctacggtattttggcgcgatggccgtcgctgtggtcttaggcttgtggctaagatga

SEQ ID NO: 13348 - RNA, 1878 nt, synthetic construct
  source 1..1878: mol_type = other RNA
atgtccgccaccgagagcaagcccattactacgcgggccgagctgatggaacgcctgagaaatagcagcaggcaggaggtggtgctgggcgagatgcaacggctcggattttggcccgctaacactggccaaccgacagaattggaagaggtcgtgaagcgcgaggctgagctaagtggcgccttacagcggctggggcaggaactgagaactatccaggatcccgaacaggctctgaaggcaatgcgtaaggagcgactgtctaaggccaggcagcgtcgggaggaaacacgtctcaaacgggcccgggagagattcgaacgggcaacggcctggcataggcgacagtccactgagctcctttacctgggagagggtgtaagcgccggacttaaccacgcagagagcaatgcggaaaaattggccaggtggtctttgcctgccatgaataatgccagcgagctcgcaaccgctatgggaattacattgcctgagctcaggtttctgtcattcgagagacgcgtttcccggatctcccactacagacgcttcgcaatgcccaaaaagaccggcggcgaacgaataatctctgccccaatgccccgcgtaaagaggctgcagtactgggtgctagacaatatccttgctaaggtgccacttcatcctgcggctcatgggttcatcccagggcgcagtatagtctcaaacgctcagccacacgtcggaaaagctgtggtgattaacctggacctaaaaaacttctttccctccgttaacctgcctcggatcaaaggcgtattccgcgaactgggttattcagagcagctggcaagcacacttggcctgatttgtaccgaaacacccgtggaggaggtttcggttgatggcgaaaagttctttgtggccaccggagagcgcgcattgcctcaaggggctccctcctcacctgccctgactaatatcttatgccgcagattagacgcccgcgcgcagtcgtgtgccgctaaactgggttttacatacaccaggtacgcagacgatctgacattctccggcgatgccgctgctcgaaaactcgcgggcaaactcctgtggagggtgaagcaaatcattgcagacgagggctttaccccccaccccgagaaacagcacgtgatgtctgatgcgcattgccagagcgttactggaatcgtggtaaataagaagctcagtctcgatagaggtaccctccgtaggtttagggccactctttttcaggtggagaaggacggtcccgccggaaagcagtggaacgggaacgacaacgtcattgacgcgctggaagggtatgcccaattcattaaaatggtcgatgcggacaagggggcacctttgttacagcaagtgcgggccgcaagagccaagtggattagtccggctcctgcggcttcagtaaccgccgtgaggcgttcctctggcttccgagcgctgagtgcgcaggggaaggaaccgtgggctggattttggcaagctgctgccgctccagcccccatgttagaaaagacgcagcagcagctggcactcgaaaaagccggagctggccgaaaagcagctgccccagcctctgccccatcaagaccagcagctagagcagccgcagaagctccagctagcgcaccggtccaaggtggtagggggaccttcactgggcggccttgggttgctgtgataatacaggtctatttcgccatcacattgtgcctaaatttccggacccctctgccttttgtggtggccgtcgtccttgccgtgttggcatggcgcaactactctgccaaatggccaagatatttcggagccatgtttgcagcagttctcgccggcgtccttctgagatga

SEQ ID NO: 13349 - RNA, 1914 nt, synthetic construct
  source 1..1914: mol_type = other RNA
atgtctgccacagagtcaaagccaatcaccacaagagcagagctgatggagcgcctcagaacatccagcagacaggaagttgtgctcgaagagatgcagcgactgggattctggcctagcggtaccggacagccctccgaactcgagcagctcgtgcaacgggaggcagagctctcctcagcgttgttaaagctcgggcaggaactgaggaccgttcaggatccagaagctgctctgaaagctatgcgcaaagagcgcttgacgaaggccagggcgagacgagaggaaacgcgccaaaggagggcccgggaaaggtttgagagagccactgcttggcaccagcgaaggagtactgagctgctgtacctgggagagggggtgtcagccggactgaatcaggcggaaggagatgcagagaaactggctcggtggtcccttcccgctctgcacaacgcccaggagttggcctctgctatgggtgtcaccctccccgaacttaggttcctatcctttgagaggagagtaagccggatttcacattatagacgttttgccatgcccaagaagagtgggggagaacgcatcatctcagcccccatgcctcgggtgaaacggctgcagtactgggtgcttgataatatcctggccaaggtgccacttcacccagccgcccatggctttgtacctggccggtccatcgtctctaacgcccagcctcatgtcgggaaagccgtggtggtcaatcttgacctgaagaacttcttcccgagcattggtctacctcgcataaaagggatattccgtgagctggggtatagcgagcaactggctactaccctaggcctgctgtgcactgaaaccccctctgaagaggtgagtgtggatggggagaagttcttcgttgccacaggcgagagggctttgccacaaggcgcaccctcttcgcctgctctcacaaacatcctgtgccggagattagacgcccgagtgcagagttgcgcggcgaagctgggcttcacatataccaggtacgccgacgaccttacctttagtggcgatgcggcagctcgtaaacttgcgggcaagttactatggcgggttaaacagattatcgccgatgagggctttacgccgcatcccgaaaagcagcacgttatgggtgccggccattgtcagtcggtgactggcatcgtggtcaatcaaaagctgtcccttgagcgggaaaccttgcgccgcttccgagcaaccctgtttcaggtagagaaggacggaccggccggtaagcagtggaacgggaatgccaatgtgattgatgctctggaaggctacgcccagttcattcgaatggtcgacgcagaaaaaggtgcacccttgctccaaagagtcagggcagcacgtgcaagatggattgcccaggcacaggacggaggcgaacaagccgcacggcgaagctccggatttcgcgctctcagcgcccaggggaaagagccttgggcaggtttttggcaagcccaagctcccgcagcccctgagttggaaaagactcagcagcaggtaaagcaggagaaattagaacaccgccaggcccagaaggctaaacccgcttcaggaaggccagctgttgcagcgggggctggaccttctgcaagagcgacaagacggcaagctcctgaggctccaccagccgaacaagaagagccctacaaatttagcgacagaccgtggttagggattctgatacagctgtatctggccttcagcctctgtcgtttgtaccacactccacttcctctcgtgttcgctgtgatgctggctataccagcctggcggaactatagggcatattggctgcgctacttttcttacatgtgtctggccgtcttactcggcatcgtcctcaggaagctattgtga

SEQ ID NO: 13350 - RNA, 1668 nt, synthetic construct
  source 1..1668: mol_type = other RNA
atgagaaggcagcgcctccaagctgcccggcaacgaagggaggcaacacgccaagccagagcacaggcccggtacgaacgtgcacgatcctggcatgagcgcagacagcactcagtgctctatttaggtcagggcgtcagcggcgggcttcagcattctgataatcagccagagaggctggcacggtggcaactgcctcagccagccaacccacagcagctggcccagctgatgggcgtgtctgtcgccgagctacgctttctcgcctatgaccgggcagttgctcgggtgtcgcactacagatcctttgacctgcccaaaaagtctggggggttaaggcgcatctccgctcccatgccgagactcaaaaggctgcagtattggcttctggataatatccttagcaaggtgcctgtgcacgacgccgcacatggattcaggcccggtagatcgatctgcagtaatgcccagcctcacgtaggtaaggccgtggtcatcaatctcgatctgcaggacttcttcccctcaatagcttacccacgcatcaagggggtctttagggccctcggctactctgagcagctggccagtatcatgggactcctatgtacccagcggccaacgcaagcggtccaactcgatggccagacataccacattgcgactggcgctagacacctcccccagggagctccaagctcaccagctttaacaaacatcttatgccgtcgattggacaggcgcttgcatggcatggcagccaagctggggttcgcatataccagatacgccgatgatctgtctttctctgcggacgccccagcccagcacttagttggcaaactgctgtggcgagctcgtcagattattgccgatgagggctttacccttcaccctgataagttgcatgtgatgcgtagcgctcggagacagcaggtcaccgggttggtcgtaaatgccaagccttccattgaccggagcacttttaagagattccgggctaccgtgttccaggtggaaaaagacggcccccagggaaagagctggaacgggaacgacaacgtgctggacgccctgctgggatatgctcacttcctgcatatggtagatcctcaacgcggacagccctggctgcagagggttcaagccctcagggttgcggctcaggcacctgcacagagccagccaagtcccgaaccgcagcagatattggaactggaatccgccgcaaaagccagccaagccgggagaggtcgatccgcttttaggagggcatcagcccaaggacaggcaccgtgggcccattggtggcaacctgcccaaccacccgcacctgtgctggaacccacggaagcgcagcgacaggctcagaggcaagcgcagagacgacagcaagcccaggctgcgttacctactgctgcacagccacaacgccagggtgcgctagagcctcaacagcccccagaggaggcccagcacgctagtcagcgtaacccccgcatgcttctcgagcagacactcgctctgctcgttttgctttttatgcttcggaaaccgtccctgctgctactgggactgctgattcacctcgcataccatttgttgcaccggtcaagttggtggctttttctgcccctattgctggcttcccttctggtgcctttctga

SEQ ID NO: 13351 - RNA, 1884 nt, synthetic construct
  source 1..1884: mol_type = other RNA
atgagccagcccagccagagcaacccaaatcagagcaactctgcccagccccccaattcaagggaggcgattctccaaaggatgaggaactctagtaaagatgaggtcatattagaagagatgcgccgacagggattctggccgaaggacgaacccagtccagaacaagccgctgcactcgcgctcatcgagcgcgaaggggagttggtacgtgccctgcatgacctttcgcagcagttacatcaggtggaggagccccaggctgcgttaaaggcaatgagaaaagagaggatgcgtctcgcacgggagaagcgggaggtaaccagaagacagcaggcccagcgccggtatgacagagctctggcctggcacactcagcagcaaaacgatataacatacctgggggaggatgtgagccagggtctggccgatcctcgctccgatgaggcgagactggctagcaagggactaccacatttctcctccgtggctgctctggctcaagccatgggagtaaccgttgccgaactccggttccttagtttcagccggaacgtcacaagaatctcccactacagacgctttacggtgcctaagaagactggcggtgttagactaatttccgcaccaatgccacgactgaagaggcttcagtactggatcctggagcagatactgttaaagctgccggtgcatgctgcagcacagggcttcgtggccggaaggtctatagtgtcaaatgctaccccccacacaggacaagctgtggtggtgaacttcgacctgcaagacttttttccctccatccactggcaacgggtttccgggttgtttcagtctatggggtacagtaaacagctcgctaccatcctcgccctgatttgtagcgaaacaccatgcgatgaagttgctgtcgacggcgcacactatttcgttcaaaccggtgtgaggaggctccctcagggagctccctcgagtcctgcgctcactaatctgctatgccgacgcctggacacacggttgagcgcgttagctcaacgactgggctttaggtataccaggtatgctgacgacatgaccttttccgccgctgatgactcacagcttcctcgtttgctctggcaggcgaagagagtgattcgggaagaaggcttcacgttgcatccagataagcagaaagtgatgcgccgccacgcccgtcaagaggttactggcattgtcgtcaaccagaggcccgccgtttgtcgagagacgctgcgacggttcagagccgtgttgttccaggtcgagcaaactggcccgactggcaagcattggaacgggaatgaaaacgtgctggcagccctggcaggctacgcacagttcattgtgatggtcgacgccgaaaaaggaagacctcttctcgccagagtccacgcagcacagctgaaatggtccgctccggaagctgccaggtcttcatattatcgggactttcggaccgcctcatcaaaaggtatcgcccctaagggtatcacccagatggcacaacgtgcgatcccaatcatcgagctaacacaggagcagcaccaacaagccaagcagagtgctcagcagcccaattctcagcgggccgtcattcctgccgatcccgatgtcgttctgttggaacagcagcaagcaccacctctcgccgcacacgcaaatacacctgtatctatttaccttcagattgccgccgcctttctggccctgatgctgattgggctgctgagctcaaattaccttcttagtgccgggtccatcgtgtgggtgtggtactgcatgcagaaacgcaaattttcttggtggggctttgtgctcgtgttgatcgtatgtcgctggctgtggcagcagatcgagtga

SEQ ID NO: 13352 - RNA, 1917 nt, synthetic construct
  source 1..1917: mol_type = other RNA
atgagcaatgctacccagacctcacgcgaggctgtgttggcccggatacaggcttcttcaaaggacagtgtcatcctggaggagatgcaacggttgggcttctggcctgctgggtctgggactccagaccagcaacgagcaaccgaactgatctcgcaggaacaggccttgctctccgagctgagagaactaaaccaaaaactttctatagccaaggacccagtcgctgcactgaaggctctcaacaagcagcgcatggccgaggccaaagctagaagggagcagactcgcctggcagcagcccaaaggcgctatgaaaaggcggccgcatggcacgctcgaagagctctggacattgggtacctgggtgaaggtgtctcccagtccttgagcgatgctcgaactgatccacatcgtctcgccgctagggagttgcccgtgctcgactcacccaaggtgcttgctgacgccatgggcatcaccgtggaggaactgaggttccttacgtttcaccggtccgtgtctcggatctcgcactaccggagatttggtatccctaagaagaccggaggactgagaatgatctccgctccgatgcccagactgaaaagggcccaatactgggtgcttgacagggtgctcgcaaaactgcctgttcacgatgcagcgcacggtttcgtgcctggcaggagcatcgttagtaacgcaactcctcacgcaggccaggccgtggtcgtgaatttcgatctcaaagatttctttccatccatctcctatcagagggtacggggcctgttccaaacattcgggtactctaggcagctggcaactttgtttgccatgatctgcacagagctgccgactgacgaagtgtctattgacggccttcatttccacgtccagaacggcgagcgtcatttacctcaaggggccccctgcagccccaccattaccaatctgctgtgtcgaagattagatacgagattagctggactggccaaaaggctgggattcatatacaccaggtatgcagacgatatgacattcagcgccgatgccgcgagtgccgggaacttaccccgtctcctatggcaggtgaagcgcatcattgccgaggaggggttcacacttcatcccgacaaacaacgaataatgagaaactccgcgcgccaggaggtaacgggagtcgttgtaaaccaccatcccacagtctgtagagagactttaagacggtttcgtgccacactgtaccaggttgaaaaggacggcccccaaggaaaagcctggaacggaaacggcgacgtcttgaatgccctggctggatacgcacgctttgtgaagatggtggatcctgccaagggcggaccactttgcgctaaggtagctgctgttcaggccaagtggggggataatgcctcacagccacggggccagtattatcgcctctttcgcgaagcaagcgtggccggtaaagccctcccgagccatcaatggcaggctaagcggcagcctgcacctaccctcgagaaaaccgccacgcaactccagcaggagaaacaggcaactcgccaggctgagtctgatcaggctgccgcagttgcggcagaaaccattgccagcgcggcggcactaccaacaacacacacccagagtggggaactgattgaacggaatgctgtgagcgcggatgccattcccccaaacgttcatgaagacgtcccagcatcagtttacctacagctggctatgcagttcgtgttgatgctggtgtcaggacttttgacaggcaatgtgctcatggccatggccagtgtcggttggatgtggtttggctttaaaaggagacgggccaattggtggctgtggctgggggtatattttgcgtgtcgactgctatggcgtctcactacagcctga

SEQ ID NO: 13353 - RNA, 1875 nt, synthetic construct
  source 1..1875: mol_type = other RNA
atgtccgatgctgcccaaacaagccgagaggccgtcattgcacggatcagaaacagttccaaggacgctgtggttctggaagagatgcgcaggcttggtttttggcctcaggggcaagccagtcccggtgaaggagaggttgccgccctcatcgaacaggaagccgccctcatccaggagctccagcagatcaaccgtaatctggcgagagtgagggacccgcaagcagccctcctggagatgaaaaaggagagaatggcggcggcaaaaaggcgacgcgaagaaactcgccagcggcacgcacagttacgctatcaacgggccactgcctggcacgcaaggatgcagcaggacattgtataccttggcgccggagtgagcgctggactcgatgacgcacggcacgacaccgctaggctagcctccaagcaactacccctccttgacggccctcaagctttggcagccgccatgggcgtacctcttgccgagcttcgtttcctggcctatcaccgatctgtgagccgcatcagccattaccgcagattcgggattgcgaaaaagaccggaggagtgcggctcatatcggcccccatgccacgcttaaagagagcccagtattgggtgttggacaggatcctcgcaagactccccttgcacgaggcagcccatgggtttgtccctgggagaagcattgtggggaacgctctgcctcatgtgggacgtgctgtcgtccttaacctggacttgcagaatttttttcccagtattgcataccccagagttaggggtctgttccagtcattcggctattcacgccagatggccaccctgctggccctgatatgtactgaaacccccagcgaggaagtggagctggacggaaataggtatcatgtgcagaccggtgaacgttgtctgccccaaggcgccccatctagtcccgcaatcacgaatctgctctgcaggcggttggataaacggctcacagcaacagcagccaagctagggttctcctacacccgctacgccgatgatatgaccttctctgccgatgccccacaggcagatgggctggctaggttgctgtggcgggtgaagagaatcattgctgatgaggggttcaccttgcaccccgataaacagaggatcatgagggctgcctctcgtcaggaggtgactggcgttgtggtgaaccggcagccggctatttgccgggatacattaagaagatttcgggccacaatgtttcaggtggaaaaggatgggccacttggcaaacagtggaacggaaattcgaacgtaatcgcagcactggagggatacgcccgctttattgctatggtagacccagccaaaggcgagccactgtgccagagagcggctctactccgagcgaagtggggttcagtcctcccagcgcctgcctctactggctatagaagggctttcagagctgcttccgctgaagggaggcagacccccggacgaatctggctgcctgctgagaggccggttccacagctggagcagacggaccaacagcagcgcgagcaacgagccgcagctcgagaagcagcccagccttccccagtccctcagacgacagcgtcacgggctaatgctactccgcccgcggcacaacctcaaggcgctaatcctgcagcaataggctgggtgcagcagtactatggtctgctagccgtcggccagtttatggcccttttggctatcggcgttcttggccgcttctggctcctgccactgtgtgggttagtcttgatgctgtacgccctgcggacacggcacattagcggctggcacttcgcgctggctttagtggtcggtatactgtttgacggagttctgcattga

SEQ ID NO: 13354 - RNA, 1908 nt, synthetic construct
  source 1..1908: mol_type = other RNA
atgtcgtaccaggagactcccgagctgcaggccttaagggagcgtatacgcgcaagtaccaaagacgccgtcgtactggaggaaatgcgacgcctgggttactggcctaaagatgaggctatcccagactcaagagatgccgcatccgagattgggcaaatcatccaacgcgaaggcgagcttgtgggggaactgcacaagatggcacaggatctacacagactgtccgatccgcagcaggccctgcaggagatgcgcaagcaacgtatggccgccgcgagagctaaacgcgaggagactcggaggcggcatgccgaagaacgccaccaaagagctgccgcctggcacgctcaacgacagaagagtattgcctggctcggtgaagaagtcagcacaggattggccgatgttaggacagacgcggctcggcttcacgcaaaatcactgcctgttatcgagagtataggggagttagcccgcttaatgggcgtaccactggccgagttaagatttttggggtatcagagatcagtatctcgcattaaccactaccacaggtttggaattgccaaaaagacagggggcgtgcgagtgatctctgcccctatgcccaggatgaagcgagcccagtattgggtgctggataagctcctggtgtcccagcccgtgtccgctagtgcgcatggtttcgtgcctggcaaatccatagttgacaatgcccgggtgcatgccggacatgacgtcgttattaatttcgacctgaaggacttcttcccaagcatccattaccccagggtgaaaggcctgttttcctctttcggctattcagatagcgttgctacactactggccctgctgtgcaccgaggcacctacagaaaccgtcgagatggatgggcagcgctaccatgtccagaccggtcctagatgtcttccccagggggcacccacctctcctgcaattaccaaccttctgtgtcgtaagctcgatagacggctcgaggggagcgccaaaaaactcggcttcagctataccaggtatgctgatgatatgaccttcagcgcacccgcagaggccaggtccaaactcggacagatgctctggtgcgccaagcaaatcattgctgacgaggggttcattttgcatcccgacaaacagcgggtaatgcacgcaggtagacgccaggaggtgacaggactcgtcgttaatgaacggccggcggtcccgagggaaacattgcgtcggtttagggcgactctctttcaggtggaaaaggacggcccagagggcaaatcatggaacggaaatggaaatgtgatcgcagcacttgacggctatgcgaggtttatctacatggtggatgccgacaagggagccccgttgctggctagaatcgcccagctgaaggaaagatggtctggagcacccgtccgaaaggcacccggcttgctgtcaggacctgcatttcggcgagcagcaggtgaagggaaggctcctcgggagaactggtggactcccgctgaacaagcggccccagtcgttgagaagactgaccaacagagggctgaagaccgagcagcggccaaagccgcaatccggttgcagaaggctgaagcccaggccactgctgctccagcatccagcgaacaagcggaaacggctccaccacctgctagcctcgctccagaggaggccgctaaagctagagcccttagtgccagcgactctattcagatcctcatccagtcgattgtgatggtgctagctggtctggtgacgcacaactacctggtacttctaggcgccgtggtttggttctttctgtctatgagtaagcgtaagcggtacaactggcttatatgggccgtggtgtatatagcttgccgcatcctgggcggcgtccactga

SEQ ID NO: 13355 - RNA, 2004 nt, synthetic construct
  source 1..2004: mol_type = other RNA
atgacacagaacaaacagtcggcgagcgtgacctctccacccttgtcccaaatgacacgcgacgaactgtatgcccacgtccggacaactaccaaggacgctgtagtgctgcaagaaatgagacggcttgggttctggccagccgataccgggaagcccagtgtgaccgaagagctaattcagagggaagcacagctgagttctatgcttcgcgaactgacctcccaattgcagcacgtccacgatccaaaggcggctctgagggatatgaggaaacagcgcatggctgctgcaaaagagaagagagagcagactcgacaaaagcacgctcagctccgtcatgcaaaggccctggcctggcaggagaaacgccagaacgacatcgggtacttgggcgaggcagtcagttcaggattaaactacaccactacagacatcgagaaactcgcccgttatcagctccccgtgctgcaaaaggctcccgaactcgccactgctcttggaatacccctggccgagctgaggtttatgtcatttcaacgtaaagtctcccaggtgtctcactaccagcggttctccatcccaaaaaagaccggtggactacggtacatttctgcccccatgccgagactgaagcgctgtcagtattgggttctggatcacatactctcaaaggtgccatgtcatccggccgcccatggcttcctgcctcaacactccatcctgagcaatgcccttcctcatgtcgggcaggccgtagtcataaacctggatttgaaggatttcttccctagtatcgagtatgctcgggtcaagggagtcttcaaaagtctgggatacggcgaccagatcgcaacacttctgggcctgctctgcacagaacaggcttccgaggaggttagagttgacactcagagatactttgtcgcgggtaaaaagaggtctttaccccaaggcgccccctcctcccctatgatcaccaatattctctgccacggtttggacaaacgactccatgccgccgccagtaagcttggatttgtatacaccaggtatgcggatgatctcacgttttcctctaaacaaaaggagaggccccctgtgggaaaactgctgtggagagtgaagcagataatcgccgacgaaggcttcacactccatcccgataagcagagaataatgagacacagccaaaagcaagaagtgaccggcattgttgtgaatcacagcccgactatcgacgccaggacactacatcgatttagggccactttgcacaaggtcgaaaaaaacggcccagctggctaccactggaacgggaataccgatgtacttagcgcattagaagggtatgctcgatacatctgtatggtcaaccccgccaaaggtcagccctggttgcagcgggtgaagcaactgcgggtggtttatgcagcacctacctcagtaccagctcatagcgcccggccacctcgcttatcgctacgacagcaggtggcagctggaaatacgccgctgagagccaatggcaaggactggtggcaggtgaaggaagctgccgtgcccgtgcttgagctgacggctcagcagcttgccgagcagaagcaggcagagaaacaggccgagaagcaggcgctcaaagaggcaaagcaggggaaagacacccaagctaaggcaccagtgagagagaatcaaacacagagctacgcacagcggcaggttgttactcctcagcctgtaagggcaaacgcttcaaaacgcaatcgtgacgatgccgcacctgtctccgacgaacagcctgtggtcttcaaactgcgaccaattccttggtggagcattttgctccagttcgtggcgtgcattatggttacaatcagcctgcgctcaatttttccagtgacgttaggtttgagcctgctcgcgatttctatcatcactcgccggtctatgatggtgtgggtgatggtggtgctggttctaagtgttctgctcattaactcatga

SEQ ID NO: 13356 - RNA, 1977 nt, synthetic construct
  source 1..1977: mol_type = other RNA
atgacccagcaacagcagtctgcccccgttaaaccactgagccagatgacaagggatgaactgtacgcgcacttacgtactactaccaaggacgctgtcgtgttacaggagatgaggaggctcggattttggcctgccgataccggtaagccaacgctgactgatgaaataattacccgggaggcggaactctcaacaaccctcagagccctctcagaacagcttcacagagtgcaggatccgaaggccgcactgagggaaatgaggaggcagcggatggcggctgccaaagagaaacgcgaacaaactagacagaaacacgcccaactgcgctacgctaaggccctggcctggcaggagaaacgcaaaaccgacatagtgtacctgggggaaggtgtctccggaggactgaactatacagccaccaacactgacaagcttgcccgccatcagttgcccctgctgcaatccgcctcagagcttgccactgcaataggaatcccccttgcggagctgagattcatgtcgttccagcgacaagtgtcccaggtatcccactaccagcgttttgctattcccaaaaaaacagggggtcagaggatcataagtgctccaatgcccagattaaagcggtgtcagtactgggtattagaccatattctcgctaaggtcccctgtcaccccgccgctcatggattcttgccacaacattctattctgagtaatgccactccacacgtaggacaagccgtggtgatcaatcttgacctgaaggattttttcccgagcattgactatcagcgggtgaaaggcgtgttcaagagcctgggatatggggatcacatcgcaaccgtgttgggcctgttgtgcacagagcaggccagtgaagaggtgcgcgtggaccgtcagaagtattatgtcgccggcaagaagcgatccttgcctcaaggtgccccctccagcccaatgatcacgaatatactttgccatacccttgacaagcggcttcatgcagccgccactaagctcgggtttgtgtacaccagatatgcagacgacctcacctttagttctaaacagaaggagcgacctccagtggggaagctcctgtggagagttaagcaaatcattgccgacgagggttttaccctgcacccagacaagcaacggattatgcgctacagccagaagcaggaggtaacaggcatcgtggtcaaccactctccaaccattgatgcaaagacattacacaggttcagggccacggtccaccaggttgaaaaaaaaggccctgctggcctgcattggaatggaaacaccgacgtgctagcagctctggaaggctacgctcggtatatctgtatggtcaaccccgcaaagggccagccttggctgcagaaaatcaagcagctgcgggctcagcatgctgcacctgcagtgactagacccacacgaccctctctgcgccaacagctcgctgaagggaagactcctgagcgggccaacgggcaggattggtggcagattaaggagcccgccgcaccagtcctggagctaacgacacagcaggttgcggaagcaaaaaaagctttgaaacaagaggccgtacaagctacaaaagctgccaaggccagcagacagggtacagctacccctgattatggccgacagcagacagcgggcagaacagctccggtgaatttgaatgtttcagcagggaacaccaggcctggacaagcagatgatgggaatcagacttacaacgcaacggagcagagcaaactcaacaacaagcgtaatgctcgcctgttcgcaatcctatttcagctcttcctctgcgtcttcttcaccctgcagctgaaaagtctctacccggtcatcctaggcctacctttgcttgcgctctctattatctccggccgctcaaaatttatgtggatcatgttggtgctggttgcctgcgttctgtttcggtga

SEQ ID NO: 13357 - RNA, 1956 nt, synthetic construct
  source 1..1956: mol_type = other RNA
atgacgcagcagcaacaacccagtgcccaatcagcttccgataagccgcttagccagatgacacgcgacgagctctatgcacatctacggaccacaaccaaggatgcagtcgttctccaagagatgagaaggctagggttctggcccgctgactccgggaagccttctgtcacagatgagcttatcacacgcgaaagccagctcattaacgaactgaacactttgacagacaagctgcgacgtgtccaagacccaaaggcagcccttcgagatatgcgaaaacagaggatggctgccgctaaggagaagcgggaattgaccaaacaaaagcacgcacaacttagacacgcccgagccctcgcctggcaggaaaaaagacagaatgacatcggttatctaggggaaggcgtctcaaccggcttaaactatactagtacaaataccgacaagttggcccggtatcagctgcctgctctgcagaagtccctggatctcgcaactgccatagggatccccctcgccgaactgcgctttatgtcttttcagaggaaagtatcgcaggtatcacattaccagcgctttgccattcctaagaaaactggcggacagcgcttcatatctgccccaatgccccggcttaagcgctgtcagtactgggtcctcgatcatattctagcaaaagtaccatgccatccagccgcccacgggtttttgccgcagcactccatccttagtaacgcgttacctcatgtaggtcaggccgttgtcatcaacttggacctcaaagacttttttccctctatcgaatacccacgagtgaaaggtgtgttcaagtcactgggctacggggatcaaatcgctactctgctgggcctgctctgcactgagcaggccacggaagaggtgagggttgacaaacaaaagtacttcgtggccggtaagaaaaggtcgcttccccagggcgctcctagtagccctatgatcaccaatattttgtgccacacactggataagagactccatacggcagccacaaagctgggatttgtgtacacgcgctacgccgatgatctgactttttccagcaaacagaaggaaagacctccagttggtaaattactgtggcgggtcaagcagataattgcagacgagggcttcatcctgcaccccgacaagcagcacattatgaggcacagccagaaacaggaggtgactggaatagttgtcaatcacagccctaccatcgacgctaaaacattgcatcggttccgtgccactctgcaccaggtcgagaagaatggaccggcgggataccactggaacggaaacaccgacgtgctcggcgccttggaaggatacgcacgttatgtgtgtatggtgaaccccgtgaaggggcagccatggctgcagagaattaaagccttacgggcgaggtatgctccacagtacgcgacccagtcagcaacacaccccgctaggcctaccctgagacagcaagtggcctctggcaagaccccccagagggctaatggaaaggattggtggcaagtgcaggaggctgcggcaccagttctcgagcaaacagcccagcagattgctgaggagaaaaaggtggtgcgccaggccgagaaagaagagaagaaggccgctgccatgccgcaatccgtgcaaccagacgttgctggaaataccggcaaccaggcggcaaataccgcgaatcccgcaaacaccgaaaacctgaccgccgctgagaaaaataaactgaacaaacggctttatgggacgctcgggagagtgttccaggtgctgttgtgtgcaatcttcagcgcttccctccattcactatatcctctgactttcggcatcgctctggtggcactgagcctgatttctggcagatccagtttagtatgggtgatggtcatgctggtcctgagcgtggttctgctttcttga

SEQ ID NO: 13358 - RNA, 1926 nt, synthetic construct
  source 1..1926: mol_type = other RNA
atgactatgcagtctcccgcctcgtcatctagcattcctgacagcgcgctgacccgggaggagctttatgagaggataaggaaaagctcaaagcaagaggtcgtactggaagagatgcagagactcggattctggccgcgcgacgcagcacaacctaccgttgaggagcagttgatccggcgggaaggcgaacttcagaccgccctgtcaaagctgggatccgagctgcggggtatagaggatcgggatcgtgccctcaaaataatgagaaaagaacgcatggcccgcgcccgtgaaagaagggaggaaactcgtcagagagctgcccagggtagacatgctcgggccgttgcctggcacgaaaggaggcagcgagaactgctatacgtaggcgatggagtgagcggcggccttaacgacgcacattctgattcccaggcccttgcccgcaatgcactgcctgctctggatcacgtttccgacctggctcaggcaatggggattgggctgggagaattaagatttttggcctggcaccgggaggtgtcatccgtgtcgcattatcagcgttttaccatgcccaagaaaagtgggggtgaacgccacatcagcgcccccatgccaagactcaagagggcccagtattgggtcttggacaatatcctggccaagatgcctgttcacgaagctgcccacggcttcatgcccggaaggtccattcttacaaatgccgcgcctcacgttggcagggatgtggtgattaacttggacttgaaggactttttcccctctattggaatgagacgggtccgcggcgtctttcgacaactcggctacagttcccaggtcgcaagtctgctagcactcgtctgcacggaggccccaaccgatgaggtacagctggatggtaatagatatttcgtagcccgcggcgacagagtgttgcctcaaggcgccccgacttctccgatgatcacaaacctgctgtgtaggcgcctcgatgccaggttatcagctagtgccgccaaactcggcttccggtacacacgatacgcggatgaccttaccttcagcgccgggcctgagcactccagagataccgccaaattactgtggcgggctaaacagatcgtcgccagtgagggactgacactgcatcctgacaagcagcaagtcatgcgaaaacaccggcagcagcatgtcacggggatcgtggtgaacgataaactttccgtagacagagacactttgcgaaggtttcgtgctgtgctacaccaggctgagcgcaatggtctgcagggactgcagtggaatgggaactcagacgtgatcggggctctcaggggctacgcgaatttcattgccatgacggacgctgcacgcggggaaccttacttacagcgcgtgcgagccctcgcggccaaacatgaaggtggggctgcacccaagactcaggctagtcaacggaggctcggcgctggcgagtttaggaagcagagcgctgcagggaaggcaccatggccagcttggtggcaacccgcagaagcagcagctcccgtgcttgaaaagacagccgagcagatagctgaggagaaaaaggcacagagagaggccgctcgaccacagcccgttgctgcatctcccgctccagccagagcaccagccacagcacaaccggctgccgctccagcagctaagcaagcgccaggcgccctgagtcagatcggatgggtggcgtccatgatgctgcaggcgctatatgtggttagcgtcttcctgagcggcacctcacctctcatctggctgatgactggaggggtggcaatcggaaactttgtgcaacgcaagtctggttggctccggttcatcgtggccatttttattagctccgcgttagctagcttggtgcattctatgaagaactga

SEQ ID NO: 13359 - RNA, 1980 nt, synthetic construct
  source 1..1980: mol_type = other RNA
atgcaaccacccgcgtcatcttcatcagtgcccgatagcgcacttaccagggagcagttgtatgaaagactgagggggagcagcaagcaggaggtcatccttgaagaaatgcagagactggggttttggcctcaggatgcagctcagcccacagtggagtctcagctgatccgccgggaaagtgagctccaaaccgcactgggcaaactaggggaggaactgaggggtataagcgaccgagataaggccttgaaaatgatgagaaaagaaagaatggccaaggcgcgcgaacgtagggaggagactcggcaaaggctcgcgcaagggcggcatgcaagagcattggcctggcatgagcggcaccagcgagaactactgtatgtaggcgatggtgtaagcggtgggctgaacgaggcccaatccgactctcaggcgctggcgagaaatgctctccctgccctgaatcatgctggcgaccttgccggcgccatgggaattgacctaggggagttacggtttcttgcatggcaccgcgaggtggccaacgtgtcccactaccagcgcttcactatcgccaaaaaatcaggaggcgagcggcatatctccgcccccatgcctaggttgaagcgggcacagtactgggtccttgacaacatcctcgcaaaaatgccggtccacgaggccgtccatgggttcctcccaggaaggtcaattctgacgaatgccgtgccccatgttggccaggatgtggtgattaacttggacctgaaagactttttcccttccataggaatgagacgagtgcgcggggtgttccgacagcttgggtacagcagccaggtggcttcgctcctggcccttgtgtgcacagaagcaccgacagacgaggtacagttggacggccgacggtattttgtcgctcgtggagaacgcgttttaccccagggagcccctacatcccctatgctgactaacctgttgtgtaggcgattagatgcgaggctcgccgcctctgccgccaaacttggcttccgctatactaggtacgccgatgatctcagttttagtgcagactctcagcactcacgggacacggggaagttgctgtggcgcgtaaagcagatcgtggcatccgagggtctgacagtccaccctgacaagcagcaagtgatgaggaaacatcagcagcagcacgttaccggtatagttgtaaacgataagctgagtttggaccgggacaccctcagacgctttagagctgtgctgcacctcgctgaaagacagggcccccaggggctgcaatggaatggcaatgtggatgtgattggcgctctgcgtggatatgccaacttcatcgcgatgaccgatgcagctaggggagccccgtacttacagagagtgagggcgctcgcagccaaacacaagggctctgccatgactaccccaatcgcccccgcaagccctgttgcctcacagcagccgcaacggcaagtggccccagaccagtttaggaaacagtctgctgcaggtcaggctccctggccagcttggtggcaacctgcccaagcttccgcccctgtcctcgaaaaaaccgccgaacagctggctgcagagaagaaggcaaagcgagatgccgagagagctgaggcagctgctaaggctgctgcagccacagccgctagtgctcctgtaccacgtgctgctgcggctccagctgttgcgccatcgtccccagaagcacccaccccagaggcacccaagcgtctggagagtcagttcgtcctgactgtgagcctcatgctgcagagcgcctacgttgttatgtctctccttacaagccgctcccttgtggtgctactgcccgtcggagccattgtcattggcaattggatccaacgcaagtccggttggatgagattcctgattgtgctgatcgccgcctctggactaagtggcctggtccggcacttaacgcagtga

SEQ ID NO: 13360 - RNA, 1941 nt, synthetic construct
  source 1..1941: mol_type = other RNA
atgcagtcacccccagcatcttccatcccggattctgccctcactcgggaacagctgtacgagagaatccgaaaagggtccaagcaggaggtgatcctcgaggaaatgcagcggctgggtttttggccacaggaggctgcccagccaacagtggaggttcagctaattcggcgggagggcgaactccaggcagccttatccaaactgggagacgagttaaggggcattgaggatcgggacaaagctctcaaaaccatgcgtaaagaaaggatggccaaggcccgagagcgcagggaagaaacacggcagcgactcgcccaggacagacatgcacgggctatagcttggcatgagcggcgacagagagagctcctgtatgtgggtgaaggagtgtctggtggcctcggcgaggcccaaagtgatgccgaggtcctcgcacgcaatgcgctaccggctcttcatcacgctggcgatcttgcccaggccatgggaatcgggctgggagagctcagatttttggcctggcacagggacgtcgcaaacgtctcgcactaccagagattcaccatcgccaagaagtcgggcggcgagcgacacatttctgctcctatgccccgcatgaagcgcgcccagtactgggtcctggacaatatcttggcaaaaatgccagtgcacgatgctgtgcatggttttctgccggggaggagcattttaaccaacgccgctcctcatgttggccaggacgtggtcatcaacctggacctgaaggacttcttcccttccatcggcatgaggagagtccgtggcgtgttcagacagttggggtacagcagccaagtggccagtctcctggcgctcgtttgtacggaggcccctaccgatgaagtgcagctagacggccggagatacttcgtggcacgaggggaacgggtgttgccacaaggcgccccaacttcccccatgctaactaatttgctgtgccgcaggttagatgcgaggctggccgcgagtgcagctaaactgggctttaggtacacccgttatgcggacgacctttcttttagcgccggtcccgctcacagcagagatacagctaagttgttgtggagggtgaagcagatagttgcttctgaggggctgactgtccaccccgataagcagcaggtaatgaggcgccaccgccaacagcacgttacgggaatcgtggtaaacgataagcttagcctggaccgcgacacaatgcgcaggtttagggcagtgctgcatcaggccgaaagccgaggccctcaaggtctgcgttggaatggaaactccgatgttattggggcccttcgggggtatgctaattttattgcaatgactgacgcggcacgcggagccccatatgtagagcgcgtaagagccctggccgccaagcatggcgatgggaaggctacggctcccgcagtgcagcagacccaaccttcacagagaagtctgcccgcagggcagttccgcaaacagagtgcagcgggccaagcaccttggccagagtggtggcaacctgcacaagcccccgctcccattcttgagaaaaccgccgaacagatagccgaagaaaagaaagctcagagagaagcagcacgggctcaagcggcacctcctgctgtagcacgtcccgctcagacacagcaagctcccgccgctcaacctgctgccactacatccactccagccgcgccaggagcgctttcacacattggttggatcgccagcatgatgttccaggccctgtatgtggtgacaaccttcctggcagggtccagcccgctcatctggctgcttaccggaggagttttcataagtaacttcctgaggagaaagtctggatggggagggtttctggccgccgttgtcgtgtcatccgctgtcgcctcattagtccattcaatgcggaaatga

SEQ ID NO: 13361 - RNA, 1929 nt, synthetic construct
  source 1..1929: mol_type = other RNA
atgaccccacccagtccgtcctctgtcccagactcggccctgactcgggagcagttgtacgaaaggatcagagccagctccaagcaggaggtggtacttgaagaaatgcagcgtctcggtttctggccccgtgacaccgcacagcctactgtggaagcccagctgattcggcgcgaaggggagctgcaaaccgcccttagggacctgggcgatgagctgcggggcattgaggacagggagacagcactgaaaagcatgcggaaagagcggatggctcgagctagagaaagaagggaggagactagacaacggttagctcagcagcgacatgctcgcgccctcgattggcatggtagacgccagagggagctgctatatctgggcgagggcgtgtctggcggccttaatgaggcgcgcagtgacgagcaatccctggccagacatgcactccctgctctccacgatgctaccgatttggcacgcgccatgggtctggaactaggggagttgcgctttctggcctggcaccgcgaagtcgccagggtatcgcattatcagcggttcaccgtccccaaaaaaacaggaggggagaggcgtatatctgccccaatgcctaggctcaagcgggcacagtactgggtgttggacaacgttctggcgaaagtgcccgttcacgaggctgtgcacggcttccttcccggacgtagcattctttccaacgcggcaccacacgttggccaggctgtggtcgttaatctggacctgcaggatttcttcccttcaattggcctcagacgggtgaggggcgtatttaggcagctcggatatagcccccaggtggcaactctgttcgctctcctagcgaccgaggccccaaccgatgaggtggaactggacggcgaaaggtacgtcgtagcgaggggggagcgagtccttcctcagggtgcacccacgtcaccaatgcttacaaatgtcctgtgtcggagacttgatgctcgcttggccgcctgcgctgctagactcggtttccggtacactagatacgccgatgacctctcattttcagcggatgctgagcatgggagagacgttggaaaactgttatggcgcgccaagcagatcgtggcatctgaagggtttgtggtccatccggacaagcagcaggtgatgcgccggcaccagcagcaacacgttacgggcatcgtggtgaacgacaagttatctacagaccgagacacactgcgtaggtttagagccgtcctgcaccaagctgaaagacacgggcctcaagggctgcactggaacggtcaacacgatctcgtggcggccttacgcgggtacgccaattttatcgccatggctgatccagccagggccgaaccatacttacggcgcgtaaaggccttggcagcgaaacatgctagtgctccggcaacagccgccacacccgcaagagctcccttgcctgccggacatttcagacgccagagtgccgctggactcgcacctctgccgacttggtggcaacctgccagagccccagagccagtcttggagaaaacccccgagcagattgcagctgaaaagaaggctaagcgagaggcagaacgagaacggcagcgggcccaggaagagccacaacgagtggagcaagcccctcccaggaccgcagaacctgcagcagcaccccagacagcgaagccccgatccactctgagcctgctaggcctatgggttagcatcgcaatacagggaacctatgtgctgggatttctcctgagcttgcgagatgcttggcttatcgggctgatgacgggagccatctgggttgccaacatctatcagaggaaggctggctggatgcgctttttcatagccctcattgccggttctggactgtccgccgtgttacgtaaaatgtggtcctga

SEQ ID NO: 13362 - RNA, 1908 nt, synthetic construct
  source 1..1908: mol_type = other RNA
atgctgacaatgactgccaactcaacaacgccagcgaagcccctgagccaaatgacccgggacgagctctacgcccacgtacggtcacagggaaaggatctgatcgttctgagggaaatgcagaggctgggttattggccacaatcgaccgatatacccgcccccgaagaggagttgttggagcgtgagaaatttctgacacagagactcttggacatgcagtcagagctggctaagatttccgatccagagaaagcactccgcctgcttcagagagagcggatggatgctgcacgcgaaagaagggagcagacccgcagagaaaagatcaaacagagatacgagaaagcgcaagccttttggcaacgccgacagaccgggattgactatattggcgaagacctgagtgccgggttagttcagcagcagagcaacgtgcagagactgcagcagtacggacttcccgagttccacgatgctgcaggtttagcttctttcctgaatatcagcttgcctgagctccggtttttgtctttccagaggaaggtgagtcgctattcccattaccagtacttctcccttaagaaaaaaaccggcggactccgtgagatcgccgctcctatgccacgaattaagagagtacagtaccgaattctggacgccctgctccagaaggtccccgtgcacgatgcggcccatggattcgtcggcggtaagagcgtgctaagcaatgccatcccccacacgggccaggcaatcgtgattaacctggacgtcaaggacttttttcctagtgtaggctggaggcgagtgaaggggatcttccgtcagcttgggtactctgaacaggcagcaacactgctcagtatgctgtgcacagagctgccagtcagccccgttaaaatcgatggccaacagtggctggttgccagggctgacagaaggctgccacagggtgcgcctacctcacctgctctgactaacttgctgtgtttcgggatggacaagcgccttcagcagctcgcccaacggcttgggttccggtataccaggtatgctgacgacttaactttctcagctgcagagcctaaagcccctgtggggaagctgttgtggcgagtgtctaaacttatgacggccgaaggctttactttgcatcccgacaagcagagagtcatgcgtgcgcaccagcgccaagaagtcacgggcatagtggtgaatcagcatccctccctgaaccgagatacattgcaccgctttcgtagtctcctgaacaagctcgaaaaacagggacctgccggactccactggaatgggaacaccgatgtgctcagagctgccgaaggattcgctagatacttaatgatggtgcaaccctctaaaggtgctgtcgcactgcagagggtccaccggttgaaaaagcaatggtccggagctccagccttcaccggcggaaacgtgtggaggaagacagcagcggacgggggcgttccactacgcaaaaatggcgcccagtggtggaaagcaagcacaactccggctccggttcaggagaagacagatctacaacgcagagaacagcggatgcaagaaaaacacgcacagctggccccagacgcatctaatgatgctgccctgccagagaataggcaggcggcccctgtgaatcatactacccaaaacgccggagctaatcaatccgttagcaagctccccccggtgatatccgcagggacaatgattgccgatttaatcgcaggcctaaccctttccattctcatgggcgtagccactccgctgctgttaaccctgctgtcgttctatgccacttttcggtttcggcggaactttaggcctctgctcctcggtgtgttgatccttcttctaatactacatgtcatgaagtga

SEQ ID NO: 13363 - RNA, 1917 nt, synthetic construct
  source 1..1917: mol_type = other RNA
atgactgctaattccacatcaagcgccaaacccctgtctcagatgactagagacgaactctacgcccacgtaagcgcccaaggaaaggacctggtggtgctccgcgaaatgcagcgactaggctattggccgcagcaacaggatatccctgccccggaacaggccctactggagagggaacaggtgctgaccaaacgcctgcgtgatatgcagagtgagcttgcccagatttctgatcccgaaaaagcgctcaggatgcttcagagagaaagaatgcaggcagcgcgggaacagcgagagcagacaaagcgccagcatgcacaaaggagatttgagaaagcccacgccgtctggcagaggcgacagactgacattgattacatcggggacaacctttcagctggtctgctccagcgaacaagcgacacgcaacgcctccagagacacgggttgccagaaatccatgatgcagccgggcttgctgctttcctggggattagcctgcacgagctgagatttttgtcattccaacgacgggtatcacggtactcgcactatcagtatttttccctgaagaagaagaccggcggacttcgcgaaatagccgccccaatgccccggatcaaacgtgttcagtatcgcattctggatgctcttttgcagaaggtccccgtccatgacgctgcccacggattcgtgtacgggaaaagcgtgttgtccaacgcacagccccacacgggaaaggcagtggtgataaacttggacgttaaagatttctttcctagcgtgggatggcgcagagtgaaaggaatcttcaggcagctgggctacagcgagcaggtcgctaccctgctatctatgctgtgtacagagctccctgtgtcaccggtggatatcgatggccaaagatggttagttgctcgtgccgataggagactcccacagggggctcctacctcccctgctctgactaatctgctgtgcttcggaatggaccaacgccttcagaagctggcacaacggttaggttttcagtatagtcgttacgccgacgacctgacattttccgctgcggaccccaaagcccctgtgggtaaactgctgtggcgggtccagcaaaggatgacagctgaagggttcacgctccatcctgaaaagcagcgagtcatgcgtgctcaccagcgccaagaagtcaccggcatagtggttaatcagcaccccgccctcaaccgggagacattgcatcggttccgggctctgctgaataaactcgagaagcatggcccagccggactgcactggaacgggaatagcgacgtacttagagcggcagaggggtttgcacgatacctgatgatggtccaacccagcaagggcgcaccagccctacagaggatccataggatgaagcagcaatggggagccgctgctgcaggaactgccaatgtcttgtggaggaagattgccgcggatggcggtgtacctccacggtcagagggtcaggcgtggtggagtgcagccttaccacctgagccggttcctgagctgactgacctgcagagaagggagcaaagacgccaacccgctggcaccgaaaaaatttctgagcccgtgtctcagtcccggtcaggcaccgactacgatgccggttctccagacgcagcccctgcacaggtgtttccagagaacgctgagcagacctctatgaacttgagtaagctcccaccaagtgtgtccgcgggcactatgctcaccgatttgattgccggcctggttctgtcgatccttttaaagggcgccctgcccctcatgatgagtctcctcagcttatatgcctccttcaggtggaagcgctccttccggcccctattggcactggcatttgtgctgctttggctctggcatttatctaggtga

SEQ ID NO: 13364 - RNA, 1821 nt, synthetic construct
  source 1..1821: mol_type = other RNA
atgactgtccgtccaggatcgctcacccgccagcagctgtatgacagaattagggagtccagcaaagatgaggtggtgctcgaggaaatgattcgcctgggctattggcccgatggtgtcgaccagcctaatctgccggacgaccttatccgaagacgcggcgagattactagagaaatctcagatctgcatcgccgtgaagctctctggcgcgatcctgaagctgccctcaaggccatgcacaaacgaagaaaaaaggcggccctagtgcgaagagccgaaacgcggttaaggggcgcaagggaccggcatgagagagccttagcctggcacgagcggagaaagactgagatactctatttgggggaaggcgtgagtgccggactgtctgcccaagaggcagcacccgtgtctcctgctaacgggttaccacccttagctagcccagccgcattagcacgggcgatcggcattagcctgggtgaattgcgattcctggcctacgaccgggccctgacatcagtatcccattatcagcggttcacgattcccaagaagacaggaggcgtccgggcaatatctgctcccatgccgagacttaaacgcgcgcagtactgggtacttgacgtggtcctggctcaagtgcccgtgcatgaagccgcgcacggctttgtcccaggcaggagtatcctgaccaatgccgcagcccatgttgggagggacgtcgtggtaaacctcgatttgaaagatttttttccctctctggactaccgccgcattaagggtaagttcaggggcctcggctatgctgagccagtcgccacagtgctcgcgctgctgtgtaccgagcccgacgttgacgccgtcgaaatagatggtcagcagctctacgccgcccgtggacctcgaagactaccgcagggtgctccaacatcccccgcactgacaaacctcgtatgcacacggctcgatgcccgcctttcaggactggccaggagcctgggatttgcctacactcggtacgccgacgatatgaccttctccgccagtggcgaagccgctgccaaagtggggccgttgctgaagtacgtacacgagatcgttgcgaaggaagggtttaccgtccaccccgacaaaactagagtcatgcgtcggggaagacaccaggaggtgaccggactgaccgtgaatgagcgggtggctgttccccgggagacgcttaggagatttagggccctcctgcacggcatcgagcgacatggccccatcggaaggcgttggggtcgatccgcagatggggctgtgctaggggctgccttggggttcgcacgcttcgtgcgcatggtcactccggaagtggggacccctctagttgcccgagcaagaagcctggctgagaggcacgggacacaacccgaacaagctcgccccagggtagcagccttccgtgaacggtcagcgcaaggcgtcccacctcgagagggtggatgggtgccagctgagcctccagtgcctcatcctgatccattgctggttcaggctgaggctgctcaagcagaggcggctaggagggccgaaggagctgcagataggagagtggtgcctcctattggtaggcagcccccagcacctcaacctgtgagcggccaggcaaccgacgatgcagacgcagctggcatgcggccatggatggttgttgtgggcgtcttcgttctgttccaggcagcggccttgttgcacccaggactggggctgtttgtgcttgctgccgcccttactatcggacttagaagatggctgcgccggagacgcgggaagtga

SEQ ID NO: 13365 - RNA, 1809 nt, synthetic construct
  source 1..1809: mol_type = other RNA
atgagtgtccaaccaggcagcttaaccagacagcagctctacgatcgcattcgggagtcctccaaagacgaggtcgtgctggaggaaatgattcgcctggggtactggcccgctggaaaagatcagcccaatctcccggaggaagtgattaggcgacggggcgaactagcccgggagttaacagagctccatagatctgctgctctctggacaaacccggatgcagctctcaaagccatgcacaagaggcggaagaaagcggccctggaacgccggagggaaaccaagctgaacggagcccgaggccgacacgaaagagccctcgcatggcatggccgccgtaatcgggaaatcctctacctgggcgaaggcgtatctgctggtctgtcgggcggtgatgctggcgcatctagagccgacgggctgccagagttggccagtccaggtgctgttgctgaggctatggggatcggcctgggcgaactgagatttcttgcctatgatagggcactggctaccgtgtcccattaccagaggttcaccatccccaagaagactggcggtcttcgcgccatctcagcccccatgcccagactaaagcgggcccagtactggatcctggacgcggtccttgctcacgctggaatccatgacgccgcccacggtttcgttcccggtaggagcattcttaccaacgccgcactgcacgtcggcagagacgttgttgtaaacctggacctcaaggacttctttccgaccctcgactaccgcaggatcaaaggcaagttccgcggattggggtatgccgagccagtagcaacagtcctcgccttgctgtgtacagagcctgacgttgatgaggtggagatcgacggacagcggttgtatgccgcaagagggccaaggcgacttccacaaggagcaccgacgtcccccgccctaaccaatctcgtatgcactcggctggacgcacgcttgactgggcttgccgccagcctaggcttcacctatacacggtatgccgatgatatgacgttttcagccagtggcgaggccgcgggtaaaactggggctctcctgaagtacgtgcacgagattgtcgctggagagggcttcacggtgcaccccgacaagactcgagtgatgcgcagggggaggcaccaagaggtgacaggactcaccgtgaatgagagggttgcagtgcccagagagactctgcggagattcagggctctgctgcacggcatcgaaggtcatggacctgctggccggcgatggggtagaagcgaaggacaggccgtgttaggagctgctctggggtttgccaggttcgtgcgaatggtgacaccagaagctggggctcctcttgtggcgcaggcacgtagactggccgagactcatggagcaccccagcagagtgctcaacctcgcattaccccctttcgcgcacaaagcgccagaggggttccccctcgagaaggctggtggtcacctgcggaacgccctcctcctcagccagaccctatactgttagaggcggaacggcccgcgatttctgcaccagggagaagcgggctgccttccataggacgtcgcccagcgcctcctccagatcagccaaggccaggatctccccctgggggtgatatcgaagaggatacaccattgaaaccctggatggcagtgttaggcgtctttgtcctgtttcaggccggagccattgtccatccggtgatcgggctgctggtacttgcagcagccttggtgatagccataaggcgttggttgagacgtaggcgtcggcggtga

SEQ ID NO: 13366 - RNA, 1821 nt, synthetic construct
  source 1..1821: mol_type = other RNA
atgtcagcacagcccgggagcttgaccaggcagcagctctacgacagaattcgcgagagctcgaaggatgaggttgtgctggaagagatgatccggctgggatattggcctgagggcgccgatcagccaaacttacccgaggatttgattcgacgcagaggcgaaatcagtcgggccatcaccgatcttcataggcgcgaggccctgtggaggaatccagatgccgccctcaaggagatgcacagacggcgcaaaaaagcagctctcaaaagacgcagggaaaccaaattgcgtaatgcccagggacggcacgaacgagccctagcatggcacgccaggagggacgacgagctgctgtatttgggagaaggggtgagtgccggcttgtctcgaccggctcatcccgcacgcgaaccaacgccaggtcttccggcactggcgtctcctaaggtgctggctcaggcaatgggaatcagtctgaacgagctgagattcctcgcttacgatcgtgcactcgccacagtgagccactatcagaggtttactatcccaaagaaagccgggggcctccgtactatctctgcgccaatgccccgccttaagcgggctcagtattgggtgctagacgccctattagcgcgcgcccccgttcatgaagccgcacatggtttcgtgcccggtcggtcgatagtaaccaatgctggcgcccatgtcgggagagacgtggtcgttaacctcgaccttaaggatttctttccttcactcgactaccgtcggattaaggggaagttcagagggctaggctatgccgaaccggtggccacagtccttgcgctcatctgcacagagcccgacgtagacgctgtggagatagatggtcagaccctgtacgcagccagagggcctaggagactccctcaaggcgcccctacttctcccgcattgactaacctggtctgtacccggctggacgcccgattatccggactcgcgaggagcctggggtttacttacacccgctacgccgatgacctgacattctccgcctccggagaggcatccggtaaggtgggagcccttctgaaatacgttcacgagattgtggctgcggagggatttaccgttcatcctgacaaaacaagggtcatgaggcggggtcgtcatcaggaggtgacgggactgacagtgaacgagagagtcgccgtaccccgcgaaacgttacgccggtttcgcgccttactgcacggcctggaaagacacggccctacaggcaggaggtggggaggatcaggggagaatggcgtgttgcgagccgctctgggcttcgctcactttgttaggatggtgaccccagacgctggtgctcctctcgttgcccgggcacaagcccttgccgaacctaatggcgtgcaagttcctgcagcccgccccagaatgagcgagttcagagccagagctgcgaggggggtagagccacttcctcggtggtgggagtctgccgctcgacctgtgccagaacccgatcccattctggcgcaagctgcagctgaagctgccgctccagcaagacgagcaactccatccgggcggagtttcgtgccagtgattggccgctccagcgctcccagctcagtagacccggcaccagcaccccaagtggatccggaagccgcgcctatgaagccctggatggtggcactgggggtattcgtcctgtttcaggctggcgtcgtcatccacccagtcataggaatcctggtcctggctgctgctctcctgattggccttcgtcggtggttgaggagacggcgagatcagtga

SEQ ID NO: 13367 - RNA, 1899 nt, synthetic construct
  source 1..1899: mol_type = other RNA
atgtctcagcagccaggcagtctaaccagacagcagctgtatgatcgaattcgggagtcatctaaggacgaggtgattctggaagagatgatcaggcttgggttctggccagacggagaggcccaacccaatcctcccgacgacctgatccgtcgaaggggcgaaattgcacgggccttagcggatctgcatcggcgcgaagcagcctggagagatccggaggccgcccttaaggagatgcatcggcgccggaaaactgccgccctggagagaaggcgcgaaacccgtctcagaaacgctcgcgatcgccatgctcgagcacaggcctggcacgcacggagagaagccgagattctgcacctaggtgatggggtaagcgccggcctgagcgctggtcttgcacatgccgcccctgatgccggaacgccagctagagggccagcaccaggcttacccccccttgctagcccgaaagccctcgcagaggccatgggaatcggcctgggggagctacgcttcctggcctacgacagggccctatcaacggtgtcacactacaggcgctttacaataccgaagaaagcggggggactccgtagaatcagcgccccaatgcctcgcttgaagcgcgctcagtactggattctggacgcccttctcgctcatgcaccggtgcatcccgccgcacacggtttcgtgcctggcagatccattgtgactaacgcggctgcgcacgttggcagagatgtggtcgtaaatctggacctgaaagacttttttcccagtttggactatagacggataaagggcaaattccggggactcggatacgctgaaccggtcgctaccgtgttagcgctcctgtgtacagaacccgacgtagacgcggtggagatcgacggggctcgtctatatgctgcccggggaccacgtcgattacctcagggggctcccacaagtcctgcgctcaccaacttggtctgcactcgcctggacgcaaggctctccggcttggcaggctccctgggatttacatatacgcggtacgccgacgacttgactttctcggccagcggggaggctgctggtaaagttggggccctcctcaagtacgttcacgctatcgttgccggcgaggggttcacagtgcacccggataagacccgggtcatgaggcgcggaaggcaccaagaagtgacaggcctgactgttaatgaacgggtgggtgtgccccgagagactctccgacgatttagagccctgctccacggactggagcgccatggtccagtcggtcgtaggtggggagccgcaggtgaagcgggagtcttacgggccgcagtcgggtttgcccagttcgtgcgcatggtcacccccgagacaggagctcctcttctggcaagggcacgcgctctcgcggatcgacatgcagatcgcccatctgccaggccaggtgccagaccactgccagattttagagccaggtccgcccggggtgaagtgcctttggctaggtggtgggcacctgctcctcgacctgctcctgagcccgatcccatcctggccgaggctgaagcagcagctgcgagagaggccgaggaggctgcagctagagctgcagctagggccgcagcacccgtaccaggaagatctggggtgcccgtatccggcagacctcgtttgggcgcgccagaacctaccgctagggcagaagttgcccccgataccggagcggaacccgacgatgcccccatgaagccttggaaggtgatcctgggcatattcgttctgttccaagccgctgccctcttgcatccagcccttgggttgctggtgcttgccgtcgccctgttactgggcctgcgaagactgcttcggcggtggaggaggcggaggtga

SEQ ID NO: 13368 - RNA, 1815 nt, synthetic construct
  source 1..1815: mol_type = other RNA
atgtcgcctcagcccggatcactgacgcgccaacagctgtacgacaggatccgcgagagcagcaaagacgaagtcatcctggaagaaatgatccggctcgggttctggccggatggagcagagcagcccaatccgcccgaggacctgatccggagaagaggcgaaatcgcacgggctctggcagatctgcaccgcagggaggctgcttggagggatcccgaggctgccctgaaagagatgcaccgccggcgtaagaccgctgccttggaacgccggagggagacaaaactgcgcaatgctagagatcgccatgcccgtgcacaggcatggcacgcacgaagagaagctgaaattctgcaccttgggggaggcgtcagtgctgggttggccaatgctgatgccccagccaggggtccagcacctggacttcctgccctggccagcccaaaagcccttgccgaggccatggggattgggttgggagagctgcgcttcctcgcatacgacagagctctctctgctgtctcacactacagatgctttactattcccaagaaggctggcgggctaaggcgcattagcgctccgatgcccagactcaaacgagcgcagtactggattctggacgccctcttggcccacgtcccagtgcatggagccgcacatggcttcgtccctggcaggtccatagtaactaacgccgccgcgcacgttggacgggatgtagtcgtgaacctcgacctgaaagacttctttccatctttggactatcggcggatcaaggggaagttcagggggctgggttatgcagagcccgtggccacggtgttggcgcttctttgcactgagcccgacgttgacgccgttgagatcgacggagctaggctctatgccgctaggggtccccgtcggttaccccaaggagctccaacttcccccgccctgactaacttagtatgtaccagacttgacgcaaggcttacaggcttggccgcgtccctcgggtttacatacacgcgctatgcggatgatctgacattctccgccagtggcgctgccgcaggaaaagtgggtgccctgctgaagtacgtgcacgccatagtggccggcgagggtttcaccgtgcatccggacaagacccgtgtgatgcgtcgcgggagacaccaggaagtgaccggcctgaccgtgaacgagagagtaggcgtgccacgcgagactctgaggagattccgggctctgctccatggcctggatcggcatggacctgccggtaggagatggggagctgcaggggaaggagatgttctcagagccgcggtgggatttgcccagtttgtgcgaatggttacccctgagacaggcgccccattagtcgcccaagcaagggccctagccgataggcatggcttgcggcctgcagtgcgacctcagcctgactttcgtgcccgatctgctcggggggcaatgccattagcgcgatggtgggcacctgctccacgacctgctccagaacctgaccccatactcgccgaggcagaagcagctgcagctccagtgcccggtcgaagtggcgttcctgcatctggccggcctcgcttcggtacacccgaacctgttgccccagcgcaagctgcgccaggtaccgttgccgaagccgatgatgcgcccatgaagccctggaaggtggtcttaggggtgtttgtgctttttcaggccggcgctctacttcacccggcactaggcctcctggtcctcgtcgtggcgctggtactgggcctgaggagattgctgcgcaggtggcggagacgaagatga

SEQ ID NO: 13369 - RNA, 1806 nt, synthetic construct
  source 1..1806: mol_type = other RNA
atgtccgctcagccgggaagcctgaccagacaacagctctacgatcggattcgcgaatcatcaaaggatgaggtggtgctggaagaaatgatccggttgggctattggcccgatggggcagaccagccaaatctgagcgacgatctcatcaggcgccgaggagagataacccgagctctcggggacctccataggcgtgaagcactgtggagggaccccgacgctgctctcaaggagatgcaccggcgccgcaagaaagccgctctggagagacggcgggaaactaagctatgcaatgcccgagataggcacgccagagcgctcgcttggcatgcaaggcgagatgacgagctgttgtatctcggagaggacgtgagcgccggactgagtgcagcagccgaaggtcgggagcctttggccggactgcctgtgctggcggatcccaaagccgtggcccaagcgatggggatctccatggccgagctgcggtttctcgcctacgaccgagctcttgccactgtcagccattacaggcgtttcaccatccctaagaaaaccggcggtctgcgcacgatatcggcgcctatgcctcggctgaagagagctcagtactgggtgctggacgcagtgttgacacacgctcccactcatgaggccgctcatggattcgtccccggcaggtccatcgtcactaacgcttctgcacacgtcggccaggacgtggtcgtgaacctggaccttaaagactttttcccgtctcttgactacagacgcatcaaggggaagttccgcgggctgggatatgcagagcctgttgcgaccgtgctggcgttaatttgcaccgagccggacgtggatgcagtggagctggatgggcagtctctttacgccgcaagaggtccacgcagactaccccaaggagcaccgtcctcccctgcgttaactaaccttatctgtaccagactagacgcacgtctgagcggtctgggcaggaatttaggcttcacatatacacggtatgccgatgacctaacattttcagcaagtggcgctgccgccgccaaagttggagctcttctggcccacgtccacgagattgtagccgccgaggggttcacagtgcaccctgacaaaacgcgtgtaatgcggagagggcggcaccaggaagtaaccggcttgactgtcaacgagagggtaggcgtcccaagggagactttgcgccgcttcagagccctccttcacggcttagagcggcatggacccgctggtagagcttggggaagaagcggggaagatggggtactccgagccgccttagggtttgcccgctttgttagaatggtgacacctgaggttggcgctcctctcgtcgctcgagccaaagccttggccgaacgtgatggtgtgcccgcgactgcaataaggcccagggtgtcaccattcagggagagggcagcaagaggggttgcaccacttcccaattggtgggaacctgcagcaaggccagctcccgaaccagatcccatcctggccgaagctgccgcacgtctcgcttctggcgctccaacaggccgcagtggagtccctgccattggccgaacaacggccgctcccgctaacgaacctgttccggccccaaaggacgatcccgatgccgctccaatgaaaccatggatggtcgtggtgggactgtttgtgttgttcaatgccggtgccgtgattcatccagctctgggctttaccaccctcgcggtggccctggttattggcctggttagatggctgaagcggaggcgcacccggtga

SEQ ID NO: 13370 - RNA, 1842 nt, synthetic construct
  source 1..1842: mol_type = other RNA
atgacgctccgccctggaagcctgactagacagcagctgtatgatagaatccgggaggggagcaaggacgaggtcgtcctggaggagatgatccggttgggctactggccagatggcgcggaacaacccaaccccccagctgaactgattcggcgacggggggagataagtcgggccatcgccgacctgcacagaagggaagccctctggagagatcccgacgccgctctaaaagagatgcaccgccgacggaaaaaggccgcccttgagcggaggagagagacaaagctccgtggtgcacgaggccgccacgaaagagcccttgcatggcatgcgcggagggacgctgagattctgcatctgggagagggcgtctccgctggactgtctggcaccgacgctgatcctagagccctcaaagccggacttcccgccctagccaatcccaaggcggttgccgaagctatgggcatctcgctgggggagctgcgcttcttagcctacgacaggcccctctccaccgtgagccactatcgacggttcactatacccaagaagacaggcggcgaacgcactatttccgcgcccatgcccagactcaaaagggcacagtattgggtgttagacgccctgctggccagggctcctcttcacgaggctgcccacgggtttgtccctggacggtccattgtaacaaacgccgcagctcacgtgggacgcgatgttgtggtgaatttggaccttaaagacttttttccgaccttagactaccgcagaattaagggaaagtttcgtggcctgggctatgccgagcctgtggcaacagttctagctctgatctgtaccgaacctgatgtggacgcggtggagattgacggacagagactgtacgccgccaggggtccacgtagactccctcaaggtgcccccactagccctgccctgaccaatctcgtgtgcacaaggctggatgccaggctggcaggattggcagcatctctggggttcgcatatacccgctacgcagacgacctgactttctcagcctctggcgaggctgcagggaaggtaggtccgctcctgaagtacgtacacgccatcgtagccgccgaagggtttactgtgcatcccgataaaaccagggtgatgcgtcggggcaggcatcaggaggtaaccggccttaccgtgaacgaacgtgtcgcagtgccgcgcgagacgttacggcgtttccgagctctgctacatgggatcgaaagacatggtcccgcgggtaggaggtggggtaaagggggtgatggcacagtgttgcaggccgcgcttggctttgccagattcgttcgaatggtgacgcccgaggctggggcaccacttgttgctcaggtgagggccctcgctgaaagacatggagccagacaggctcctgctcaaccacggatcgctacattcagagcccgctcagcagacggtgttgctccactggcccgttggtggattccagcagccaggcctctcccggcacctgatcctatcatagccgaggcggaagcagctgaggcagaagctcgccggaaacgccaggatggacctggtcgagtccctggtcggagtggactacccgccgttggactcagaccagctccagcaccagaaccggctaggcaggctgatcccgtccaaggggatcgcgacggaactccaatgaagccatggatggcagtgctcggggtcttcgtgctgtttcaggccgcagcggtcttgcacccaggattggggctgttagtcttggtggcagctctggcgatcgggcttagacgctggttgcgaaggaggcgaggccggtga

SEQ ID NO: 13371 - RNA, 1806 nt, synthetic construct
  source 1..1806: mol_type = other RNA
atgtctgcccagcccggaagccttacacggcagcagctgtacgatcgaatccgggagacttccaaagacgaagtcatcctcgaagagatggtgcgcctcggtttctggccagatggggccgaacggcccaatctcccagatgctctgattaggaggaggggggagatagtacggaccctgggcgaactacacctgagagaggccctctggtctgaccctgatgccgccttgaaggagatgcataggcggcgtaagaaggcagcgctcgaacgtaggcgggagacgaagctgcgaaatgctcgcggcagacacgagagggctcttgcttggcacgctcgcagagacgaggatctgtttcacctgggggagggcgtgtcagctgggctatcagcacctgatgcggcagggcacgctccagctccaggattaccagccctcgctagtcccaaagctctggccgacgcgatgggcatcggaatgggggagctgaggttcctggcatacgaccgcgccctgacagcggtgtcccattaccgacgctttactattccaaaaaaagccggcggagagcgactgatctccgcacctatgcctcggcttaagcgcgcgcagtattgggtgcttgacgctctcctggcacatgcccccgtgcatgaagccgcccaagggtttgtgcccggaaggagcatcttaaccaacgctcgagcgcacgttggacgggacgtagttgtgaacctggacctcaaagactttttccccacacttgactacaggcgggtgaagggaaagtttcgcgggctagggtatgcggaacctgtggcaaccgtgctggcgctgttatgcaccgaacccgacgttgatgcagtggaaatagatggccagcgcttgtatgccgcacgtggccctagaagactgccgcagggcgctcctacttctccagccttaacaaacctaatctgtacccgattggaccagagattgtcgggcctggggcggagccttggctttacttacaccagatacgcagatgatctgacattctctgccagtggcgaagccgctggtagggtgggacctctgttgaagtatgtcggtgagatcgtggcctccgaaggcttcacggtacatccagataaaacccgggttatgcgacgggggcgccatcaagaagtgacggggctgaccgttaatgagcaggtggccgtccccagggagacattaagaaggtttagagccctgctccacgccctcgaaaggcatggccccacaggtcgtagatggggaaggtctgccgatgccggcgtgcctagagctgctctcggcttcgcccggtttgtcgccatgatcaccccagaggcaggtgccccattggttgcgcaggcacgaaggctggctgagagacaccgtgccggagcagctatggcaaggccggtcatccccgtcttcagatcccgagccgcacaaggagctgcaccatgggaaccgtggtggaggcctgcaaaaccgcaggcccccactcctgaccccattctgatagaggcagaggccgaggccgccgctctaagagaaactgagggtgaccgcccacgccggagaacttcagctcggagttggttgccaagcattgggcgcagcaccgacacagctcttgccggtactggccgcgctcctatgaagccctggatgattgccctcggcgttttcgtactggtacaagcagccaccgtcattcaccccgccctgggaggtcttgtcttgattgctgcacttggagtggtcctctggagatggttccgtcggcgctga

SEQ ID NO: 13372 - RNA, 1836 nt, synthetic construct
  source 1..1836: mol_type = other RNA
atgagcacccagccaggatccttgacccgccagcagctgtacgacaggattcgcgagagcagtaaggacgaagtaatcctggaagaaatgattaggctcgggttctggcctgatggcgcagatcgccccaacgtgccagctgatctgattcgccgcagaggggaaatctccagagagctcgcggaccttcatcgccgcgaagctctgtggagagatcctgaggcggcgttgaaggagatgcatcgacgtcgcaagaaggccgcactcgagcgaaggagggaaactaagttacggaacgccaggaccaggcatgaacgtgccctggcatggcatgccaggaggaacgaggacgtgctgcacctcggtgagggtgtttctgctggcctgctggcccctgacgagacaggtagagaacccggacccggccttcccagacttgcaaatccgaaggccctggcccaggcaatgggcatacccatgggggagctgcggtttctggcttacgacagggctttggccacagtgtcccactatcggcggttcaccatccctaaaaagacgggcggtactcggctgatttccgcaccaatgccgaggctgaagagagcccagtactgggtgcttgatgcgttgctagcccacgcccctgtgcacgaatctgctcacgggtttgtgcccgggcggtcaatcgttacaaacgcctctgctcacgtcggccgtgacgtggtagtgaatctggatctgaaagacttcttccctactctggactatcggcgggttaaaggaaaattccgaggccttggctatgccgaacccgtggcgacagtgcttgccctcctgtgtacggaacctgataccgacgatatcgagatcgacgggcagagactgcatgccgctagaggccctcgaaggttgcctcaaggtgcaccgacctcaccagcgctaacgaatcttatatgcatccgtctcgaccggcggctaactggtttggcccggaatctcggatttacatacactcgatatgccgacgacctgaccttttcggccagtgggacagcggcagaaaaagttgggccactgttaaaatacgtcggtgaaattgtagcggccgagggtttcaccgtgcaccccgataagactcgtgtcatgagacgggggcggcatcaggaagtcaccggactcactgtcaacgaaagagtggccgtgccacgcgagacactcagaaggttccgcgccctgttacacgccctcgatcgcaatggaccagccggcagaagttggggacgctctgccgatcacgctgtgctcagggccgcattgggcttcgcccattttgtacggatggttaccccagaggcaggggctcccttagtggcacaaacccgcagactggcagagaggcatggcgtcggcgtaggcgaggctagacctcgaatcccaagctttcgacagaggtcagctgagggagccgttccgcttgcacgctggtggagtcctgctgagcctagcgcacctaggcccgacccaatcctggcagaggctgaggctgaagccgcaaaagctgctgagcacgcacgtaggcccgctgctccaggaagatccggcctaccaagcataggcagagctgggccatctggagcagcccgacccttaggagatcccgagccccctagcggatcaggagctgatggcggcacaatgaagccgtggatggtggtgctcggggtcttcgttctgtttcaagctggggccgtggtccaccccgtgattggtctgctggttttggtcgccgccgtcgtgattggactcagacgctggtttcggcggcgaaggtga

SEQ ID NO: 13373 - RNA, 1797 nt, synthetic construct
  source 1..1797: mol_type = other RNA
atgaccgcgcaaccaggggccttgacacgtcagcagctgtacgacagaattcgggagacgtccaaggatgaggtcatccttgaggagatgatccgcttgggcttctggccccaaggcgagactcagccatctcctcccgaagagctcattcgacggcggggcgaaatagcccgggaactggcagcgctccatacggcagaagccaggtggcgtgatccagaagcagcactcaaagaaatgcacaagcgcagaaagaaggccgccctagagcggcgcaaagaaaccaaacgcaggggggctgaacagagacatgccagagcattagcctggcacgagcgccgagccgaggagttagtttttctgggagacggggtgtccgctggattacgcgccgatgcagctgcacctccagctcctaggccagggcttcccgtccttgccacccctaaagcgctcgctgacgctatcggtatccccttggccgagctgaggttcctcgcctatgaccgcgcactgagtagaatcagccactactggcggtttacaatcccgaagaaggcagggggagtacggctcatcagcgcaccaatgccccgactgaagagagcccagtattggattctggacaacctgctcgcacacgccccagtgcatgatgcggcccatggctttgttcccgggcggagtatcgttacaaatgcggctgcccacgtaggacgggcagtagtcgtcaacttggatctgaaagatttcttccctactctttcattccgcagggtgaaaggaaagtttagaggactgggttacgccgaacccgtcgccacagtactggccctgctgtgcacagagccggatgttgacgaggtggaaatcgacggcgaacgactcttcgcagcaagaggaccccgacgtctaccccaaggtgctcccacttcaccgctctttaccaacctgatttgtgccagacttgatgccaggttgtccgggctggctcggtcaatgggcttcacctacaccagatatgcggatgacttgactttcagcggcgcagcggctgaaaagatcggtgccctgattggcctggtgggggagatagtggcagctgagggttttgtggttcaccctgataagacccggatcatgcggcgaggctctcggcaagaggtaaccggcctgactgtcaatgagcgtgtggccgtgcccagagacgtgcttcgcagattcagggctctcttgcatcagattgaggcgacgggccccgctggtaaaagttggggccagaccagagacgttatggccgccgcgaggggctttgcctgctttgtgagaatggtgactcctgaggctggagagccactcgtggccacagtgcgacgcttaggcgagaggcacgggttgacagggaccgctccagctcctgctgccttccgagcaaaagcagcagctggagaaccgcctctcgcccgttggtggattcctgccgctccacctgcgccagaacctgaggctgtcctaagggaacccgccccccctcaaccagccaaacctatgcgcagcgccctagacctggcttcccttagggcagacctgagggatagggctgcaccccctgctggaccagctcaagacccgggtgaacccgccatgaagccatgggttgccgtcattggggtgctggtgctgtggtcggccgcttctgccataaatccggctctgggaacaatcgtgctgatagcagctattgtcatcgccactcgctggcttattagacgttggaggcggaggagacgccggtga

SEQ ID NO: 13374 - RNA, 1821 nt, synthetic construct
  source 1..1821: mol_type = other RNA
atgtcggcccaacccggagagctcaccagacagcagctgtacgataggatcagagagagcagtaaagacgaggtgatattggaggaaatgattcggcttggcttttggccccgaaacgcgaataagccagacgtacctgaagcacttatccgccggcggggcgagattgatcgcgaactcgctgcactgcacgcccaagaggcaaggtggcgtgaccctgacgcggctctgaaagagatgcataagcggagaaagaaggccgccatggagaggagaaaggagacgaagaggggacacgcccagacacgatatgagagggccgttgcttggcgggagaggagagccacagagatcttatatttgggcgaaggtgtgtctgggggccttggagggactgatccagctcggcctttgaaggcgggactccccgaaattactagcccaaaagccctcgcagatgcgatcggagtgcccctcgcagaactgcgctttctggcgtatgaccggaagctgagccgcatctcccactaccagcggttcgcaattgctaagaaaacaggcggtgtcagacagatctcagcccccatgcctagactgaaacgagcccagtactggatcctggatgcactgctagggcacgccgcagtgcatgatgccgcacatggtttcgtccggggcaggtctatcgtcaccaacgctgctcgacatgtgggccgggatgtggtcgttaatctcgatcttaaggacttttttcctacactcgacttccggcgagtgaaagggaagttccgcggactagggtatgccgagcccgttgctacagttcttgccctcatttgcacggaacctgacgtagacgagatcgagatagatggagaacgcctctttgccgcacggggtccacgcagattgcctcagggtgcccccacctccccgttgttaaccaacctgatctgcgctcgcctggatgcccgattaaccgggctggccgcctcacttggcttcgtatacactcgttacgccgacgatatgaccttctctgccagtggcgaagctgccgccaaagtgggcgccatgctgaagtttgtgaacgaaattgtggccgcggaagggttcgtggttcaccccgacaaaactagggtgatgcgacgtggagggcgacaggaggtaacaggactggtggtgaatgagagggtcgccgtgcctcgtgacgttttacgccggttccgggcattgctgcaccagatcgaagcaacagggccagcggggaaaaggtgggggaaggcacgcgacgtcatggatgcagccacgggtttcgcctgttttgtgagaatggttaccccagagattggcgaggagcttctcgctactgtcagacgcctggacgcgagacacggagctgcacgtgcaggagctgctccgtccaagtcaccacacggcgactttcgaggcaaagccgccgctggtgtcgctcctttagccagatggtggactcccgcagaacctccacccccagaaccagagccaatcctgagagaaccggaggcagcgcctgaaccagatcctccgaccagcccacaaaggccgaggagtgctctggacatcgccggactgcgcgctgaaatgagagacagggctgcatccgctcccgaacctcaacccgatgagactgagatgaaaccctgggtggctgccataggcatttttgtcttgctgaatgtcgctttcggcattcatcccctgcttggcctcatagccctggttgctaccgtagtgatggtgattagaagggctctacggcgcagaaggaggcgccgttga

SEQ ID NO: 13375 - RNA, 1833 nt, synthetic construct
  source 1..1833: mol_type = other RNA
atgaccgtccaacccggaagcctgactaggcagcagctgtacgacaggataagggagtcgagcaaggatgaggtcattttagaggagatgatccggcttggcttctggcctggagacgaggcccaacccaacttgccagctgagttaattaagaggcggggcgatatccaccgggaaataagtgagctgcacaaaaaagagaggctttggtcagatcctgagactgccttgaaggaaatgcacaagcggagaaaaaaggaggccctggctcggaggaaggagacgaaattgaggaatgccagaggcaggcatgatcgcgccctagcgtggcacgaacggcgtaagagcgacgtgctctacctcggtgagggagtgagcgccggactgcattctgatggcgttgcgaagcctctaaagccgggactcccggccttagggtcaccgaaagccttggctgaggctatggggatcccccttgccgaactgagatttctggccttcgacagggcactgtccagaatttcccattatcagagattcactatcccaaagaagaccggcggtgaacgtctgatctccgcaccaatgcctcgactgaagcgtgctcagtactgggtcctcgatgcgatcttagacaaggtggctgtgcacgaagcggcccacggctttgttccaggccgaagcattttgacaaacgccggtgcacatgtagggcgcgaagtagttgtgaacctcgatctgaaagattttttcccctccctcacctttaaacgggtgaagggaaagttcagagggcttgggtaccccgagcctgtcgctaccgtactggccctgctgtgtactgaacccgacgtggacgaacttgagctcgacggggagagacttttcgcagccaaaggaccaagaaggctgccacagggtgcaccgaccagcccaatgctaacaaatctcgtgtgcattcggctggacaagagactcgccgctctcgccgcgtctcttggattcacttacactcgttacgccgacgacatgacattttcggccagtggcgaaggggccgcgaaagtgagtgccctgctcaaatatgtgggagagattgtaacggccgaagggttcacagttcaccccgacaaaacaagagtcatgcggaggggtcggcatcaagaggtcaccggcttgaccgtgaacgaacgcgtggccgtgccaagagaaacactgcgcaggtttagagcactgctgcaccagatcgggaaaaatggtcccgagggacgacactggggcaaagcacgcgatgtcttcgacgcggctctagggttctcattttttgtgagaatggtgtcacccgccattggagatccactcatcgcagaggtgcgtagcctggctgctaggcatggacatgcgcctaaagcagtccccgagcctacagccttccgagccaagtctgcacgcggcgaagcacctctggctcgatggtggatacccgctgagcgaccggcacctgaaccagaagccattcttattgaaccccctaagccagcaccccgaccagcacaggccaatgctcctcgctccgctatcggcgctgctgctggtatgcgcgctcggatgcagcaggagggaccttccggcgcatggaaccaagggtctggtcggcagacggtggaggatgggtctatcggcagtgcatttcgcaggttgccccgccgcacctataagatcctcggcatcctgatgctatttggcttggtcgcctctgtttccccacgcttagctgcactggggctgatattcctgattggctatgttatcgccgaaagaaagaaacggtga

SEQ ID NO: 13376 - RNA, 1800 nt, synthetic construct
  source 1..1800: mol_type = other RNA
atgacagtcagaccaggctcactgacgaggcagcagctctatgatcggatccgggaatcctccaaagacgaggtcgtgcttgaggagatgatcagactcggcttctggcctggtgatgctgctcagcccgacttgccggcagcattaatcaagaggaggggagaaatccaccgagagatagcggatctgcacgctgaagaacggctctggcgtgaccccgagactgcattgaaggccatgcataagcgccggaagacagaggcactcgccaggagacgcgaaacgcgcttacgccacgcccaagggaggcatgacagagccctggcctggcatgctaggcgagggtctgaggtcctgttcctcggtcccgaggtgagtgcaggactacattctcacgcagccaggcggcctcttctgccaggattacccgatttggccacaccgaaagcactggccgatgctatgggcctgccgttggccgagctcaggttcttagcgtacgatagggccctcgcacggattagccactatcagcggttcacgattcccaaaaagaccggcggggaacgcctcatttctgctccaatgccgcggctcaagcgtgcccagtattgggtgctcgacgctatacttgcgaaagtgcccgtacacgaggccgctcatggcttcgttccagggcgcagcatcctgacgaatgccggagctcacgtgggtagagacgtggtagtgaacctggacctggaaaattttttccctaccctgaccttcaggcgcgttaaaggcaagttcagagggctgggatacccagagtccgtagctaccgtcttagctctgctgtgtactgaacctgacgtggatgagctggaactagatggcgaacgccttttcgccgctcgcggtcctcggagattgcctcagggtgcccccacatccccgatgcttaccaacctcgtttgcacccgcctggacagacgtctggcagctctggccgctagtctggggtttacttatacaaggtacgcggacgatatgaccttctctgcatcaggggagggagccgcgaaggtgagcgttctgctcaggggagttggcaccgtcgtagctgccgaggggtttacactacatcccgataagaccagagtgatgcgtagaggtcggcgccaggaggtgactggcctgacagttaacgaaagggtcgccgtaccccgagataccctaagaagatttcgtgcgttgcttcatcagattgatcggagcggaccagctggaaaacggtggggggttgcccgacacgtctttgacgccgcgttcgggttcgcctgctttgtgcggatggtgagtccagccactggcgaccctctggtgagcgaagtgagacgcctgtcagccagacacggcactgctcagagagcagtccctgaggcttccgcatttagagctcgcgcagctaggggtgagacaccccttgcccgttggtggtcgcctgctgaacgacccccacctacccctgagccaatccttctcgagagtcctgacccagccccatccactgtcccccaaagcgcaataggagcagcagctggcgcgcaaacagccgacagggatggggtgtggggacgaatgcccgacgacctgcctccaggaaaagccggcttaagccggattgtgtcaggcctccttactctagccgggggtctggtgctgtttgtcgccctcttgaggatctctcccccactggcgttgctgggagcccttgtgctggcaggcttgtacgcagccggcttttttcggcgacgatga

SEQ ID NO: 13377 - RNA, 1830 nt, synthetic construct
  source 1..1830: mol_type = other RNA
atgacagtgcaacctggcagcctcacccggcagcagctttacgataggattcgggaatctagcaaagacgaggtggtattggaagagatgatccgactaggcttttggcctgggaatgagaagcagcctaacctgcccgccgacctcattaaaaggaggggagagatccaacgggaaatcggcgagctctaccgccaacaacgcctgtggagagatcccgagtctgccttaaaggagatgcataaacgccgaaagaaagaggcactgctgcggaggaaagagacgcgcagaagaaatgccgctgccagacatgaaagggcactcgcctggcacgaacgccggaagaccgaaatactttatctcggtgcaggggtgagtggcggacttggagctaacgaacctgagcttggacgatctccacgtgatgggctgcctgaagtcgcaacaccgaaagccttagccgacgctatgggaatccccctaggggagcttagatttctcgcgtatgatcgggccctgtcacgggtgtctcactaccagcggtttactatcccgaagaaaaccggcggtgagcgtctgatctcagccccgatgcccaggcttaagcgtgcccagtactgggtcctggataacctactggccaaggctcccctccacgaggcagcacatggctttgtccctgggagaagtatattaaccaatgccggtgttcacgtgggccgagaggtggttgtgaacctggaccttaaggactttttcccaagcctgacatttcgccgtgtgaaaggcaagttcagaggcctggggtaccccgaggctgttgccacagtgctggccctgctgtgcaccgaacctgatgttgacgagctggacctggacggtgaaaggctcttcgccgcacggggacctaggagattgccacagggcgctcccacatcgccagcactaactaacctggtgtgtattaggctggataaaaggctcactgccctggccggatcattgggcttcgcatatacaagatatgccgacgatatgaccttttccgcgtccggggagggtgctgcaaaagtggccgtcctgctcaagatggtgggggagatcgtggccgatgaggggttcaccgtacatcctgacaaaactcgggtcatgagacgaggacggcgccaggaagtgacgggattgacagttaatgagcgcgtcgctgtacccagggataccctccgccgattccgtgccctcctacacggtattgataagcagggccccgaagggaagagttggggcgtagctagggacgtgttcgacggcgccctgggatttgccttcttcgtgcggatggtcacccccgaaatcggcgaaccccttgtcgcgcaggtaagagctcttgccgctcgacacggaggtcgggacgttgcagctccagccataagcgcatttagagccaaggcggcacgcggggaagcaccattggatagatggtggcagccagcagagcgtccagccccaaagcccgagccagttttagcaggagcagcccccgcgcctgctccaaatggaattagatctgctcctggtgctgctgctggaactgggcggccaagtcccgaagctacgtccgtctggggcccaggacctgctagatctgctccggagtcaggctccccgtccgtgactggtagtctgtggcgcttgagcataggcttgctgaagctggcggccctgttgatgctcttcagcgccgggatggtgttcgcgcctaggttggctattctgggcgtgttcgccctcattggcgtcttagcgtaccgctttatcaggcgagggtga

SEQ ID NO: 13378 - RNA, 1788 nt, synthetic construct
  source 1..1788: mol_type = other RNA
atgaccgaacccggaactcttacccgacagcagttgtacgaccggattcgcgaatcgtcaaaggacgaggttatccttgaggagatgattcgactcgggttttggcccccgggtgccgatcaaccggatgtaccagccgacttaattcgtagaagagcagatctgcagagagaaatcgccgatctacatagacaggaggccctttggagggaccctgaggctgccttgaaggaaatgcacaagcggaggaagaaagcggccctccagagacgcgcagaaaccaagttgcggaacgccaaaggacgccacgaacgagccctggcttggcacgagcggaggcaacaggagctgctttatctaggagacggcgtctccacagggttgcatcagaccggaacggccatggctccaaaggcaggactgccttccatagcttctcctaaagccctggctgaggcgattggagtttctctcagcgagctcagatttctggcctacgaccgcgcagtaactagggtaagtcactatcagcgattcacgatacccaaaaaggccggcggagagaggctgatatcagcgcccatgccccgccttaagcgagcacagtactgggttctggacaacctgttagcaaaggccgtggtgcatgatgcagcacatggcttcgtgccagggcggtccatcctgaccaatgcaaccccccacgttgggcgcgatgtggtagtgaacctcgacctgaaagactttttcccgacccttacattccgcagggtgaagggcaagttccggggactcggttacagcgaagccgtcgccacggttcttgctctcatctgtaccgagccagacgtggacgaactcgaagtggacggcgagagactgtttgccacacggggaccaaggagggtccctcaaggtgcccctacgtcacccgtcctaactaatgtgatctgctttaagctggatgcgcggctgagtgggttagctcgcgcgttaggatttacctatacacggtacgcagacgatatgactttcagcgccagcggcgaagctgccaaaaaagtgggggccctgcttaagtatgtgagagagattgtgaccgccgagggtttcgtggtgcaccccgacaagacacgcgtcatgcgccgtggtgcacaccaggaggtcactgggttgaccgtcaatgagagggtggccgttcctagggatacactccgcagatttcgggccctgctgcaccagattgagacaagcggccccgtgggtaaaacttggggcgctgctcgggatgtcctggatgctgctctcggcttcgcgtttttcgtgcgtatggtgaccccgtcctctggcgaggtgttggtcacccaggtcagggcattagcggctcgtcatggggctactccagttccagccgttgccccaagggactttagagtgaaagcagccaggggggaaacacccctgggtcgatggtggattcctagagagaggcctgcaccagcccctgaaccagttatcgtggcgcatgaagccgctgcacaagcagctgccgcaccaggtacatctcgggccacaagtgctggacaagcacagctaccccccgccttcacacctgctcctgctgctcctgccgctaaacgaggcgggaccctcgcaactatcggcaaatggatcttggggctgctggtctttatcgtactcatgggcatacaccccgtactgggcggactgttcatcgctgcggtggtcggctacatggctactcgtaagagagggggcagagattga

SEQ ID NO: 13379 - RNA, 1572 nt, synthetic construct
  source 1..1572: mol_type = other RNA
atgacggaaactgtttcgcccggtactatgacaaggcaggaactgtacgacagaatacggcagtcaagcagagatgaagtgatactcgaggaaatgatccgtttaggcttctggcctgatgaaggagcacctgctcccgccgcagagacgattcgagagcgggcagaagccatgagagagctcagcgagctgcagagacagaatgccacactggccgaccctgttcgcgcgctaaaggaaatgcacaagcggcggaaagccgaggcgatggctagacgacaagaaacaaaacgacgtaatgcggaggctcggcagacccgtgctttcgcatggttcgagaggcgaaagcgcgacgtactctacttaggggaggatgtctcccccggtctacacagccgcaccacgaccatcccacttcacgacgggctgcccccattggctgacgctaaggcgctcgctgacgccataggagtcccgctcggagagttgaggtttctcgcttttaaccggaaggtggcgagtgtgaatcattatcagagatttaccatccccaagaaaagtggaggcgagcgcctgatttctgcaccgatgcctagactgaaaagggcccagtactgggtgttggacaacatcctggccagagtacccctgcacgatgccgcccacggttttgctccacaaaggtcaattctgacaaacgcccggaatcatgtgggtagggacgtagtgattaatctggatttaaaggacttcttccccaccctgacatacgcacgcgttaagggccttttcgaagccctggggtatgctgaggcggtcgctattcctcttgctctgttgtgtacagaacctgtggtggatgaggtgactctcgatggggagcgccatttcatcgccgacggacctaggctcctaccacaaggcgcaccgacctccccagccatcactaacctcatctgcagacgactggatcggagattgatgggccttgctcgcacactggggttcgtgtattctcgttacgccgacgatctgacctttagcgccagtggcgaggccgtgaagaagattgggacgctgctgaaagctgtgcacgggatcgtcgaggcagagggctttaaggtgcatccagataaaactcgcgtgatgagacggtcaaccaggcaggaggtaaccggccttactgtcaacgaggccctggccgttcccagagacttactgagacggtaccgagccgtgcttcagcaggtcgaaaggcatggaccagacggaaaacacttcggccctggcaaggatgtgattcggtcccttttgggttttggtcacttcgcggtcatggttgaccccgaatctggcactcccctcctgcagagggcacaacgcttggccgcccaatatgcacctacacgctctgaaaggctacccacccgtgcagcctttcgaaaagctgcttccgcagggcagacacctcccggaaggcagtggactccagcagagcgcccacctccagcaccagatccggttctcgtcgccctggctcggcaggaagaaaaaaccagggccgctcagtga

SEQ ID NO: 13380 - RNA, 1815 nt, synthetic construct
  source 1..1815: mol_type = other RNA
atgaatgagacagtcgccccggggactctaacaagacaggagctctatgatcggattcgtcagtcttccaaggatgaagtgattctggaggaaatgattcggctgggcttctggcccgatggtgaagatgccccagcccctgcagccgacgcaatacgaggacgagccgaagccatgcgggagttaaccgagctgcagcgccagaatgccacccttgccgatcctgaaagggccctaaaggagatgcacaagagacggaaagccgaggccatggcacggagacaggagactaaacgtaggaacgcagaagctcgccaaagtagagctttcgcgtggtacgaccgccgcaaacgcgacgtgctctacctgggcgaggatgtgtctttggggctgcatacacgcacaactacaaccccactccgtgacggactgccacccttagcagatgccaaggccttagccgacgctatgggcgtccccctcggagaactgcggttcctcgccttcaaccgcaaggtcgccagcgtcaatcactaccagcggtttaccatccccaagaagtctggcggggaaagattgatctcggcgcccatgccacgactcaaacgggcacagtactgggtgctcgataacatcctggcacgcgtgccgttgcatgaagcagcgcacgggttcgctgcccagcgtagtattcttacgaacgcacgcaaccacgtcggcagagacgtcgtgatcaatttggacctgaaagacttctttcctaccctgacctatgcgagggtgaagggcctgtttgaggcccttggctatgccgaggctgtggccattcccctagccctgctgtgtacagaacccatggtggacgaggttgcactggacggggagaggcattttgtagccgatggacctaggcttctaccacaaggcgctcccacgagcccggctataactaacttgatctgccggaagctcgataggaggctggtgggactggcccgaacccttgggttcgtttactcacgatatgcggacgaccttacgttctccgggagcggcgaggcggtgagaaagatcggcactctgttgaaggccgtacacgggatagtggccgcagaggggttcacagtacaccctgataaaacaagggttatgcggaggagttcccgccaggaggttactggtctgactgtaaatgaagccgtggcggttcctagagacttgctgcggcggtacagagctgtactgcagcaagtggaacgccatggtcccgcgggaaagcactttgggcccggaaaagacgtcatcaggtcactgttgggttttggccactttgcagtgatggtggaccccgagtccggcgcacctctactgcagagggccttacggctcgcccctcagcatgcacctgcacgtagcgctcgcagacccacaagagctgcctttaggaaggctgcagctgctggacagaccccacctggaaggcagtggaccccagctgaaagaccacctccggctccagaccccgtgcttgtcgcactcgccaggcaagatgcaaaaaaacgagctgcccaagcacgagccgctgctccaagcccttcaaggcctccaaatgtgccacccccaccaccaggcgttaccagacctgatggccccccacctgcagcaagacccgctactgctccctctggaaagcgtccgtggtttgttaccgccctggtcattctgctcgccctcgctctgcttcctcttccgggtggacccgctatggcgggtgctttactcttcctgtatttctcccgatggtggaaacggtga

SEQ ID NO: 13381 - RNA, 1425 nt, synthetic construct
  source 1..1425: mol_type = other RNA
atgattcggctgggcttctggccagatggcgaagatgcccccgcaccagctgcagatgtgattcgggcccgcgctgatgccatgcgagaactgacggaattgcagcgccaaaatgccatgctaggagatccccaacgtgccctgaaagaaatgcacaaacgacgaaaggcggaggctatggccagacggcaggagacaaagcggaggaacgctgaggctagacagtctagagcctttgcatggtatgaccggaggaaacgggatgtactatatcttggtgaggacgtctccaggggtcttcatgcgagaaccaccgccactctgctccgcgacggtcttccacccctggctgatgccaaggccctggctgatgctatgggcgttcctttgggagagttgagattcttagcctttaatcgaaaggtcgcaagtgtcaaccactatcagcgcttcaccatcccgaagaagagcggtggagaacgactcatttctgcccccatgccacggttaaaaagggcacagtactgggttctggagaatatcctcgcaagggttccccttcatgacgccgcccacgggttcgcacctcaacgttcgatcctgacaaacgcccgcaaccacgtggggagggatgtcgttatcaatctggacctcaaggatttcttccctactctcacgtatgcccgggtcaaggggctgttcgaggctctgggttacgcagaggctgtagccataccattggccctgctgtgtactgaaccgatggtggaccaggttgccctggacggagagagacactttatagccgacggaccaaggcttcttccacagggggcccccacttctcctgctattaccaacctgatttgcaggaaactcgacaagaggctagtcaggctcagcagagtcctcggcttcgtgtacagtagatgcgcagacgacttgacctttagtggctccggcgaggcggttaaaaagatcggcacattaatcaaagctgtgcacgggatcgtggcagcggagggattcaatgtgcatcccgacaaaaccagagtgatgcgcagatcctccagacaggaagtgacagggctgaccgtaaatgaggctgtggcggtgccccgcgatctcttagtggcactggcccgccaggacgaaaagaaacgtgctgcacatgcacgagtaaccgccccgattccctcacgggtccctaacgtgcccagcccacctgctgatgccactagggcagcgggccctcaagcagctcctgctacaggccctgccacagccccaagcaagaagcgccagccctggtttgtgactgcgctggtgatcttggtggccctcgcatttctgcctttgccgggagggccagctatagctggcgccatgctttttctgtacttttcacgttggtggcggcggtga

SEQ ID NO: 13382 - RNA, 1836 nt, synthetic construct
  source 1..1836: mol_type = other RNA
atgaatcagacagttgcccccggtactctaacccggcaggagctctacgaccggattcgcgaatcctccaaggatgaggtgatccttgaggagatgatccggttgggcttttggccagacgggacagctgctccctctccagcagcagcagctatacgcgagcgcggcgaagccatgcgagaactgggcgagttgcagaggcagaacgcactgtggtccgatcctgagagagcaatcaaagaaatgcataaaaggcgtaaggccgaggccctcgcacaacggactgaaacaaggagaagacatgcacaggcccgacaggacagagctgaggcctggcacatcagacgtcaaagagaagtgctgtacttaggggaaggagtaagtgccggactgagcgccgacccaatccgacgaagtctgttgcccggtctgcccgatattgccgacgccaaggccctcgctgacggcattgggattccgttaagcgagctccgtttccttacctactctcgcaaggtgtcatctgtgagccactatcagagatttcgaattcctaagaaaaccggaggcgagaggcttatcagcgctcccatgccacgcctcaaaagggctcaatactgggtgctcgataatattcttgccagagtcggactgcacgaggccgcccatgggttcgtgcctcagagaagcatcctgacaaacgctcgcaaccatgtgggcaaggatgtggtggttaacctggaccttaaggattttttccccacactgacttacgcccgggtcaagggaatgttcagaagcctcggatatgcagagaaggctgccattcccctggcgcttctatgcactgaagctaaagtagacgaagtgcacctggacggtgaacggcacttcgtgggcgatggccgacgtttgcttccacagggtgcccccacctcacctacgatcaccaacctgatttgccgctatctggatcggcggctcgatggcctcgctaatgagctgggcttcacgtactcccgctacgccgacgatctcaccttcagcggatcaggggaggccgtcagaaaaatcgggacactgctgaaagcggttcagtcgatagtcactgccgaagggttcaccatacatccagacaagacccgcatcatgcgccggtccggacatcaagaggtgacgggcttaacagttaatgagcgggttgcagtcccacgtccactcttacggaggtatagggctgtactgcagcaggtagagaaacacggaccagctgggcgacactttggccctggcaaagacgtcgtgcggagcctcctggggtttggtcagttcgcggctatgattgatccggacaaaggtagggcactattagaacgagcaaggaggctggcctcacagtccacagccaattctaagttgagtcgcagtggaggacaagctgcctttcgggctgccgctgcagctggtagagcacctgccggatgtcactggacccctaccgaaaggactgctcccgcgttggatccggtgctagcagccctcgaacgcgaggaggcgaagaaggctgagcaggcccaaaggaaggcacacgcttctcagcaggcgatggcccagtctgcgcttaggcgtccttcagcagaacccgcagggcaagcgaggggtcaagcacaggggagttccgggcagcctgccagaaaaaaactgagatttacccctaagcggctgctgatgatcgcggccatcgtcatattcccgactttgattcccggcgttggcccatttatcgccggcctgcttctgtatttgtatctgaggtggatgtggaagcagggctga

SEQ ID NO: 13383 - RNA, 1635 nt, synthetic construct
  source 1..1635: mol_type = other RNA
atgtccatcctgcctgagaacacgcagccccggactaggcaggaactgtatgatctcattagacagacttcacgggacgagttcgtgcttaatgaaatgatcaggcttgggttctggaagaagaacgaaggccagccgagcctccctgaacagctcattaggcaagagacacagctgcaccaagaattaaagacccttgtttctgagaaaaagagactcgatgaccagcagaagatgctcaaggaaatgagaaaaaagcggatgttagagagtcgtctgaaacgcgaagagacaaaaaaacggcgcgagttggagaggcaacaaaaagctgagaactggaagaataagaaaaccactgaaatcgggtacctcggagaaaatgtcagtagcggcctgaattttactgcctccaatccagagaaactgtctagatacaatatcccgttttttaccaacgcagtgtccctggcgcaagctctgaacatttccgttggagaactgagattcttagccttcagtagagaggtcagcaaggttaatcactaccaccgattccagattcctaagaagaccggagggcagaggctaatcagcgcgccaatgcctcgattaaaaaaggtgcaaacctggattctggagaacgtgctggaaaagattgagctacacacgagcgctcatgggttcgtggcatcacgcagtattgtgtcgaacgccattccccatttgaaggccgagacagtcgtgaaccttgacttgaaaaacttttttcctactctgacatacgcccgcatcaagggactgttcctgggcctggggtactctgaagccatggcaaccttgctgggtctgctctgtacggaacccgagacagacgcagttatcctggacaaggaaacatggttcgtagcctctggggaacgctttttgcctcagggatccccagcctctccagcgctgacaaatatcatctgcgccacccttgacaagcggttgcagggcctcgctcagaaactaggatttgtttacacacgatatgccgacgatcttactttttccgccaccggcgaaggcaccaagaacatccacaagataatttcactcacacagaaaatcgtcgaagatgaaggcttttcagtgcaccccgataaaaccagaatcatgaggaaaggaagcaaaaaggaggtgaccggtatcgtcgtgaacgagaaaccctcggtagataggacaactttgcgcaagttccgggctcttctgcatcagatggaaaaagaggggttcgctggtaagagctggggtcatacccccgatgtgctcgcagcagtggagggctatgctaattttgtcaagatggtggatgctgagaagggtgacaagtttaagcaacagatcaaaggcataattgcaaaatggggcgactccatacccactcctgtccgtaaggtatatcccaaaaaagagaaacagactgtcagtccagtattcgagacaatgacaatactgcctaccagcgaaacccagatctctgagaatcaggtggtgataccgcaggttacgattccagagactgccaataaggacacttcaaacgagaagccagaggagaaaaaaaccttctggaagacctggaaaaagtga

SEQ ID NO: 13384 - RNA, 1578 nt, synthetic construct
  source 1..1578: mol_type = other RNA
atggccgaggagactccacctcagccacgcactcgacaggaactttacgatcaggtgcgccagagctccagagaagccgttacgcttagggaaatggctcgcatgggtttttggcctaaaggccaagggatccctcccattcctcaggctctcctcgagaagcagcaagccctgcaacaagagctgcagcccctggttgagcagagccgcaagatggaggaccgcgtgcggatgcttaaggaactgcggaaaaaacgcatggcagaatcaaggcagaagaggaaagagactaaagagcggcgtgagcgggaacgacaggccagacaagccgcctgggagcagcgtaaaacacatgagatactgtatttaggagagggtgtctctggcgggttgagtcagacggacgacgacgcccagaagctgcagcactatcagttgccgagatttgaaaatgcaaaagcactcgcggaagacatgggcatcactgtgaacgcactcaggttcctggcatataacagacctgtgtccacactgacccattaccagagattcaccatgccaaagaagactgggggccaacgcttgatttccgctccgatgccgagattgaaggatgcacaatactgggtcctccatcacctgctgcagctgctcccagtgcacgaggctgttcatgggttctgcgctgggcgatccattgtgtcgaatgctcggcctcacgtgggcaggcaggttgtcctaaacttcgatctgaaggacttttttcccacactcacgtacacacggatcaaagggctgttctgcgctctgggttatgcagaggccatagcgactcccctggcgctgctttgtaccgagccagataccgatgaagtgaccctggatggtcaaacgtattatgtagcaaatggagaacgataccttcctcagggcgctcccacctcacctgccttgaccaacctaatttgtttaaggctcgacagacgccttacaggactggccaccaaactgggcttcacttacacaaggtacgccgatgatctgacattcagcgccgacgccgaaggcatgaaacacattaataccttacgcgtcatgttgcacagaatcgtggaagaggagggctttcaggtgcaccccgacaagtcaagggtcatgcgtaagggctctaagcaggaagtaaccgggattgttgtcaatgagaaacccggtgtagacagggccaccctcagacgtttccgggctctattatttcagatcgagaaggacggaatcgcaggaaagcggtgggggacatctccagatgtagttgccgccatccatggatatgccaattttgtcgccatggtggatccggagaaaggcaaggctctccaagagagggtggctcggataattgcgacagtggcacctcactttaagaaaagaccccgaaagacctacccagcgcggagcggaaagtggcttcagacagcatctagtgaagccagcagctccgaagctagtactgactcaggaaacgtgaacgcgatcccagaaccccccgctgccaagaaaccatggtggaaattctggtga

SEQ ID NO: 13385 - RNA, 1629 nt, synthetic construct
  source 1..1629: mol_type = other RNA
atggccgagcaaagcaatcttccagaaggcaccaggcctgccgaccggcaagaactgtacgacctgatcagacgaacgagcaaagacgactttattctcagggacatgaagagactaggattttggcccgacgacgccggccagcctactttacccgagcaggtcatatttcgggagactgatctgaacagggaactgagtgcacttctaaccgaaaaacgcagactcgaagaacaggaggccatgctgaaggagctgaggaagcagaggctggctgagagtcggctaaaaagagaagaaaccaagcagaaacgggaacaggcaaggaaggataaggcggccgattggcagcggaaaaaacaatctggaatcctgtacctgggtgaaggggtcagcggcggcttgaacgagacagcagctgacccaggcaaactcgccgggctgaatttacccgtgcttaccgatgctgccagcgtggctctcgctatgcaggtgcctgtgggtcagttgagatttttagcattctcgcgtcaggtgtctagaactacccactatcaaagattttatgtgccgaagaagacaggaggagagcggctgatttcagcccccatgcccaggctcaaggctgctcaggcctggatcttggctaatattttggatcgcgttccctcccacgaggcagttcacggcttcctgcccgggagatccatcgtgacgaacgctgcccctcatgtaggggcgggtgtggtgattaacctggatctgaaggacttcttcccttcaatcacctaccgcagagttaagggcgtgttccgcgccctcgggtattcagaatccgtcgcgacaatcctgggattattgtgtactgagccccaggttgatcaagccgagcttgatggggagacatggtatgtagccactggagagcgtcatcttccgcagggcagcccggcaagtcctgcaatcacaaacatactgtgcgccacacttgaccgacgactccagggcctcgcacgaaaaaggggatttagctacacacgctacgccgatgatctgaccttctctgcgtctggggagggaactaagaatatcaacattctcaagaacgccgtaaaagcaatcatcgaatccgaggacctcactctgcacccagacaagacccgcattatgaggatggggtcacgaaaagaagtcacgggcgtcgtggtgaatgataagcccggtgtagaccgcacaaccctgaggcgtttccgggctctgcttcatcagatagagttgaaaggcccacagggcaagaagtggggacactctgcagatctgctggctgctatagaaggctacgccaatttcgtgttgatggtggacgcggagaaagggaagaagctcaaagcacaggtcaaggctattgcccagaaatatggtgacgctatgccacgccggcctcggaaggtctaccccaagaaggagaaaccggccgcaccaacacctgccactgcaacggtggccgctttacccccaacccctcctcctccaccagttccagcccaaccgcccgttccaggtcctgatgccagtgctcccgagtccgcggagccaaaaaaaacctggtggaagctatggaaaaagtga

SEQ ID NO: 13386 - RNA, 1608 nt, synthetic construct
  source 1..1608: mol_type = other RNA
atgagttctgacagcgagccactccggcccgcgactagacaagagctgtacgaccgcttgcgtcaagccggaacgcgggatgctttcttattggaggaaatgaaacgcctagggttttggccatcaaatcacgaagtcccaaacgtgtccgaacagtttattctgcgagaggctgatcttgcgagagagctgagagctctgtatagtgagcacagacgtctggaggatgaagccgccatgctgagagagctcaggaagcagcggttagccgagtccaggcagcgacgagaggtcaccaagctgcggcgcgagcgtgaaagaaaggaccgcgccgaccagagaaaaaaaaggcaggaaagcgagatcggctatctcggcgaaggcgtttctgggggcctaaaccatcctgaagccgatgaagcccggctcgcacggtttcatctccccgtccttaccgacgcacagtctgtggcaggctcactcggagtaagcgtgggcgaactgcgctttctggctttctccagagcagtgtccagaaccaaccactaccaacggttctacctgccaaaaaagaccggagggaggagactaataagtgcaccaatgccaagactgaaggccgcgcagtactggatcctggagaatatcctgcggctggtccccgtccatgatgcagcccacggttttgtcggaggtcggtctatagtcagtaatgctcgcccccacgtaggggcgcaagttgtgattaacctggaccttaaagatttctttcccacggtgacctaccctagggtgcgcggtgtgtttcgcaaattaggatactcggaagccgccgcaaccatactggccctactttgcacagagcccgatgtggaccaggccgagcttgacggcgagacttggttcattgctgacggggaacgacatctgccccaaggggctcctacatctcctgccctcaccaacttgctctgtaccaggctggataggcgcctcgctgggttggctgccaaacttggtttcgcttatacgcgatatgcagacgacttaacattcagcgcgagcggcgagaggactaaaaacgtgaataagttgaggtcattggtgcatctcatcgtggaaggcgaggatttccgtgttcaccccgataaaactcgggtgatgaggccaggctcccgtaaggaagttacagggataattgtgaatgacaagccgggtgtggatagaaccacacttcgaaagtttcgagccctcttgcaccagatcgaacaggagggtattgccggaaagcgctggggacacactgatgacgtgctggctgctatccagggatacgcgaggttcgtagcaatggttgacgcacagaaaggccaggtattaacagctagggttaaagccatcattgaccaaatcgaacctgctttcgccaaaaggccgcggaagacatatccgcagggcgcacgccggtggatcaagaagatggtcgtggccgagactcctactgcctcaggcgttcccgccaacccaagcgcacctacccccaatcctgagaaacctcagggaattgtctggaagctgctggggaagctggggggaaagaagaagtga

SEQ ID NO: 13387 - RNA, 1551 nt, synthetic construct
  source 1..1551: mol_type = other RNA
atggcagaacaaagcaacctgccagatggagctaggcccactaccaggcaggaactctatgacttactccggcgtgatggattaaatcgcgacagctttgtcctccaagacatgaaacggctgggattttggccagacacaaaggatcagcctagtgttcccgaacaattcctgaacagggagtcccagctttaccgtgagctgaatgcattggtgactgaaaaacggcgcgttgaggatagggagcagctgctgaaggagcttcggaagcagcgcatggcagagtccagacggaaacgcgaggagactaaaaagcggcggatagaggctgcaagactccgcgcggagaactgggagaaaagaaaggaaaccgaaataaactacttgggcgaaggcgttagtggcggtctgaacgatactgccacagacactgagcgcctcgccctggcacagcttccagtcctcagcgaccctgcagccattgcagctgcgatgaatatacgagtgtcggagttacggtttctagcgttctcacgtgccgtatccaagacatctcattatagacgattcctgatccctaagaaaacaggaggcttccgacagatcagtgcgccaatgtacagactgaaggatgcccagtactggattcttcaacagatcctggataaagtgcctctgcacgaggccgctcatgggttcgtgcctgctcggtctatcgtcagcaatgccaggccccatgtgggagccggtgtagtgattaatgccgatctgcagaatttctttcctagcatcacatatcccagggtgaaaggtgtgtttaggaaacttggctattctgacgctgcagccagtaccctcgggctgctctgcactgaaccggctattgatgaagtagtgctggacggggagaattggtttgtggctgccggcgaacgttttttgccccaaggggcgcccacttctccagccattacgaacatcttgtgtagacagatggaccggcggctgcagggcttagctcagaagctcggcttcacgtatacccgatacgctgacgaccttaccttctcagcctccggcgaaggggagaagaaagttaacttgttgctcaagttcgttcgccagatcatcgagaacgaggggttcgtccttcacccagataagaccagagttatgcgaaccgggagaagaaaggaagtgacaggaattgtcgtgaacgaaaagcccggtgtggatagaaagaccctacgcaggtttcgagcattgctgcaccaactcgaaacggaaggccccgcgggtaaaacctggggacacactcccaacctgctggccgccattgaggggtatgccaattacgtctttatggtcgaccctgagaagggagccgccctaaaggcccaggtgagacaggtagccggcgctctaaccagggctcctaggaagaggtacccggcacgcaaaaagctggcaggatcagctcctctgccagaaacccccacagctgcaccgacagagcaggagtccgccaaaccatggtggaaattctggtga

SEQ ID NO: 13388 - RNA, 1404 nt, synthetic construct
  source 1..1404: mol_type = other RNA
atgcctgatgagcaaccccagacccgacaggccctgtatgataggatcagggagtccagtaaatgggaagtgatactcgaggaaatgatccggtttggcttttggcccgctgagggtacccttccggatgaccctgccgacgaaattagacaaagaggcgaactggaacgggagttaaaagccctcagaacagagcaggcccggcttaagaatcaggctatgatgctcagggagatgaggagaagacgtctcgaagcaagccgccttaagcagaaggaaaatagagagaggagagaacgggaacggcaagagcgagcagcagcctggcaggaaagaaagagccgcgagatcggatacctcggcccaggagtctccggtggtttacaggctgtggagagcgacacagataggctggagtcttttggcctgcccgtcctccataccccagctcagctggcagaagctatgggcctaagagttggggctttgaggtttctcgcattcagtagggatgtgagcaggacttctcattacgtgagattcaagatgccgaagaaaactggcggggaaaggctgatttccgccttgatgccccgactgaaacaggcgcagcggtggattctagaccacctgctggtgcggcttacccctcacgatgcctctcacggattccgccacgggcggagtattgtttcaaacgcccggccacataccgggtgtgcagttgtggtcaacatggacatgaaggatttcttcccaacggttgactatcccagggtgaaaggcttttaccgcgccctcggatactctgaggccgtcagcaccgtattggctctgctgtgcaccgaggctgaaacagaggaagtggtgctggatggcataacttggtatgtcacgttaggcgagagacacctacctcaaggtgctcccacatcgcctgcgatatccaatcttatttgccgccgactggatcaacgcctgtcagggatcgcggggacactcggtctgacgtatacacgctatgccgatgacttgaccttttcagctgaagccgcagacgcccctatgatcggtaagttgctgcgtcagacccgctttgtcgtagaggccgaggggttcgagctgcatcccgctaaaactcgcgtgatgcgacggcaccagcgtcaggacgtaacaggggtcgttgtgaaccagcaacctgccgtggcgaggaagactctgaagagattccgcgcgttgctccaccagatcgagactactggcccagacggaaaacattggggcggaaacccgaacgtgctgcactcaattcagggattcgcaaattacgtatacatggtggacccagacaaaggagcagtgcttaagcagcgggttcagcgaatcttagcctcccaacgttga

SEQ ID NO: 13389 - RNA, 1404 nt, synthetic construct
  source 1..1404: mol_type = other RNA
atgtcagaggaacagccacaaactcgccaggccctgtacgatcgcattagagaatctagccttggggaagtcattctgggcgaaatgatcagacacgggttctggcctgcggagaataaaataccggaggatcctccagaagaggcacagcagagaggggagctggagcgagaactaaaggccctgaggactgagcaggcccgactcaagaaccaggccgccatgctgagagagttacgcaggagacggcttcaagcctctaggttaaaacagcaggagaatcgggagcggcatgagagagagcgacaggctagagcagctgcctggcaggaaaggaaggcccgggatatcagttatctgggcagtggggtgagcggtggtctgcatggaaccgaatccccggccgcacgtctagagcagcttggtctgcccgttttccacaccccatctcagctcgctgaagccatgggtcttagggttgggaccctcagattcctggcattccatcgggacgtgagtcgcacaagccactatatacggttcaaactccctaagaagaccggaggtgagagattgatatccgcaccaatgccccgtctcaaacaggcccagcactgggtcttgtcaaaccttctggtcaagctcacctcacacgatgcctcacacgagttccgccatgcgaggtctttggtgaccaacgcgcaaccacatactggccaggctgttgtcatcaacatggacatgaaggactttttccccactgtgagttaccctagggttaaaggattttttcaggctctgggatactccgaggcagtcgggacagtcttagggctgatttgcacggaagccgagacggaggaagtggtcctggatgataccagctggtacgtggcactaggcgagcgacacttaccgcaaggcgcaccaacatctcctgccattagcaatctgatctgtcgacggctcgaccagaggctgcacggtattgctcgtaaatttggaatgatctacactcgctatgcggacgatctgacgttcagcgctgaagcagaggctcccgccgctatcggcaaactgctccggcagacacggtttgttgtggaagctgaaggatcccagttgcaccccacaaagacccgggtgatgaggcatcaccaacgccaagacgtaacagggggcgtggtaaaccaacagcctgccgtagcacgcaaaacccttaaaaggtttcgcgctttgctgcatcagattgaaacaactggacccgacggcaagcaatggggaggcaatcctaacgtgttgcattccatccagggctttgcgaattatgtgtacatggtggaccccgacaagggcactgccctcaagcagcgtgtgcagagaatcctggctatgcaatcgtga

SEQ ID NO: 13390 - RNA, 1044 nt, synthetic construct
  source 1..1044: mol_type = other RNA
atggtagtgaagcatcaggcaacaatccctaggctcactgagggctccatcgagcaactcaggaaacgaggactgcccgaatgtaataccgatgaagagattgcattagccatggggatttcagtggaaaagctgcattttctggctggtgatagatccatcagttctactagtctgtattcccggttccagatcagcaaaaaaaccggcgctgcccgcacaatcaccgcacctactcccgagcttaaggctgcacaacgttggatcctgaagcacatcttggataagatcgagatccacgacgcggcccatggtttttgccgagacagatctattgtgactaacgccacgccgcacgtgggcagagatgttatcgtgaagctggacctgcaaaactttttccagctcatcacgtataaaagggtcaaagaactcttccatggctttggctactctgaaaccgctgctactatatttggcttgatttgcacaattgcaaccactaacaacagcaataaaacgagctgtaagaacattgagaagaggcacttaccagaaggggcgcccacatcacctgctataagcaaccttgtctgcgaccggctggatacacaccttaccaagcttgccaataatttagggttccgctacacaagatacgcagacgacctgacattctcttgttacggggccgctcacaaggtcgacaagctgattcaagaaagtaagtccatcgtgactcaggagtcgtttaccgtaaattccgataaaacacaggttttgagcaaatctgtgcagcagattgtgaccggaattgtcgtcaatcagcagttgaatctctcacgcaaaaccctgaaagccttccgggctactctatatcagatagagcgcgaaggactgagcggaaaaaagtgggggaacagcaacaacctcatcgccaccattaccggtttcgccaattatgttgccatggtgaacccatcaaaaggagccgagttcctagcgagtgttgagcgtataaagcagaagtgcgaccggtcctga

SEQ ID NO: 13391 - RNA, 1047 nt, synthetic construct
  source 1..1047: mol_type = other RNA
atggttgtaaagcaccaggcaacaataccaagattgatcgagggaagtatcgaacaactgcgcaaaaaagggtttcccgagtgtaacaccgacgaagagattgctatggccatgcggataagcgtcgaaaaattgcgattcctggctggcgatcggaacttaagctcaaattccctgtattccaggtttcagatctttaagaaaactggcgaggctaggaccatctcggcccctaccccagaacttaaagccgcgcagcgatggatcctgaagcaaatcctggaaaaaatcgagattcatgatgcggcacacgggttctgtcgtgacaggtcaattgtgaccaacgcctccccacacgtcggtaaagatgtgatcgtcaagttagaccttcagaacttcttccagtccatcttgtacaaacgggtgaaggagttgttctgctcttttggatatagcgaaacagccgccaccatattctctctcatttgcacggtaacaaagatcgacattaatggaaagaacagctgcaacgatatcgagaaacgccatctgccccaaggctccccgacttctcccgctataagcaatctagtttgcgatagactggatactcacctaaccaagcttgcccacaacttcggcttctgttatacacgctacgctgacgacctgacattcagcagtttcgagaagaccagtaggcaggtcaacaacctgattcatggctctaagctcattatcactgaggaggggtttacggtgaatcctgacaagattaaagtgctttcaaagtccgtccagcaggagatcactggtataatcgttaatcagcagctcaatctgtctcgtaagacactcaaagcctttagagccactctgtaccagattgaacaggaaggtctgtcgggaaagaagtgggggaactctaataatctcattgcagccatcaccgggtttgctaattacgtggcgatggtgaaccctagtaaaggcgcagagtttctcgcatcagtggaaagaattaagcaaaagtgtgaccggagctga

SEQ ID NO: 13392 - RNA, 1047 nt, synthetic construct
  source 1..1047: mol_type = other RNA
atgaatatacagccccaagtgacaatctcacgcctgactgagggatcgatcgaacaacttaggaaaagaggcctcccagaatgtaatacagatgaggagatcgctttagctatggggattggcgtggaaaagctgtatttcctgaccaacaagtatcccacatcctctaccagccactatttccggtttcagatttccaaaaagacaggtgaaacccgtaccattagtgccccctcacccgagctcaaagctatacagaagtggattttgaaacatatcctcgagaagatcgaaattcacgatgccgctcatggcttctgcaggaacagaagcatcgttacgaacgcccgaccacacgtcggcagggatgtcatcgtgaaacttgacctgcagaattttttccagagcatactctataagagggtcaaagaactgttctgctccttcggatacttcgaaaccgctgcaacaatttttagcctgatctgtaccgtggccgaaatcaacgtgaacaataagatcaactacaaggacacggagaaacggcatctgcctcagggatctccaactagtcctgctattagtaatctcgtatgcgatcggctggatacttatctaacaaagctggcaaataacctcggattctgctacactcgctacgccgacgatctaaccttttcaggcttcgagaatgcctctcacaagattaacaacttaattcacgagagccaattgataatcactgaagagggttttaccatcaatccggacaaaattaaagtcctgaataagtccgtgcagcaggaaataaccgggataatcgttaaccagcagttgaacctttcaagaaagaccttaaaggcgtttagaacgactctgtaccaaattgagcaggagggtttgtctgggaaaaagtggggaaatagcacagaccttattgcagcgatcactgggtttgcaaactacgttgccatggtaaatcctagtaaaggcgcagagtttctggcctccgtggagcgcatcaagcagaaatgtgaccgaccttga

SEQ ID NO: 13393 - RNA, 1065 nt, synthetic construct
  source 1..1065: mol_type = other RNA
atgtccccatcagatgagggcgatctgaacagactttggagcaaaggactcccagaatgtaattctgaagcggaaattgctctcgtcatggagatgagtattgagaagcttcgttccctggcttttaattacccgacatcctccaccacaaattatcatcgctttcagatcctaaagaaacccggggagtcacgagccatttccgctccgatgagtgacctgaaagttgcccagaagtggattagcaccagaattttagaaaaaatccaggttcacgacgctgctcatggtttccggcggaaccgaagcatcgtcaccaatgcaaaaccacacgtgagtgccgatatcatcgtcaaaatagatctccaggactttttcagatccatcagttatcaacgtgttaagaagctgtttctcgatgtggactactccgaaactgccgctaggatttttggactgatctgcacagtcaacgaaactgaggagatcgaaattgacggcaagattaattacaagaccatcggcaaacgccaccttcctcagggatcacccgcctcacctgccatctcaaacataatatgctacgatctcgacaggagattatctcaggtggcccaggagttggggttctgttacactcggtatgctgatgacctgaccttctctggcagtcgggacgtgaaaagcaaaattagcaagctgataagcgagacaaggaccctgatcgagtctgagggattcacgataaacccaaacaagactcaaatcctgggcacttctgtgcaacaaaaggtgacgggggtcgtgattaacaagaagttgaacgtagcaaaaaagactctgaaggcattcagggcgaccctgtatcagatcgaacgcgaaggtcttgcaggcaagaggtggggtaactctaccgacatcatggccgccatcacagggttcgccaattatgtggcaatggtaaatcccaataaaggagtggagctattgacatcgataaaaagaattgagcagaagtacgcgcctcctgaaagcccccgctttaccattgaggaggaattctga

SEQ ID NO: 13394 - RNA, 954 nt, synthetic construct
  source 1..954: mol_type = other RNA
atgtataatacggaggccgaattagctttgagtatgaacatctccgtgaagcaattaaggtggctggcatttaaacccttcacctacccagtgattcactactcccggtttcaaattgccaagaaaacaggagagactcggacgatttacgctccaaaaccttatctgaagacagcacagatctatatcctcaagaacatcctggataacctcgctgttcatgatgctgcacatggcttccgccgtcaccggtcaattatcactaatgcccagccgcacgtcggagccgacatcataattaagctggaccttgagaacttcttctcctcaattacttacaaacacgtgcagaagcttttcttgtctctgggttacagccagtctatcgggacacttctttctctcatctgtaccattaaggacgttgaaacttgtcacccacgatgcttacctagtggaagccccgcttctcccaccatcagcaacctagtgtgctacaatttggaccagaatctctcacagatagcctccgatctgggctttacctatacacgctatgctgatgacctgacattcagcggcaaaagagacagagcgaatataagcacactgatcaagcaactgctggccgtgattgcgcagttcgggtttaagatcaaccccaacaagatccagattctaccaaagtctgtcaggcaagaagtcaccggtattgtagtgaaccataaactgaacatcagtcagaccaaactcaaggcatttagggccaccctgcatcagattgagcaggatggactgtcggggaaaaaatggggcaactcacctaatctcatcgccagtatcaccggttttagcaattacgtggcaatgataaatcctgagaaagggggcgaactgcttgaatccgttgagagaattaagcagaagcacatattgaatactccggtactctga

SEQ ID NO: 13395 - RNA, 1065 nt, synthetic construct
  source 1..1065: mol_type = other RNA
atggcctctaaagccacatacaagctgcacgtgacatccgtctctgcggagggccatccaaagaatcttcagcttcatggtcttgccgagtgtaacactgcagaggagatagccttggctatgggcattagtaggggcaaactgcgcttcctgaccctaaacagccccgctagcacaattacccactatacccggtttaagatcagtaagaagaccggggaagaacggagcatcgttgccccaggccccaacctgaagtccgcccaacggtggattctagacaatattctcgagaaacttgaggtgcactctgcagctcatggcttctgcaaaaaaagaagcactgtgactaatgctaagcctcacgtgggcgcggatatcctcgttaaaatcgatctgcagaattttttccagtccatatcgtacaaacgcgtaaagggactgttttcaggcctcggttattccgaaaccgccgcaaacatctttggtctgatatgtaccgctttcgaaatcaaggaaatcgagaaagagggacagataaactacacggccagtggggatcgtcacttgcctcaaggatcacccgccagtccggccatctcaaacttaatttgccgacatttagattccagaatcgcaatcgtagccaagaacctggggttctgttacacaagatacgccgacgacctgacatttagcgggtgcggagaagcagctcggaggatcagcaacctgatgaaagagattaagctcattatcgctgcagaaggattctcgatcaacagggacaaaaccaaaatcatgggacgatctgttcagcaggaagtcactggaatcgtcgtgaatacacagctcaatatttccaagaagactctcaaggctttccgcgcaaccctgtatcagattgaacaggaggggttgtcaggtaagaagtggggcaatagcacgaacctgattgcgtccatagctggctttgcgaattacgtctctatggtggacccttctaaaggggccgagttacaattgagagtggcaaggattaaacaaaagtatgaggggaagtga

SEQ ID NO: 13396 - RNA, 1074 nt, synthetic construct
  source 1..1074: mol_type = other RNA
atgtacggcacgaacctgataaccatcccccttgcaatggatgggaatagtgagcggttggagacagataagtcggtagttctgcggtcccatggcctggctgagtataacaccgtgactgaaattgcctgcgccatgggaatcacacccggacagcttaggttcttaacctcttctttcagtgggtcgcaagtcaaacactacgtccatttccagatctctaaaaagacaggcggggagagactgataagtgccccgaagcctaatctcaaagcggcccaaaaatggattctgcagaatatcttggagaaactcgaagtccataatagtgcacatggcttttgcaaaaatcggagcatagtgacaaacgctcagccacacgtgggcaacgatgttattgtcaacatcgacctgcagaacttttttgaggctattacatacaagagggtgaaggaattgttcagcgggttcggatattctgaaactgccgctaagatctttgccgtcatctgtactacgtcagagatcgaaattcacggccaggctaatgacatcaccagcggcaatcgccacctccctcaaggatcccccgcctctcctgccatctcaaacctgatttgctaccacttagactctagaatcgctgcgatggcagaaaacctcgggttttgttatacccgctacgctgacgatctgactttctccgctagcggtcaggcctcacacaagatttacaacctgatcaagaacgttaagcttatcattaactccgaggggttcacagtgaattttcacaaaacgaacattctctccaaatcagtgcagcaggaggttactggtgtggtggtgaacaccaaactgaacataagcaagaaaaccctaaaggccttccgtgcgacactgtaccagattgaacaggaaggtctatccggtaagcattggggcaatagcaccaatattatcgcagccatcactggatttgcaaattatgtagccatgataaatccagacaaaggagcagaacttaggagcagagtggagcgaattaagcaaaagtatgagtgtcaggagtga

SEQ ID NO: 13397 - RNA, 1050 nt, synthetic construct
  source 1..1050: mol_type = other RNA
atgtacgcgacaaaccttacaacgactccgctagctatcgagggcaattccgcagtgttgagatcacacggacttgctgagtatcactcagctgccgaaatagcgtgcgctatgggcattaatccaggtcagctgcgctttctgacgtcttccttccctggaagtgaggttaaacactatgtgcactttaagatctccaaaaagacaggtggagagcggttgatctctgcccccaaacctcacctaaaagcggcccagagatggatcctggaaaacattttagagaagctggaggtccatcacgccgctcatgggttttgtaaaaataggtccattgtgacaaacgcccagccccatgtgggtgccgacgtcatagtgcacatcgacctgcagaatttcttccagagcattacctacaagcgcgtgaaggaactgttctcagggtgtggctacagcggcatagcagccaacatcttcgctcttatctgcacaaccagtgaaattgaaattcatgagcaggcacataacatcagcattgagaatcgccatctgccccaagggtccccaacttctccagttatcagcaatctgatctgctatcacttagacaggagaatggtaaaaatggcggaaaatttggagttcagctatacccggtatgccgatgatcttaccttttcggcttctggacaagcttctgaacgtaggtacaagctcattaaaaacgccaagctgatcatcaatagcgaaggctttactgtgaattcccataaaaccaacattctgggaaagtcagtgcagcaacaggttaccggggtcgtggtcaacacccagctcaacatctcgaagaaaactctcaaggcatttagggcaacactgtaccagatagagcaagagggcctcagtgggaaacactggggtaacagccctaacatcattgccgcaattactggcttcgccaattacgtcgccatgataaaccccaataagggggcagaactccggagtcgagtagagcgaatcaaggaaaagtacgagtctcaggagtga

SEQ ID NO: 13398 - RNA, 1086 nt, synthetic construct
  source 1..1086: mol_type = other RNA
atgtattcacaaaatctcacgactattcccctagccaccgaatcaaatttagagcgactggagacagataacctggcgcttctccggtcccacggattggcagaatataacacggccgaggaaatagcttttgccatggtaattagccttgagaagctccactttttaacaacatctacctccctgacacgtcactacctcccgtttaaaatcagtaaaaaaaccggcgggaagcggattatcagcgctcctaaacctgagctgaaagccgcccagagatggattttggagaacatcttggaaaagctggaggtgcacaacgctgcacatgggttctgtaagaacaggagcatagtaactaatgccaaaccacatgtgggggccaatgtcatagttaacatcgacctgcagaactttttccagtctatctcttacaagcgaattaaggaattgttttccggattcggttactccgaatccactgccaccatcttcgggcttatttgcacgactgccgaaattgcgatcaacggccaaataaatcataccgcttcagagaacagacatctgccccagggatcacctgcttccccagctatttctaatctcgtttgcaggaatctcgacatacggctggcggcgatcgctgagaatctgggcttctgttacactagatatgcagatgacctgacattcagtaccagcgaagatgcatcaagtaagatctccaatctgatcaagaataccaagttcattatccacggcgagaacttcaccgtgaacgacaacaaaacaaagatctcgtctaaaagcgtgcagcaggaagtcaccggtgtgatagtgaatacacagcttaacatctcgaaaaagactctgaaagcattcagggccaccctatatcagattgagcaagagggattatctggcaagagttggggcaagagcaccaatctgattgccgcaattacagggtttgctaattacgtcgccatgatcaaccccgacaaaggcgcagagtttaagagcagcgttgaacgcatcaaacaaaagtacggaggtagtcagactgatgaggtgcgcttttga

SEQ ID NO: 13399 - RNA, 1041 nt, synthetic construct
  source 1..1041: mol_type = other RNA
atgtcctgccaaaactacacacagaacaacattgagcagctgaagaaatgcaatctcgacgtctataacaacgctgagcagattgctgccgccatggaaatctccatcgataaactgcgattcttaaccttcacttccaaaacatcacagatcagccactacatttactttaagaccgccaagaagttagccggagatcgtatcatcagcgcaccgatgcctgatctgaagagggcgcagtactggattctgcaaaatatcctgcagaaaatcgctatacacgatgctgcccacggcttctgtggggaccgctcaataataaccaatgcaaatccacatgtcggcgccgagatcatcatgaatatcgacctccaagattttttcagtgctataacttaccaacgagttaaggggctgtttcagtcatttggctatgcctcctctgtggctaccatattcggccttttgtgcacagcccccgtggtcgaagagagaaatctagacggaaaaactgatttcgtggagttcaaacaacgccatcttcctcagggaagtcccgcgtcacctgcaatcacgaacattatctgtagaaacctggaccagaggctatgtgctattgcagaaaagttcgggtttacatatactcgctacgtggacgaccttacatttagtgcgagcggcgagaatttgcagcacactaaaaacatcatcaagcaggtacagtctattatttctgatgagggtttcgcaattaatccagacaagacgaggatcctgcggaactctcagcagcaggaggttaccgggattatcgtgaatcagaagattaatatctcgcggaaaaagctcaagagctttagagccaccctgcaccagatcgaaaacgagggactcgaggggaaacattggggtaatagcagcaacttgatagcttccattaccggcttcgccaattttgtggcaatggtaaaccccgaaaaaggagccgaatttcaacagcaaattcagcggattcaggaaaaatatggtaagaacaagtga

SEQ ID NO: 13400 - RNA, 1041 nt, synthetic construct
  source 1..1041: mol_type = other RNA
atgaacttccagaatcacaaccaaaacaatatcgagcagttgaagaagtataatctggacgtctacaacaatgcagaacaaatcgcagcttctatcgagataagcattgccaggcttcattttctggctttcaatagccagacaagccatatctctcactacatccatttcaaaactgccaagaaaattgcaggcacgaggatcatttcagctcctctgccagatctgaaacgtgcccagtactggatcctgcataacatactgcaaaagattgccatccacaatgccgcgcacggcttttgcggcgatcgatccatcataacgaacgctactccccacattggggcagaggtcatcattaatatcgacttgcaggacttctttagcgctattacctacccaagagttaaggggctctttcagagtttcggatacagctcttatgtggcgacaattttcggattactctgtactgcccccgttgtagaagaacgaaacgtggatggagaaattaactttgtagaactcaaacagcggcacttaccacagggttcgcctgcgtcacctgcaattaccaatatcatctgccggtcactagacgagaggctgtccgccatcgccacccagtttggcttcacatatacccgctacgttgacgatctgacattttctgcatccggtgagcagattaagcacaccagtagcttcataaaacaagcccagtccataataagtgacgaaggattcgccatcaatcccgataaaacccgcattcttcggaacagtcagcagcaaaaagtgactggcataatcgtcaaccagaaaatcaatatctccagaaaaaagctgaagagctttcgcgctacactccatcaaattgaaaatgagggattggaggggaagtattgggggaagtcttcaaaccttgtggcttccattactggttttgctaacttcgtggccatggtgaacccggagaagggcgcagagttccagcaacagatccagagaattcagaagaagtatgggaagaaaaattga

SEQ ID NO: 13401 - RNA, 1044 nt, synthetic construct
  source 1..1044: mol_type = other RNA
atggaccttcagaacaatacacaggaaaacatcgagcagcttaaaaaatacggactcgatgcctacaataccgctgaggaaatagcggctgcgatggagatcagttttgacaggctaaggtttctcgtgttcaattccaagaactcaactgtttcacactacattcatttcaagacagccaaaaaaacagaaggagagaggatcatcagcgcacccttaccggacctgaagcgcactcaacactggatccttaagaacattctgcaaaagatcggaattcacgacgctgctcatgggttttgtcgtgatcgaagtatagtcactaacgccacccctcacgtaggcgccgaagttatcattaacattgacctccaggatttcttttccgccatcagttaccagagagtgaaaggcctgttccagtcctttggttattcttccagcattgcaaccatttttagcttgctgtgcacaaccccagcagtcgccgaacgcgatctggatggtaaggcagacttcgtcaagttgaaacagcggctgttacctcagggttctcccgccagccctgctataaccaatattatttgcgggagcctggacgatttgttgtctgccattgctcagaagtcaggcttcacctacactcggtatgtggatgacctgacgttctcaaccagtggggagtctatcaagtatatctcaaacatcatacagcaaacgcagtctattgtcagcgacgagggatttactattaattcggagaagaccagaatactgcggaattcccagcagcaagaggtgacgggcatcattgtgaacgagaagataaacatctccagaaaaaagctcaaaaacttccgagccactctgtaccaaatcgaacacgaaggcctggagggcaaacattggggaaatagtccaaaccttatcgcgtccatcacagggtttgcaaatttcgtagctgtttatcgcaggctcgtgacagggaagaatcctggcctaagcgcaacaaccccctctccctgggtgaaagccccatgttga

SEQ ID NO: 13402 - RNA, 1056 nt, synthetic construct
  source 1..1056: mol_type = other RNA
atgggccttcagtcaaacaaacagggcaatatcgactaccttaacaattatggactggatgcatacaatacagctgaacagatcgctgctgccatggaaatctccgtggataaactgaggttcttagcctttaatggcaaaacctcaactgtgtcccattatatccacttcaaaaccgccaagaagaacgtaggacaaagaattatctcggcccctctaccagacctcaagcgggctcagcattggatcctgaagtccatcctgcagaaaattgagatccacgatgcggctcatggcttctgctgcgaccgtagtatcgtgacaaatgcaactccacatgtgggggctgaggtggtaattaagttcgacctgcaagacttcttcagcagaatatcctaccagagggtgaagggactgtttcaaagcttcggttactctcctgccgtggccgcaattttcggattgctctgtataacggctgccgtcgaagagcgggaactggatggcaagacatattttgttgagttgaagcaccgccagttaccccagggatcacccgcaagcccggcaattactaacattatttgtcgcaacctcgacaggagactgatggctattgcggacaaatacggttttacatacacacggtatgtcgatgacctgactttcagtgcctctgccgagaatgtgaagcacatatcaaacatcatcaaacaaacccagtctatcgtcgcagatgaagggtttgcaatcaatcaggagaagaccagaattctacgaaactctcagcagcaagaagtcaccggcattgtcgtgaacgagaagatcaatataagccgcaaaaccctcaagtcctttcgagcgacgttgtatcaaatcgagaacgagggttttgaggggaaacactgggggaacagcggcaaacttattgccagcatcactggtttcgcgaactacgttgccatggttaatccccagaaaggggccgaatttcaggaacagataaagaggattcagaagaagtatgagataaaacacagtagtgagaatcagtga

SEQ ID NO: 13403 - RNA, 1410 nt, synthetic construct
  source 1..1410: mol_type = other RNA
atgtctgagcagccacgcacccggcaggaactgtatgagcaggtacgcaaagtgggaaaggaagagtttatcctggaggagatgattcggtatggcttctggtcaccacagggaacaattcccgaggatccagccgatgagattcgacgcgcctcacagatccggaaggaattgcaggagctccgtagagaatcttctcgactacacaacgagcagcagctgcgcaaagatgctctgaaaaggcggctggcagagagccggaagaagcagcaggagacaaaagagagaagggaaagagagagactggaaagagccgaggcctggaagcaacgcaaacagagggaaataatctatctgggcgaggaagtgtccgctgggcttaaccacgcagaatctaacctcgagagacttcgaaataacaatctgcctctctgtaacactgcggaagaaatcgctgtggctatgggcattaacataggcaagctgcgcttcctagcttttaatcgtaaaacatcgacagtcagccactacatcagatttaagatgcctaagaagactggtggtgagcgattcatctctgctccaatgcccaatttaaaacaagcgcagcactggatccttacaaatatcctggacaagctcaacgtgcacgaagccgcgcacgggttctgtcgtcagaggagcattattactaacgcaacccctcatgtagagaaggacgtggttatcaactttgacctcaaggatttctttccctccattagctataagcgcgtgaaaggtctttttcatagtttcggctacagcgaaaccgccgccacaatcttcgctttgttgtgcacctccgccgacgtcgaaaagctgcaattggacgccagaacgtattacgtggcggtgggagacaggtacttacctcaggggagtccggcatcaccggcaattagtaatcttctgtgcaggcggctggataaacgcctcaccggaatggctgagaagctggggtttacctacacgaggtacgccgacgacctcactttcagcgcagatggcgagtcccttcggcatatatgcaacattctaaagaggacggagtccatcgtcacccatgaggggctgcgaatcaatcaggataaaactagggtgctgcgcaatactagacaacaggaagtgacaggcattgttgtcaatgaaaagctctcagtttgtaggaaaaccttacgtaaatttcgggccactctcttccagatcgagaaggagggcctggaggggaagaagtggggaaacagtaccaatttgatagccgcaataaccggttatgccaactttgttgcaatggtaaatcccgaacggggacaagaattccaaaaacaggtcaagagaatcaaagctaaatacttgggcaactggtga

SEQ ID NO: 13404 - RNA, 1401 nt, synthetic construct
  source 1..1401: mol_type = other RNA
atgtcagatcagccaagaactcggcaggaactttacgacagaattagacagactggtaaggatgagttcatcttagaggagatgatccgattcggattttgggcaccacaggggaccattcccgaagatccggctgacgaaataaggcgacagggagaaattagacgggagcttgagactctgaggcagcagtcctcccagctgagaaacgagaaggagctgcgaaaacagatgctaaaacagcggctggaagaaagccgccggaagcaaaaagagacaaaggaaaggcgtgagcaggaacgattagaaagggccgcagcgtggcaagagaagaggcagaaagacattatatatcttggggaggacgtgagcggcggactcaataacacagaggccaatattgaacggttgcaatcccataacctgcccctatgtaatacggcactcgaaatagctgaggccatgggcgtaactattgggaagttaagattcctcgcttttaatcggaaaaccagcacaatcagccactatatccggtttaaagtgcctaagaagacgggtggcgagcgtctcatcagtgcgcctatgcccaacttgaaacaggcgcagtactggatcctggagaatattctaaataagctggaggttcatgacgccgcccatgggttccgggaaaaccgctctattattactaatgctacccctcacgtgggggcagatgtaatcatcaacttcgatctcaaagatttcttcccttcaatctcgtacaaacgcgtcaagggactgtttcagagttttggctacagcgaggccgccgccactatttttggactcatttgcaccgctgcagatattgagcaagtggaactggacggcaaaacctactatgtcgccctggacgacagacacctgccccaaggttctccagcctctccggctataacaaatcttttgtgccggcgtttggaccgaaggctgcagggaatggccgagaacataggcttcacatattcccgctacgcagatgacctgacattctctgcaaagacagaaaatcgcaggcacatctgtaatattatgcgcagaaccgaatcaatcgtgacccacgagggatttaacatcaaccacgataaaaccagggtgctcaggaatactaaccagcaggaagtgacaggcataatcgtcaacaacaagctcaatatctccaagaaggtgcttaaaaagtttcgcgcgacgctgcatcaaatcgagcaggaaggcttgcaggggaagcactggggcaacagtcatgacaccctggctgccatcaccggtttcgccaacttcgttgctatggtcaatccagagaaaggggctgagtttcagcagcaagttcaacgcatcaagaagaagagaaaatga

SEQ ID NO: 13405 - RNA, 1410 nt, synthetic construct
  source 1..1410: mol_type = other RNA
atgactgaccagcccagaacaaggcaggaactgtacgacagaatacgtaccatgggcagggaggagtttattcttgaagaaatgatccgctatggattctggccagctgaaggcaccatgcccgaagatcctgcagatgagatacggcacagaggcgagctggagagggaactccgcgagctgaggcaggagaataacagactgcacaacgagcaagctttcaagaaagagatgcttaaacagaggctggaggaatcccgacgaaaaaggcaagaaaccaaagaaaggcgtgaacgggaacgccaggagagggcagaagcctggaaacagaagaagcaaaaagagatcacttacttaggtgaggaggtttctgcaggcctgaataatactcagagcaacgaggagagactcagaagcaataagctccctctctgcaatacaagtgaggaactcgccaccttaatgggtatttccctgggcaagttgcggtttctggcctttaaccgaaaaacaagtactgtctctcactacattcgttttcggatgccgaagaagacaggcggagagcgaattatttctgctcccatgccctctctgaaagccgcgcagcactggatcttggagaatatccttcagaaattgcagatccacgatgccgcccatggtttcacaaaggagcggtctattgtgaccaacgccacaccacatgtcggggcggacgtgataatcaatctagaccttaaagacttcttcccatcgatctcctataaacgcgtcaaaggactatttacctcattcggatacagcgaagccactgccacgatactggccttgatctgcaccgctgctcaggtggaggagctggagttagatgggaagacttactatgtggcacttggcgatcgccaactgccacagggaagtcccgcatcaccggcgattaccaacctcctgtgcaggagactcgataaacggctgactacaatgtccgggcagctgggcttcacctacacgcgatacgcagacgatctgacctttagtgggtcaggggacagcttacgtcatatctgtaatattctccggcgcaccgagagcatcgtgacacacgaaggattcacggttaaccaggaaaaaactcgggtcctgcgcaagtcaaggcaacaggaagtgaccggggtggtcgtaaaccagaaattgagcgtatgtaagaagacactgaagcaattccgggctacgttgtatcagatcgagaaggaaggactagagggcaagcattggggtggttcccctgacctgcttgcagctattacaggctatgctaactttgtggccatggttaacccagagaaggggctcgaactccagaagcaggtgcaacagatcaagaagaagtatagaagacctcgctga

SEQ ID NO: 13406 - RNA, 1410 nt, synthetic construct
  source 1..1410: mol_type = other RNA
atgagcgatcaaccaaggaatagggaggagctgtaccagtatatttcaaaggtcggcagggagaaatttatcctcgaggacatgcaaagatacgggttctggcagggtgatagtcctcagggctctgaagaagatacgcgcaggcagctggagatacagcgcgaaatcaacgagttaggaagacaatccagcaagttgcagaatgagaaactcctgagggagctgagcctcaagaaacgtttggaggaaagtcggagacgaaggcaggaaactaaggagcggcaggaaagagagagacaggaacgggccgaagcctggcgtcaacgcaaggaaaaagaaattctatacctgggcgaggacgtgagcggtgacctgaacaatacggaaggaaacgaagagagactaaactctctcagtctgcccgtctgcaacaccgccgagcagatcgcagcagccatggagataactgtgggaaaactgcggtttctggcttttaaccgaaaaacatctacagtgagccactacattagattcaagatgccaaagaagacaggcggcgagcgaatcattagtgcacccatgcctcagttaaaacaggcccaacactggatactcgcgtctatcctcgaaaagctcgaactgcacgatgccgcacatgggtttcggcgtgagcgatccatagtctccaatgcaacccctcatgttggcgcggaggtgatcattaacttcgaccttaaggacttcttcccctcaattagctataagagagtgaaggggctcttcaggagttttggctattccggcgccgctgctacaatcttcgctctgatttgtacggctgccgaggtagaggaactggagctggacggccagaattactatgtggccgtcggggatcggttccttccacagggatcaccagcttcgccggcgatctcaaaccttttgtgtaggcggttggatcggcgactgaccgagatggcggagaaattgggattcgcctataccagatatgctgatgaccttacttttagcgcatccggggactctctgaattctatctgcaacatccttcgccgtactgaaagcatcgtcacccacgaagggtttactattaatcaggacaaaacccggattcagcgcaaatacaaccagcaagaagttaccggagtggtagtgaatgagaagccctcggtgtgccgcaaaaccctgaatcgcttccgcgccaccctataccagatcgagaaatccgggatcgagggtaagcattggggtaatacatcaaacactattgccgcaatcacaggctttgccgatttcgttgctatggttaatcctgaaaaaggagctgaatttcaagagcaggtgaagaggataaaggagaagctgaagcagaacacattatcctga

SEQ ID NO: 13407 - RNA, 1410 nt, synthetic construct
  source 1..1410: mol_type = other RNA
atgtccgatcaacggcgcagccgggaggagcttagtaagcttatacgcgaggtcggcaaagaagaattcatcctggaggagatgctgcgctacgggttctggaagggggaaagcttgagggagcttgatgctgagattcatagacaggaggaaatcaggcgcgaactagaaactctgcgtcagcagagcttgcagctccaagatgagcagctactccgacagcagtcattgaagaagaggcttgaggaatctcgcaggaaacgacaggagacgaaggagaggcgggaacgggaacgacaggaaagagccgaagcttggaaacaaaaaaaggagaaagagatcgtgtacttaggcgaggcggtttccgccgatcttaacaacacacagggtaatcaggagaaattgaatagcctaggcctgccagtgtgcaacaccgccgaggagattgctaccgctatgggggtgacagtgggaaaactgaggtttctggcgttcaatcggaatacttccacagtgtcccactacatccggtttaagatgcctaagaaaactgggggagagagaattatctttgcccccatgcctaaccttaaacaggcgcagcactggatcctggagaatattctgcaaaaactggagatacatgacgcagcacacggcttcaggagagagcggtctatcgtgactaatgccaccccgcatgtgggtgccgaggttatcattaacttcgacctgaaggacttcttcccctctatctcttataagagagtaaaaggactgttccgtagttttgggtatagcggggccgcagctacaatcttcgcactgctatgtaccgcggccgaggttgaagagctggagctcgacggccagaactactatgtcgcagttggcgaaagacatctgccacaaggttctcctgcaagtcccgctatttcgaatttactgtgcaggcgcctcgactcccgtttgacagctatggcagaaaaactcgaatttatctacaccagatatgctgacgatctcacattttccgtctcaggagaatctcgcagatatatttgtaacatcctgcgtaggaccgaaagcattgtcatccacgagggatttaccattaatcaggagaagacccggatactgcgaaaaagctcccagcaggaagtcacgggactcgtggtgaacaacaagttgtcaattagtaagaagacactgaacagattccgagccactctctaccaaatcgaaacggagggtttagaagggaaacactggggcaactcatcgaacctgattgctgccattactggctttgccaattttgtggccatggtaaatccagaaaagggcgccgagttcctcgagaggataaagagaatcaagaagaagtttcggcgcaacaatatagaatga

SEQ ID NO: 13408 - RNA, 1413 nt, synthetic construct
  source 1..1413: mol_type = other RNA
atgacagatcagcctagaactcgggaggagctttacgacagaataaggaaaatggggagagaagaattcatcctcgaagagatgatacgctacggattctggccggcccaaggcactataccgcaggacccagccgatgagattcgcagggctggagagattcgcagggaactggaacagttgaggagagagagcagtcggttacagaacgagaaagcgctgcgaaaacaaatgctgaaacagcgcctcgaggagtctaggcgaaaacaacaggagactaaggagaggagggaacgtgagcgacaggagagagcccaggcctggaaccaaaagaagcagcaagaaattatctatctcggcgaaggcgtttccgctgggcttaacaacagtcaggggaacgaggaacgtctcaggtcattaggattgcctctgtgcaacaccgccgaagaaatagccgccgctatggagataagtgtggggaaactacgttttttagccttcgatcgcaaaaccgctacagtatcacattacatcagattcaagatccccaagaaaacgggcggggagagactgatttcggctcctatgccaaacctaaagcaggcacagcactggatccttgagaatattctgcagaaattgcaggtccacgatgccgctcacggcttccggatccagcgatccattgtgacaaatgcaacttctcatgtgggagccgacgttatcatcaatttcgacctgaaggacttttttccagccatctcctataaacgggtgaaaggactttttctctcattcggctatagtgaagccgccgctacaatttttggcttgctgtgcactgcggctgaggtcgaggagctggagctcgatggcaagacctattacgtcgcactgggtgagcggcatttgccccaaggcagccctgcaagcccagcaattaccaatctgctttgtcgcagactagatcgaaagctcaccaccatggcagaaagcctgggcttcaactacacgcggtacgctgatgacatcacgttttccgcgtctggagactctctgaggcacatctgtaatattataaagcggaccgaatccattgtaacatatgaagggtttgcaattaaccaggacaaaacacggatcctccgcaaaagcagacagcaggaagtgactggtgtcgtggttaacaataaactgaatgtgagcaagaagatcctgaaacaatttagggccaccctttatcagatcgaaaaggacggtctggaagggaagcactggggaaattctcccaacctgatcgcagccatctcaggtttcgctaacttcgtggccatggtgaatcccgagaagggtgcagagtttcagcagcaggtccaacggattaagaagaagtacgcgcgtcgcaagaattga

SEQ ID NO: 13409 - RNA, 1413 nt, synthetic construct
  source 1..1413: mol_type = other RNA
atgacagaccagccgcggacccgggaggaactttatgaccggatccgaaagatggggcgtgaggagttcatcctggaagaaatgattaggtatggcttttggcctgcgcagggtagcatgccacaggatcctgccgatgagattaggcgtgctggggagatacggagagagctggagcaattgagacgcgaaagctcacgcctccagaacgaaaaagctctgaggaagcagatgctgaaacaaaggctggaggaaagcaggcgcaagcagcaagagacaaaggaacgaagagagcgcgaacgccaggaacgcgctcaagcttggaaccggaaaaagcagcaggaaatcatatacctgggagagggcgtgagcgccgggctaaataattcccagggaaacgaagagaggcttagactactcaatttgcccctctgtaacacagccgaggaaatcgccgccgccatggagatttctgttggaaaacttcgattcctggccttcgatagaaagacggcaaccgtgagtcattacattaggtttaagattccgaagaagactggcggtgagcgccttatctccgcacccatgccaaaccttaagcaggtgcaacattggattctcgagaatatcttacagaaactacaggtacacgatgcagcgcacggctttagaatccagcgctctatcgtcacaaatgccaccccacacgtcggagccgacgtgataattaacttcgacctgaaggacttctttcctgctatctcctacaaacgggtaaaaggactgtttctctctttcggctattccgaggctgctgcaaccatcttcagtctcctttgcacagcagccgaagttgaggagctggagctggatggcaaaacctactatgtggcgctcggggagaggcatctgcctcaaggaagccccgcttcacccgcgattactaacctgttatgtaggagactcgatagaaagttgactataatggccggctctttgggtttcaattacacgcgttatgccgacgacattactttttcgacttcaggcgacagtctgagacacatttgcaacttgctgaagcgaaccgagagtatcgttacctacgagggttttgccattaatcaggataaaacacggatcttgaggaaatctagacagcaggaggtgaccggggtcgttgtgaataacaagctgaatgtgagcaagaagatcctgaaacagttccgggctactttataccaaatcgaaaaagacgggctcgaagggaagcactggggaaactccccaaatctgattgctgccatctcaggcttcgcaaactttgtggcaatggtcaaccccgaaaaaggcgccgaatttcagcagcaagtccagcgaataaagaagaaatatgcacgtcggaaaaagtga

SEQ ID NO: 13410 - RNA, 1410 nt, synthetic construct
  source 1..1410: mol_type = other RNA
atgaccgatcagcctcgaactcgccaagaactgtacgaacgtatcaggcagatcgggagagaggagtttattttagaggagatgattaggtacggcttctggccagccgaggggacaattccacaagatccagccgatgagataaggagagtcggcgaaattcgaagagagctagaggagctccggcaggagtcctctcgccttcataacgaaaaagaactccgcaaggaaatgcttaaacagaggcttgctgaatcacggagaaaacgtcaggagactaaggaacgcagggaaagggagcgacaggaacgggcagaagcttggaaacagaagaagcagcaagagattgtttatctgggtgaaggggtgtcagctggtcttaatgagacagagggcgattccgaacgcctgcagtcatacgggctgcctttgtgtaataccgccaacgagatcgccaccgcaatgggcatcaatgtcggaaaactgaggtttctcgccttcgaccgaaaaacctctacggtgagccactatattagattcaagatgcccaaaaagaccggtggcgagcgcctgatcagtgcacctctgccctcactgaagcaagcccaacactggatactggggaatatattgcagaaactcgaggtccacgaggcagcacacgggtttcggtgcgacaggagcatcgtgactaacgcgacaccccatgttggagctgatgtcattattaacttcgacctaaaggacttctttccgtccattagttataaaagagtgaagggcctgtttagatcgttcggatactctgaggctgctgctacaatcttttccttgttgtgcacggccgcggaggtggaagagttggagttagatggaaaaacttattatgtcgccctggaagaacggcatcttccacagggtagcccggcatctcctgcgatcaccaatctgctgtgtcgacggctcgataagagactcactgccatcgcccaggagctgggcttctcctacaccaggtacgcagacgacctgacatttagtgcgtccggcgattctctgcggcacatatgcaatcttctcaagagaactgagtcggccgtgatctatgaaggattcgccatcaaccaagagaagacacgtatcttacggaaaagtagccagcaggaagtaacaggggtggtggtgaacgacaagctaaacataagcaagaagaccctgaagcagttccgcgcaacgttgtaccagatcgaaaaggacggactcgagggaaaatcctggggcaatagcagcgacgtactcgccgctgtgtctggctttgctaactttgttgttatggtaaatcccgagaaaggtgccgaattccagcagcagatccagcgcattcggaaaaagtacaagcaaaaaaagtga

SEQ ID NO: 13411 - RNA, 1413 nt, synthetic construct
  source 1..1413: mol_type = other RNA
atgagcgatcagcctcgaacccgtcaggagctctatgataggattcggcaggtgggaaccgaggaattcatacttgaggaaatgatccggtacggcttttggagtgcacagggcgaaatgcctcaggacccagctgatgagattcggagggcaggcgaaattcgccgtgagctgaatgagttaagacaagaatctcgcaaacttcaggacgaaaaggagctgagaaagaggcttctgaagcaaaggctggaagaatccaagcgaaagcggcaggaaactaaggagagaagggaacaggaaagaagatcccgagcggaggtttggaaacaaaagcagcagcaagacatcatatatttgggagaagacgttagtgctggactgaataacacccagggtaacgaagagcgtctccactcgtacaatctgcccctctgtaacaatgcagagcaaatcgccgccgctatgggcatcaccgtaggcaaactaaggttcttagcttttgatcggaaaacctccactgtcagccattacatccgctttagaatgcccaagaaaacaggtggcgagaggataatcagcgcacccatgcccaacttgaagcaggcccagcactggattctcgccaacattctggagaaactcgagctgcacgacgccgcgcatggtttcaggcgggatagatccatcgtgacgaatgcaacaccacacgtaggggctgatgttattattaacttcgacctgaaagacttcttcccaagtatttcatacaagcgggtcaagggtctattccatagctttgggtattctgaagcggcggctacaatatttgggctggtgagcacagctgcagaggtcgaatctcttgagatcgacggcaaaacatactacgtggctgtggacgagcgtcatctcccacagggctctcctgcctcacctgccattactaacctgctgtgccgcagactagatagacgactcactgccatggccgagaagcttgggtttacttacacccgctatgccgatgatttgaccttctctgccagcggggacagtctcagacacatttgcaacatcctgaagcgcacagaatcaatagtgacgcatgagggatttaccattaatcaggagaaaactcggatcttgcgcaaatcacgccagcaagaagtgaccggagtcgtggtgaacgataagccgaatgtggacaacaagacgttgaagcgcttcagggccacactgttccaaatcgagaaggacggcttagagggcaaacactggggaaacgcaaatctgatcgctgccatcgccggatttgcaaacttcgtcgccatggtaaatccggagaaaggggctgagtttcagcagcaggttcagcggatcaagaataaatatgtgaggaatgggcgatcctga

SEQ ID NO: 13412 - RNA, 1437 nt, synthetic construct
  source 1..1437: mol_type = other RNA
atgaccgaccaaccccggacgaggcaggagctctacgacagagttcggcaggtgggcaaggaagagttcatcctagaagaaatgattcgctatggattctggttcgctcagggtgagctgccgcaggatcctgccgatgagatccgaagagcaggcgaaatccaacgcgaactccagcagctgcggcaggagaataataggctgcacaacgaaaaggccctccgtaaacagatgctcaaacagaggttggaggaaagtagacgtaaaagacaggagaacaaggagaggcgggagaagcagcgaaaagagaaatccgaggcttggaatcaaaagaagcagcacgagattatttacctgggagaaggagtgagcggtgggctgaataacacagaaggcaaccaagagagacttcagtcttacggcttgcctctgggggacacacccgagcagattgccgccatgatgggcattagcatggggaaacttagatttctcgcattcaaccgaaaggttagtacagtgagccactatataaggtttaagatccccaaaaagacggggggcgaacgcctgatctctgcacccatgccatccctgaagagggtgcaacactggattcttgaaaacatcctcaaccaactggaagtcgacgatgcagcccatggtttcagacgtgatcgatcaattgttactaatgccacaccacatgttggagcggatgtaatcatcaacttcgaccttaaagactttttccccagtatctcatataagagggtcaagggccttttccactcatttggctacagtgaggctgctgcaacaatttttgcgttactgtgcactaccgccgagttcgaggaggtcgaattggatggcaaaacatactacatcgccctggatgagcggcacctgccacaaggttcaccggcatcccctgctataactaacctgctatgccgccggctagacagacgcctgaccggaatggccaagaatctgggttttacgtacactcgatatgcggatgacttgactctcagcggctgcggcaattctctgcggcacatctgtaacatcttgcggcgcaccgactctatagtggcccatgaagggtttaccatcaaccaggaaaagacccggatcttacgcaattgtcatcagcaggaggtgaccggggtggtggtcaacgataaacctaacgtatccaagaagaccttaaaacaattcagggccactctgtatcagattgagaaagacggactcgaggggaaatcgtggggaaatagccatgacattatagctgccattacagggtttgcaaatttcgtagctatggtgaatccacaaaagggagctgagtttcagcagcaggtgaagaggataaaacagggcgtccgctcccagaacaccggagtgagaaatcaggaaagcgaatga

SEQ ID NO: 13413 - RNA, 1707 nt, synthetic construct
  source 1..1707: mol_type = other RNA
atgagccagcaacctcgtacaagacaggaactttacgatctgatcagatctaggggggggaaaagagaattcgtgctggaagaaatgatcagactggggttctggccccaacagggtacactgcccgaggaccctgctgacgagatcaggcaggaaggtgagattaggagggaattatccgagctcagaagggagtcgtctaggctgcacagtgagaagcagctgcgcaaacaagccctcaaacagcgctggagtgagtctaggcggaagcagaaagagactagagagagacgggaacgcgaacggcaagagagagctgaagcctggcaacaacagaagcagagagagattatttatctgggcgaggaggtgagtggcggcctaaataatcaggatggcgaccgtgataggctccagagtcggggcctaccaatggtgaacaatgccgaggagatagcagctgcaatgggaattacggtcggtgagttgaggtttcttgcatttaaccgcaaggttagtagcctctcacattacatccggttcaagattcccaaaaagagggggggagagagactgataagtgctccaatgccgcgcctcaaacgagtgcaacactggattctgcgtgaagtgctggagaagattgaggtgcacgaggcagtccatggattccgacgggatcgcagtatcctgactaacgctcggccccatgtgggggcagatgttgcgatcaactttgacctcaaggatttcttcccgactatctcatacaagcgcgtaaaaggccttttccgctcattcgggtactccgaagccgccgccacaattctgggacttttgtccaccgaagctgaccttgaagaggtcgagctggacggaaagacatactttgtcgcctccggtgatcgtcacttgccgcagggcagccctgcatctcctgctatctctaatattatctgtagaagactggaccggaggctgagcgggatggcaacatcactgggatttacgtatactcgctacgccgacgacctcactttttctgcctccggggaaaacaacttaagatcactctgcaatttgctgcggaggaccgaaagcattgtgacccatgaaggctttatcatcaatgatgagaaaacccggatcatgcggcgaaagtcctcacagctcgaagtcaccggtatcattgttaatgagaggcctaccatcgactccaaaacgttgcgacgatttcgggccacactgtatcacttggaaaaggatggcatccagggaaaatattgggggaactctcgtgacgttggcataatgctggcggtacaggggttcgcgaatttcgtaaacatggtacacccagaaaagggaaaagtgttcttggaacagatagataggattcgcgagaaatggaccctgaaggagacaaaaaagtcatcgccaacccctagcattagcctaccagtgatagaggagaaaacccccgaggcgatcccagaacagtcccttcccgacggcataatcttagaatgctacaagcagggcagcaagctcaaggtccgcgtgatctcccaaggctataacagctcttggaatgtgcagattccccgcaacttaatggccgagggagcccgatatagagttgaggagctgcgagaaagcgctgtgggtggcttttaccggactgtcggatccatacagaagctttga

SEQ ID NO: 13414 - RNA, 1698 nt, synthetic construct
  source 1..1698: mol_type = other RNA
atgtccgagcaaccacgcacccggcaggaactctacgatctcattagatctaaaggttccaagcctgcattcgtgatcgaagaaatgatccggcttggcttctggcccgctgaaggtaccttgcccgatgatccagccgacgagatccggagagaaggcgaactgcttcgggaactgagtgaactgagacgggagtctagtagactacactctgaaaagcagctgcgcaaagaagccctaaaacagaggctgcaagaatcccgaagaaagcaacaagagatcaaggagaggcgggagcaggaacgccgggataggacagaggcctggcagaaaagaaaagagagagagatcatttacctcggagagggcgtgtccggtggtttaaatcaccaggatgggaacattgagaggctccagtcatacggactgcctatcctaaatgacgcagagcagatagctgtcgcgatggggatctctgtaggggaactgcgcttcctggccttcgacagaaagacagccaccctcagccactatatccggtttaagatccctaagaagaccggaggcgagaggctcatctcagctccaatgccaaggctcaagaaggtgcagcattggctgctgcacgaaattctggacaaagttgaggttcatgaagctgtgcacggctttaggggagataggagcatacttactaatgcggtgccccacatcggagcagacgttgtcatcaattttgatctcaaggactttttcccaactatttcctataagcgtgtgaaagggttgttcagggctctcggatacagtgaggcggttggaactatattagcactgttgagtaccgaggccgacgtcgaggaagtggagctggacggcaaaacttatttcgtggcccttggggatcgccatcttccccagggctctcctgcttctcccgcccttagcaatatcatctgccggagattagacaaacgtttgagtggcatggccgcaaacttggggttcacatataccaggtatgccgacgacctaaccttcagcgcatcgggggaaaatctgcgctacatttgcaatcttctccgaaggacagagagcattatcgaacatgagggctttgctatcaatgctgaaaaaactcgtatactgcgacggaagtccagccagttggaggtgacggggatagtggtgaacgagtatcccaacattgatcgaaaaacaatgaagcgctttcgcgccacgctgtaccagattgaacaagaagggattcagggcaaacaatggggacagtcaaataacattatgttgagcgtacagggcttcgcgaactttgtcaagatggtcaaccctcagaaagggcaagtgtttctggaacagatcgatagaatccgcgagaagtggaggctgggtgaatctaaggctcgttccgtgagcccacccccgatttcacctcccattatcgagcaggagatatcccaggagatcctgttagactccataatcctggagtgttataaacagggatctaagctgaaagtacgagtcatcagtgagggctacaaccctacttggaacgtacaaataccgagaaacctcatggaggaaggtgcccgataccgggtcaccgagatttcggagagcgccgttggaggcttttaccgcattgcaggcacaattgagaagctgtcaccatcatga

SEQ ID NO: 13415 - RNA, 1629 nt, synthetic construct
  source 1..1629: mol_type = other RNA
atgagcgatcagccacgcaccagacaggaactgtacgacagagtacgggccatggggaaggagcagtttatcctggaggagatgatcaggtttggcttttggccagccgagggagagatgccagaggatcccgctgatgaaatacgacgcaaagcgcagattcagcaagagctcacacaactccggcaacagaaccggtctttgcaggacgaagctgctgcccggaagcgactgcttcaagaacggttggcagagtcccgccggaaaaggcaggaaacgaaggagaggcgggagagagaacgtcaggagagggccgccgcatggcgtgaacgacagcaacaggacattggatacctcggggagggagtgtcagctggtctgaacgagcgtgactgtcgcgaagaacgactgcaggcccgcggactgcccatcttaaagaatgcggcacagatagctgaagcaatgggaatttccgttggccagctaaggttcctggcttttaaccgtaaaaccagcaagatttcccactacgtctgtttcaacataccgaaaaaaacaggcggtgtgaggagaatatccgcccccatgccaaaacttaaggcggcacaacactgggtgttcgtcaacattttggagcgagtggaggtcggtgaggccgctcatggctttttacgcgacagatcaattgtgaccaacgcccagcctcatgtgggcgcggaagtgattatcaactttgacctcaaggattttttcccctcaatcagttataagagagtaaaagggctttttagggccatcggatatagcgaggccgccgccaccatatttgcccttctctgtaccgaggcagatactgtagcagtggaattggacggcaccacgtattatgtcgccactggcgaccgccatctccctcaaggtagtccagcgagccctgcattgtcaaatgtgctgtgccgacgcctggataaaagactgtctgccatggctgcagaatgcggcttcacctacacgaggtatgctgacgacctgactttctctgctagtggcgaaagcttgaggcacctgtgcaatattatgagacgcacagaggccattgttacacatgaaggctttgccatcaatcctgagaagactcggatcctgcggagaaagtctagccaaatggaggttaccggggtggtggtaaacgagttccccaattgcgatcgggccactttaaaaagattcagagctacactcttccacatcgagagggatggtatcgaggggaagcactggggcaattcgaataatgttcttgctgccatccaggggttcgcatcctttgtggctatggtcaatccagagaaagggcgggaatttcaggcccagatccaaaggatcaaagcacagatccagcctcagtctgtcactccgacaggaattatcgttgaatgttacaagaagggttcgcagctaaaggtgcgcgtcgtgagtcctggatacaacagcgactggaacgttcagttcccccgtaatctgagagaagagggcgcacggttcattgtcgaggaattacaggaggatgtgagagggggcttctaccgcgctgggggaaagattgaaaggatgaactccgaactttga

SEQ ID NO: 13416 - RNA, 1623 nt, synthetic construct
  source 1..1623: mol_type = other RNA
atgtcagactcccctcggaccaggcaggaactgtacgatcgggtgaggcaagtagggcgtgagcagttcgtgttagaggaaatgataaggttcggtttctggcccgcccagggggagattcccaatgaccccgcggatgaaatcagacggaaaagtgagctacggcaggagctcaacaagctgaggcaggaatcccgaaccttgcaggatgagcaggccgctagaaggcggcttctgaaacagcggttggccgaatcacgccgcaaacgacaagaggcaaaggaacgacgcgagcgcgaacggcaagaaagagcagaggcctggcaggaaagacaggaaagggagatagtctatcttggcgagggtgtttccgctggccttaacgattgcgaggaaaacagcgagcgactggcctcaagaggactgccttctctcccaacggccgagcatatcgccgctgctatgggcatttccatcggccagctgcggtttctggccttcaaccggaagacttctacccacacacattatatccgcttcaaaataccgaagaagaccgggggcgagagactgatttcctcccccatgccaaagctgaaggctgtgcaacactggattctgtctcacatcttagagcgcgtagaggtagacgatgccgctcacgggttccgtcgagacaggtctattgtgaccaatgcccaaccccatgtcggtgcggatgttgtcattaacagagatcttaaggatttcttccctactatcagctacaaaagagtcaaaggcatctttcgatcttttggctatgctgaggctaccgctacaattctggccctgctctgtacagaggcagacactactgccgtggaactggacggcaaaacttactacgtggcactgggtgaacgccacctaccgcagggaagccctgcctctccagcaatttccaacatattgtgtaggaggctcgacaagagactgcgcgcgatggcaaatgagctcgagttcacatacacccggtacgctgacgatctcacgtttagtgccagcggagaaagtctgcgctatatctgtaacgtgctcagacgtagtgagtcgatcgtaacccacgaaggcttcgccatccatcctgaaaagacaagggtgctcaggcggaaaagtagccagctcgaagtcactggaatcgtggtgaacgaattcttgaattgcgaccgggcgacacttaagaggtttagagctacgctttttcagatcgagcgagacggattcgaaggcaaacattggggtaatagcactgacgcattggcatcagttcaagggtttgcaaactttgtggccatggttaacccagagaaggggaagaagtttcaggagcagattcaacgtattaaaaccaaatggctgaccccagagcccagcacaaccactggtatcatagtcgagtgctataagcagggatcaaagttaaaagtgagggtcgtgagcccaggctataatcccgattggaatgttcagtttcctcggaatctacgcgaagaaggggcccgtttccgcgtggaagagatcagagagacagcaaagggaggattttacagagttgtgggggacattgagaaaatcgattga

SEQ ID NO: 13417 - RNA, 1404 nt, synthetic construct
  source 1..1404: mol_type = other RNA
atgactgaacagcctagaaccaggcaagaactatatgatcgaatccggcaaacaggcaaggaggaattcatcctccaggagatgatacggtatggcttttggcccgctcagggagagattccccaagatccagcagacgagatacgtaggctgggtgagttgaatcgtgagctgcagcagctgcatcagcagaaccggcagctgcataatgaagccgccctcaggaagcaacttcttaaagagcgcctggcagagtctaagcgcaaacagcaggaaaccaaagagaggcgcgaacgagagcgcaaagaaagagctgaggcatggaaggcccgaaaggagcaggatatcctgttcctgggacagggcgtatcaggcggactggataggcgagagcccaacctggagaggttgcagaatcagaaactccccgtgtttactacgccggaatctctggctagtgcgatgggggtcaccatcggacagcttcggtttctggccttccaccgccaagtcgcgaaaacctgccattacatcaggttctacatttccaagaagactgggggtcagagattgatatccgcaccaatgccccggctgaaacagctccagcactggatccttagatacatactcaaccctatcgccgtgaatgacgctgcccacggatttcggcaggggcacagcatcctcaccaatgccacacctcatgttggtgccgacgtggtagtcaactttgatttaaaggacttcttcccgtccatatcatataagagagtgaaggggctttttcaggccctaggatacggcgaggcaatcgcgaccattttggggttactctgtacttaccctgacgtggaagaggtggaactggacggcagcacgtattacgtggcaactggggatcgccatttaccccaaggctcgccagccagccctgctatttctaatatcctgtgtcggagattggacaggcgactcctgcaaatggctcaggagctaggattcacatatactcgctacgctgacgacctgacatttagcgccagtggcgataacctgagaaacatttgcaacctccttaagagaacagaagccattgcattgcacgagggatttgccctgaaccctagtaaaacccggatcatgagaaaaaactcacagcaagaggtgacaggcatcgtcgtgaatcagttcccaaatatttccaagagcaccctgaagcggttcagggcgactttatttcaaattgaacgcgatgggattgctggtaaaaagtgggggaattctaccgacacaatggccgctattcagggctttgcccacttcgtcgcaatggttaacccagaagttggtacgaaattcgtggaacaggttaagcagatccaagctcagaaccgtaattga

SEQ ID NO: 13418 - RNA, 1410 nt, synthetic construct
  source 1..1410: mol_type = other RNA
atgtccgatcagccaaggactcgacaggaactgtatgataggatacggaagatggggcgtgaagctttcatcctggaggaaatgatcaggtacggcttttggcccgagcaaggcgagttgcctcaggaccctgcggacgaaattcgcaggaggtctgagctctatcggcaattaaccgagttacgccaaaaaaaccggcaactgcaggatgaacaggctatcaggagacagctcagaaagcagcgattagcggagagtcggcgcaagcgtgaagaaacgaaacagcgcagagaggaggaaagacaggctagggcccaagcctggcaagagcgccagcaacaagagatcgtttatctgggggaggaagtgtcaggaggactcggagaacagcagtccaatccttccgagcttgataggcatggactgccacagctggcaacagctgctgatatagcccaggagatgggcatcactttgggcgagttgagattctttgctttcgatcgcaagacagccactgtctcccactacatacggttcaaaatgcccaagaagactggcggtgaacgcctcatttccgtgccaatgccgcgattgaagagagcacagtactggatcctgagccaaatcctggaaaagatcccagtgcacgaagcagcgcacgggttctgtcgggatcgatctatcattacgaacgcctctcatcatgtgggggctgaggtggtcatcaacctggacctgaaagacttcttccctagcattagttaccgccgtgttaagggacttttcagaagtctagggtattcagaggctgtcgccaccatcctcgcactcatttgtaccgcccctgacgttgaagaagtcagtcttgacgggcagacctactacattgcacttaatcagagacatctaccccagggaagccccgcatcacccgcaatatctaatctcatctgccggcgcctcgacaaacggctgacacagatggccgacgagctgggttttacttacacccggtatgccgacgacctgacatttagcgcctccggcgatgtcctgaggaacatttgccgaattctgagaagaacagaaagccttatcaattacgagagcttcaccttgcacccagagaaaacacgcatcctgagacggaagtcatgccagttggacgtgactggtattgtagtaaatgaaggactgaacatcgatcggaaaaccctgaagaaatttagggccacccttcaccagattgagacgcagggtctagagggcaaacattgggggcactcgcgaaatgtgctcgcgtctatacagggctttgctaattttgtggccatggttaacccggagaagggcgcccagtttcaggagcaggtgggtaggattcgtcaaaagtatggcaggaactga

SEQ ID NO: 13419 - RNA, 1416 nt, synthetic construct
  source 1..1416: mol_type = other RNA
atgtcagacaggcctcgcacccgtcaggaactgtacgagcggatcagaactatggggagggaggcatttattctggaggagatgattcggtacgggttctggcctgcagaagggacaatcgccgatgatcccgccgacgagattagaaggcaaggcgagctccagcaagaactcgagagactgaggcaagaaaatagaaggctgtatgacgagaaagctctgcggagggaggctctgaagcaacggctcgcagaaagcagaaggaaacagcaggaaacacaggaacgcagagagagacagcgtctcgaacgggcgcaggcttggcaacagcgacagcaacaagaaatcgtgtatcttggggagggagtctccggcggcctgtctgaatcccaatcacaccaggagcgtctgcagtcatacggcttgccgatatacgagacagccgccgatctggctgcggctatgggtatgtctattggacagttgcgtttcttagcttttaatcggaagacgtccaaggtatgccactacattaggtttaccattcccaagaagactggtggcgagcgactgatctctgcacctatgccccgcctgaaacaggctcagagttggatataccagcagatactcgccaaaattcccctggaggccgccgctcatggatttcgctgtgaccgaagtattctgaccaacgcccaccctcaccttgaagcggacgttatcatcaacctcgacttgaaagatttcttccccagcatcagctacaagcgagtgaaaggactgttcagatcttttggctactgtgaagcagttgccacgttactaggtctgatctgcaccgaggccgatttgacatccgtcgaactagatggtgttacttattatgtagccaccaccgaacgccttcttccgcaaggatcgccagccagcccagcgatatctaatcttatttgccggcggctcgaccggagactgacccaaatggctcaggacttgggatttacttacactagatatgctgacgatctcacgttctccgcacacgagccatacctgcagggcatctgtaacatcttacggcgcacagaggcaatcgtggcccacgagggcttgaccatcaatgatcagaagacaaggattcttaggaagaagagttcacagctggacgtcactggaattgtggtgaacggtgatcgacctagtctcgacaggaagaccttaaaacgcttccgcgcaaccctacatcagatcgagcagaacgggccaactggccagcattggggccatacagaaaacgtgatgagcgccatagccgggtatgctaattatgtcgcaagcgtgctcccagaaaaaggggccaaattccaggagcaggtgcgacacatccatcagaagtggcagcgcctgccctga

SEQ ID NO: 13420 - RNA, 1620 nt, synthetic construct
  source 1..1620: mol_type = other RNA
atgacgaaccagccaaggtcccgacaggaactgtacgatttagttcggcaggtgggtaaacaggaattcattttgcaggagatgatcaggtatggcttttggtcccccgagcaggagacacaggaggatgtatcagaggaactgcgccagcggaaacaacttcagcaggaattgtcacagttgcgccaggaaaacagactccgccaggacgaacaagccctgagaaaacacctcttgaagcagcggttagcagagtcaaggcgtaaacgtagagaaacaaaggaaagacgagagaaagagcgacgggaacgagccgaagcctggcaggagcaaaagaagcgtgatctggtttatctgggggagggtgtgtctgccggcctcaacaatactgaagcaaatctggccaggcttcaatctaacaaacttcccgtcctgtcgacagcggccgagatcgctactgctatggagatcaccgtcgggcaactccgatttcttgcattttctcggcgcacttcccaaatctcccactatatcaggttcaagattcccaagaaaaccggcggcgaacgcctgataagcgccccaatgccgagactcaagcaagcccaacactggattttgaccaagatacttgaaaaaatcgagccccatgcagctgcacatggtttccgccaggagcggagcattatgacaaacgcccaacctcacgttggggccgagattgtcattaacttcgatctgaaggacttttttcccagcatctcctacaaaagagtgaagggcctcttcaggagttttggatacagcgaggccgccgcaacaatcttcgctctgctgtgtacacagcctgaaattgaagaggttgagctggacgggaagacatactatgtggctcagacggagaggcatctaccacagggctcccctgcgagtccggcaataaccaatctgctgtgtaggcgcctggacagacggcttacccggatggcccaggagctagattttgtgtacactagatacgctgacgacctcacctttagctgcgggtcagataaccccagaatttgcaatctactgaggcgtgtggaaagcatcgtcgcccacgagggtctgacaattaaccaggaaaaaactaggattttgcggaagtctaggcaacaggaagtcaccggaatagtggtgaatgagtacccaaatatcgaccggaaaactctgaaacgcttcagagcaaccttatttcagatggagaaagatgggatcgcaggcaagaagtggggcaattctgatgacgtcctcctcgccatcgctggattcgccaattttgtgaaaatggtgaaccctgagaagggagctgcttttcaggcgcagatacaaagaattagacagaagtggctcggagagatccctgacaccactgacacctcgcctcagggtataatcgtggaatgcttcaagcaggggagtaagctgcgcatgcgggtgattagcccaggctataatccagattggaaggttcagttccccaaggctttacgagaggagggagcgaggttcctggtagaggaaatccaggagagtaacggattctatcgtacggtaggcgaaatccgcaaactttga

SEQ ID NO: 13421 - RNA, 1422 nt, synthetic construct
  source 1..1422: mol_type = other RNA
atgactgaacaacagccccggacacggcaggagctttacgatcgcatccgtcagacctctcgcgaggaggttattctcgaggagatgattcgcctcgggttttggcctgcggagggtgaaatccccgctgaccccgctgacgagattcgcagaaggggggaaatagaaagagaactgagcgagctctacaggcagaacagacagctccacaatgaaacctacctcaaaaagcaggtgtacttgcagcgactggaggaatctaaaaggaagagacaagagaacaaggagcgacgtgagagagagcgacaggaacgagcagaggcatggcgtcagcggaaggagcaggagatagtctacttaggcgaccgcgtgagcgccggacttaacgatacggagtataaccaggagaggctggaaagctattcacttcctgcttataacacagcccaggagattgccgacgctatggggattagtatcggcgaattaagattcctggcattttctcggaagacttcccttatcactcactacgtcaggttcaagatcccaaaaaagaaaacaggggaccgcctgattagtgcgcccatgcctagactcaagaaagcccagcattggatcctgaacaacatcttggagaaaatccctctccacaacgccgcccacggctttagacctggacatagtatcgttacaaacgcccaaccccacataggtgcagaagtgattatcaacttcgacctgaaagactttttcccatccatctcctataagagagtgaaaggtctattccagtccctgggatacagcgacatcgctgctaccatctttggtctaatctgtacagagccagaggtagtggaagtggagctggatggcaaaaattattatgtagcactctccgagaggcatctgccacaaggggcgccgacctctccagctattactaatatcatgtgccgccggttggacaggcgattagaacagatggcccagaagttgggctttgtgtacactcgctacgccgatgatctgacgttctcaaccagcggcgagttcaggcggcatatttgcaatattcttaggcggacagagtcaatagttgatcacgaggggttcgtaatcaacgaagagaagaccagaatcatgcgtaataccaatcagcaggacgtgactggcgtggtcgtgaacagcaaactgaatgtcgataagaaaaccttgaagcggtttcgggcaacgttatatcaaattgaaaaggatggactggaaggcaagcactggggccattcggggaatctgctggcctcaattcaaggattcgtgaattacgttgccatgataaatccggaaaaaggcgcagaatttcaagctcagatagaacgcattaaagaaaagcacggaaggggaaagaagagtgtctga

SEQ ID NO: 13422 - RNA, 1401 nt, synthetic construct
  source 1..1401: mol_type = other RNA
atgactgaccaaccccggaccagacaggaattatatgaccgtattcgcgaaacaagcagagaggaagtcatcctcgaagagatgatccgcctgggattttggccggctcaaggggaaattccccaagatcccgctgatgagattagacggagaggcgagctgcagaaagaactcaatgacctgtacaaacagaatcgccagctcaacgatgagaaccttctaaagaaacagctgtacaagcagcgcctcgccgagtcacgccgaaaaaggcaggagacaaaggaaaggagagagagggagaggctcgaacgcgcagaagcctggcgtcaaaaaaagcaacaggacatagtctaccttggcgatcgtgtgagtggaggacttaattacaccgattgcgacgaacagaggctacagagctatggcctgcccatctatgggaccgcggagcaaattgcaaccgcaatggggattaccatgggccagctgagattcctggcctttagtaggaaaacgtcaccaatttctcactatatccggttccggatacctaaaaagactggaggagatcgaatcatctctgctcctatgcctcgcctgaagaaggcacaacactggatccttaataatatcctggagaaggtagagttgcacaacgctgctcacggattccgcccaggtcggagcatcgtgagtaacgcccagccacatattggtgccgaggtggtgataaacttcgacctcaagaatttctttccttcaattagctaccagcgcgtgaagggcctgtttatttccttggggtactccgaagccgccgcgactatttttagcttgctgtccacggagcctgacatagaagaggtggaattagacggaaaaacatattacgtagccttgtcggatcggcatttgccacagggcgctcccacttctccagccatcacaaacatcctctgcagacgacttgataggaggctgacacagatggctgaaaatttaggtttcacgtatacccggtatgccgatgacctgactttttccgcgtccggtgataatagaaggcacatttgtaacgttctgcggagaaccgagtcaatcgttgagcatgaggggttcgtgataaacgaggaaaagactcgtatcctgcgaaactctcggcagcaggacgtcaccggggtcatcgtcaacgacaaaccgaacgttgacaaaaaaacactgaagcgatttcgggccacactataccagattgagaaagatgggctcgagggcaagaggtggggcaatagctctgacctgatcgcaagtatccagggctttgctaatttcgtggcaatggttaaccccgaattgggcgcagagttcaaggaacaggtgaagcgaataagagagaagtacaagtga

SEQ ID NO: 13423 - RNA, 1413 nt, synthetic construct
  source 1..1413: mol_type = other RNA
atgtccgatttgccacagccgcggacccgccaagagctgtatgatcggattcggcagacttcacgggaagaggttatcctcgaggaaatgataagattgggcttttggcctgcagagggaactgtgccagaggatcccgccgatgaaataagactcaggggggagatttggagagagctgagcgatctatacaaacaaaatcgcacccttcataatgaagccgagctcaagaagcaggtctatcagcagcggcttgccgaaagtcgccgaaaaagacaggaaacaaaggaacgaagagagcgtgagcggctcctacgtggcgaagcctggaggcagaaaaagcagcaggatattgtttatctgggggatcgtgtgtccggaggcctgaattataccgagtgtgaccggcagcgactccagtcatacaacctccccgaatatggcaccgctgagcagatcgccgcagccatggggattaccataggccaactgaggtttcttgcattcgatcggaagacttccactgtgtctcattacgtgcgctttaagattcctaagaaaactggaggggacaggataatcagcgcccctatgccgaggttaaaacaagcacagtactggatcctgagcaatatcctcgaaaaggtcgagcttcacgacgccgcgcatggttttagaccaggacgctcgatagtttctaacgctcaacctcatgtcggagccgaggtggtgataaacttcgacttaaaggatttcttcccatccatttcttaccagaggattaagggtgtgtttagaagtttcggctattccgaggcggctgctacgattttcggactgttatgcactaaacccgacatcgaggaagttgaactggacggcaagacgtactacgtcgcgctctcagagaggcacctgccacagggagctcccaccagtcctgccatcacaaacatcctgtgccggcgcctggaccgtaggttgtctggtatggccgagaacattgggttcgtgtacacaagatatgctgatgacctgacatttagtgccagcggagataacctgcgccacatctgtaacattcttcgccgaacagaatctattgtggctcacgagggcctggcaatcaatgaggaaaaaaccaggatcctgcgcaaaagcgggcaacaggaggtcacgggggtagtagtcaacgaaaaacccaatgtagacaggaaaatcctaaagagatttcgagcgaccttgtaccaaatcgagaaggacgggttggagggcaagcactggggtaattcacccgacctgatcgctagcattcagggttttgccaatttcgtggctatgatcgaccctcagcagggcgcagcattccagcagcaagtgcggagaatccgagaaaaatacaggtccacatga

SEQ ID NO: 13424 - RNA, 1404 nt, synthetic construct
  source 1..1404: mol_type = other RNA
atgagtgaccaaccacgaactcggcaggaattatacgaccgtatacgccagatgggaaaagaagagtttatcctcgaggaaatgataagatatggcttctggcctgcgcagggagagattccccaggatcccgccgacgacataagacggatgggtgagatccgccgcgagctagacgagctgcgacagcaatcctcaaggctccacaatgagaaggagttgcggaagcagctcctgaagcagagattggcagaatcaaggagaaagaggcaagaaacaaaggaaagacgagagcgagagcgccaagaaagagccgaagactggcggcagaggaaagaacgcgagattctttacctgggcgaagatgtaagcggtggcttgaattacaccgagtgcgatgaagagagactgcggtcgtacggcctgcctctgtgtggaaccccctacgagatcgcagccgccatgggtattaccgtggggcagctccgcttcctggctttctctcgtaaaacttctacgatctcccactacattaggtttaagattcccaaaaagacagggggcgagcggctgataagtgcccctatgccgaggctgaagcaggcccagcactggattcttggaaacattttggagaagctggaactgcatgatgccgcacatggtttccggcgcgaccgctctatcgtgtctaacgcacagccacacgttaagcgggatgtgatcatcaatttcgatctgaaagactttttcccttcaatctcctacaagcgggtcaagggattattccatagttttggttattctgaagctgctgccacaattttcggccttctctgcacgcagccagacatcgaggaggttgaactagatggcaaaacttattatgtcgctctgaccgaaagacacctgccacaagggtcacctgcttccccggctattacaaacctcatgtgtcgcagattggatcgccggctcacatccatggctgatgaactggggtttgtctacactcgttatgccgacgatttaacctttagtgcaagcggcgactcactaaggaatatctgcaacatccttaagagaacccagagcattgtcgcacatgagggcttcacaatcaacgagcagaaaacccggattctgcgtaaaaatagacagcaagaggtgactggcgtcgtggtgaacgattaccccaacatcagcaagaaagagctgaaaaggtttcgagcgaccctctttcagattgaaaaggacgggcttgagggaaagcactggggaaattccaataacgtgatgagcagcatacaagggtatgcgaacttcgttgccatggtaaatccacagaaaggggtggagtttcaggaacagatcaggaggatcagggacaaatatcgatgttga

SEQ ID NO: 13425 - RNA, 1413 nt, synthetic construct
  source 1..1413: mol_type = other RNA
atgtctgaccaaccccgaactcgccaggagctgtatgaccgggtccggcaaattggtaaagaacagtttatcctggaggaaatgatcagatacgggttttggcccgcgcagggggaaatccctcaggatcccgctgatgaaatcaggaggcgcggagagttacagcaagagctgaacgccctgaagagcgaaaacagacagttgcacaatgaacaagccttgaggaaacaaatgctgaagcagcgacttgaagaaagccgacggaagaggcaagagacgaaggagcggagggagcgcgaaagaatcgcaagaaccgaggcttggcggcagaggaagcagcaagaaatcccctatctgggcgacggcgtctcaggtggactgaattacaccgactgtgatgaagagaggctacaggcctacgggctccctgtctgccagacaccagagcagattgcctctgccatgggaatttctgtgggtcagctgcgctttctggccttcagtagagatacttccactatctcgcattatatcagattcaagatcccaaagaagactggaggagaacggctcatctccgcaccgatgccccgtctgaaaaatgcgcagcactggatacttgttaacattttggaaaagcttgagctgcatgacgctgcacacggcttccggcgggataggagcatcgtgtccaatgcacagccgcacgtgggagccgacgtgattataaacttcgaccttaaggacttctttccatctatttcttacaaacgggtaaaaggcctcctacagtcctttggctacagtgaggctgccgccaccatcttcggactattatgcacacaggcacaggtggaagaggtggagctcgatggtaaaacctattacgtggctaccacagaccgccatttgccacaaggctcccctgccagccctgccatttctaacctcctgtgtagaagactcgatcgcaggcttatgggcatggctgagcagctcggctttgtttatactcgttacgctgacgatctgacattttcggcgagtggagaaagtctgtgcaatatctgtaatgtcctgcgaagaaccgagtcaattgtagcccacgaggggttcgctattaatgagcagaagaccagaattctgcgcgggaagtcatcccaactcgaggtgacaggtatcgtggttaatgaacgtccaaacataagcaaaaaagagttgaagaggttccgcgcaacgttataccagatagaaaaagacggccctgaaggcaagcattgggggaacagctcagatgtgatggccagcatacagggcttcgcaaactttgtcgctatggtaaaccccgagaagggggcggagttccaggagcaggttcagcggattaaagagaaatatgggcgtcgccgatga

SEQ ID NO: 13426 - RNA, 1410 nt, synthetic construct
  source 1..1410: mol_type = other RNA
atgagtgatcaaccgcggacacgccaggagctgtatgatagaattcggcagataggccgggaggagttcatcttagaggagatgataaggtacggtttttggccagcccagggaaccattccagaggacccagcagacgagattagacgtcgtggggaacttcagcgggagctggggaagctcagggaagagagcaggattctgcacaatgaggaagccctgagaaaaaggttgctgcaggaaagactggcagagtcacgcagaaaaagacaggagactaaagagcgaagagagaaggaacggcagcaacgagccgatgcctggcgtgagaaaaaggcccaagaaatcacttacttgggcgagggggtgagcgggggactgaacaacacagacggggacgaggaacgacttcagtcttacggtctgccgatctgcggaaagactgcccagatagccacagctatgggtattactgttggggagctgaggtttttggcatttagcaggcaaacctctactatcacccactatatacgcttcaaaatacccaaaaagacagggggggaaagactgatctcagccccaatgcctaggctgaagaatgcccagcactggattctcaataatatcctcgagaaactagagctgcatgacaccgcgcatggcttccggcataaccggtctatcgtttccaatgctcagcctcatgtgggtagtgacgtgatcatcaacttcgacctaaaggatttcttcccttctatttcatacaaacgcgtaaaaggcctctttcattccttcggctacagtgaagccgctgcgacaatttttggtctgttgtgcaccgagcccgaaatcgcagctgtggaactagatggtaaaacgtattacgtcgcactcacacaccggcaccttcctcagggaagccctgctagtcccgctatcacaaacctcttatgtcgaaggctggaccggagacttagcgaaatggcggaaaatctgggctttgtgtacacgcgatacgcggatgatctcaccttttccgcctcaggcgactcgttacgtcacatttgtaatattcttcggagaacggagagcattgtcacccacgagggctttgcaattaatcccgaaaagactcgaatcctccgcaagaaccgccagcaagaagtgactggaatcgtggtcaacgagaagccaaccatcgccaagaaggaactgaagcgcttccgcgccaccttgtatcagattgaaaaggacggaatcgctggcaagcagtggggaaattccgatgatgtcatggcttctatccaaggctatgcaaacttcgttgctatggtaaaccccgaaaagggagccgagttccaggaaaaagtgaggaggataaaagagcgctatggcgcaaactcctga

SEQ ID NO: 13427 - RNA, 1401 nt, synthetic construct
  source 1..1401: mol_type = other RNA
atgaccgaccagcctaggacaaggcaagaactttacgacagaatcagggagatcggcagagaagaattcattctggaagaaatgatcaggtacggcttttggcccgctcagggggagattcctcaggaccccgctgacgagatccgaagagagggagaaatccgacgcgagctcaacgagctacaacagcagagtcggcaactccagaacgaaaagactctacgtaagcaagccctgcagcagcggctggccgaatctcgacgcaagcagcaggagacaaaagagcgccgggagagagagagacaacagaaagcggaaaactggcagcagcggaagcagcaggagatcctctacctgggcgatggcatttcagggggtctgaacaactttaatgccgaaattgagaggttgcaatcttacgggttgccgatatgcaataccgccgagcagatcgccgcagctatcaacattaacattggcgagctccggtttctggccttcagccgtaaaactagcactatcagtcactatatccgtttcaagattccaaaaaagaccggcggagatcgcctcattagcgctcccatgccaagacttaaaaaagtgcagcattggatacttgacaacatcctggagaaaatggaattgcacaccgcagcccacggttttaggcctcatcattcgatcgtgacgaacgcgctcccccatgtgaaggcggaagttatcataaatttcgacctgaaggacttttttccgtctatctcatacaagagagtcaaggggttgtttcagtccttcggatacgcggaagctgccgctacaattttcggactgttatgcacggagcccgagattgaacaggtggagttggacggaaaaacctattttgtcgctttaacagagcggcacctgccacaaggttcccccgcatccccagccattactaatctgctgtgtcgccggctggataataggctgaccacaatggcagaagacatgggcttcgtatatacacggtatgccgatgatttaaccttttcagccagcggggacagtctccggtacatatgtaacatcctaaagcgaactgagtctattgtcgcacacgaggggttcaccattaatcagcagaaaacgaggatacttcgaaagaatagacagcaggaagtgactggtattgtggtaaacgatagacctagcatatcaaagaaggagcttaaacgcttcagggcaacactgtatcaaatcgagaaggatggacctgaggggaaacactggggcaattccagcgatgttatcgcatccatccagggctttgccaatttcgtggctatggttgatccagaaaagggacgcgagttccaaaaacaggtcaaacagataaaggaaaagctccgctga

SEQ ID NO: 13428 - RNA, 1398 nt, synthetic construct
  source 1..1398: mol_type = other RNA
atgactgatcaaccgcggacccgccaggaactctacgaccgtatccgatcaactagcaaggaagaatttatactggaggagatgatcagatttggcttttggcccgcgcagggcgaaatacccgaagatccggcagacgagattcggcgtatgggcgaaatccgcagggagttagacgagctgagaagggagaactctctgctgcacaatgagcaggcccttcgaaaggagatgctgaagcagcgcctgattcagtcaaggcagaagcagcaggaaacaaaagaaagaagagagaaagagcggcaggagagagcggaaaattggcaacagagaaagcagcaagaaatatgctacctgggagatggggtatctgctggcctgaacaataccaactgcaacgaagaacgtctgcagaattaccaactaccactttgcaatactgccgcagagatcgccgccgcaatggagatcagcgttggccaattaaggttcctggcctttgaccgaaagacatctcatatctcgcactacatccggtttaagattcccaaaaagacaggcggcgaacgcctcatttcagcccctatgccaaggcttaaagcagcacagcactggatcctcgtgaacattctcgaaaaactggagctgcacaattgtgctcatggattcaggtcttcacacagcatcgttacgaatgcccagcctcatgtgggttccgaggtgattatcaactttgacttgaagaacttcttcccctctatttcctacaaacgggtgaaagggctctttcagtccttcggatatagtgaagcggcagccacaattttcggattgctgtgcacggagcccgagattgaggaagtggaactcgattccaagacctattttgttgccgtgaccgagaggcacctgccacaagggagtccagcttctcctgctatcactaacatcctatgtagaagactcgaccaacggttggatcgaatggcttcggagctcgggttcgtctataccagatatgctgacgacttgacattcagcgcttccggggactccttgcagaacatctgtaacattctgcgccataccgagagcatagttgcccatgagggatttgtcatcaacgaagaaaagacacgcattctaaggaagaatcgccagcaggaggtcactggcattgtggtgaacgaacacctgagtatcagcaaaaaagtccttaaacgcttccgggcaaccttattccagatagagaaggatgggcctgatggtaagcgatggggtaatagcgaggatgtcattgccagtatacagggattcgccaacttcgtggcgatggtgaatcctgagaaaggtgctgagtttcttgagcaagtacagaggatcaagaataaacggtga

SEQ ID NO: 13429 - RNA, 1404 nt, synthetic construct
  source 1..1404: mol_type = other RNA
atgaccgatcagccccgcacacgccaggaactgtacgagaggatctggcagataggcagagaggaggtcatcctggaggagatgattcggtacggtttctggccagctcaaggtgagatcccacaggacccggccgacgagattagaagaaaaggcgagattcggcgggagttggatgaactgagacgcgagacgtcccgattacagaacgagcaagctttacgaaagcagatgctaaagcaacgcctagccgaatcaaggcggaaaagacaagagacaaaggaacgtcgagagagggaacggcaagaacgcgcccaggcctggagggaaaagaagcagaaagagattatttatctcggcgaggatgtcagcggaggcctgaatcggaccgaaggaaatctggagagacttcaatcaaacagtttgcctccctgccaaacagcagaagacatagccggcgcaatggggatctccgtaggtgaactgaggtttctcgcgtttgaccgaaagacatctaccacttcccactacatccgttttaagattcccaaaaaaaccgggggagagagattgattagcgcacctatgccccggttaaagcgcgctcagcattggatcctgtcaaacattctcgagaaactggagcttcacgacgccgcacacgggttcagaagggagcggtcaatactgactaatgcccagccgcatgttgctgccgatgttatcattaacttcgacctgaaggacttctttcccagcatttcttatcgccgagtgaagggcctcttccagagttttggctattctgaatccgcggggaccatctttgccctgctttgtacagagccagagatcgaagaagttgagctcgacggaaagacgtacttcgtggctattagtaataggcatctccctcaggggagcccagcatctcctgccattactaatttgctctgccgacgtctggatcggaggctggtccagatggcacaagagctggggtttacctacactcggtacgctgatgatctgacctttagtggcgctggtgaatcgctaaggcatatctgtaacatacttagaagaaccgaatccatcgtggcccacgaaggctttgctatcaacgaacagaaaacacgcatacttaggaagaaccggcagcaggaagtgacaggaatagtggtgaacagccaccccaacatctctcgcgagacgctgaagcgcttcagagccactctgtatcagatcgagagggacggactcgagggtaaacactgggggaatagcgatactctcctggcctccttgcagggattcgctaatttcgtggcaatggtaaatcctcagaaaggcgcggaattccttgaacagatccagcgtatcaaagagaagtatatgttgtga

SEQ ID NO: 13430 - RNA, 1416 nt, synthetic construct
  source 1..1416: mol_type = other RNA
atgaccgaccagccgcgtacccgccaggaattatacgataggattcgccaggttggtcgagaagagtttatcctcgaggagatgattcggtacgggttctggcctgcccaaggcgagatgcccgaggatcctgccgatgaaatcaggcagaggggcgagatacagcgagagttgaatcaactaagataccagaatcgcaacttacacaatgaacaggccctgagaaagcagatgctcaaagaaagactagccgagagtaggaggaagcagcaagagacaaaggagagacgggagcgggagcgtcaagaaagagcagcggcgtggcagcagcggaaacaacaggaaatcctgttcctcggggagggggtcagtggagggctcaaccagaccgaagccaatcgggagagactgcagtcctacggcctgcctgcgtgggaaaccgtcgagcaaatggccgccgctatgggcgtgtcagtgggagaattgcgcttcctggccttctcaaggcccgctgccaaaatctcccactatattcgcttcaagattcccaaaaagaccgggggtgaaagactgattagcgcccccatgccacggctgaaaaaggtccagcacggaattctggaccggatcctttcgaagatcgagttgcatgacgccgtgcacggatttaggcgaactaggagcattgttagcaacgcccgaccccatgtgggcgcagaagctattgtgaactttgacctcaaggacttctttccttccatctcttaccaacgggtgaaaggcctttttcggagctttgggtacgcagaggccacagcaaccatcttggctctgctgtgcacacagccagagatcgaagaagtgcagttagatggccaaatctactgtgtcgcgattggtaatcgccacctgccacagggtagtcctgcttctcctgcgattagcaacctcctttgtagacggctggatcgcaggcttatgggcatggcaactggttttgggttcacgtatactcggtatgctgatgacttgacattcagtgcttctggagaaaatcttcgccatatatgccgaatactgcgccgaacagaatctatagtagctcacgagggatttactatcaacgccgagaagactagaataatgaggaaacaaaggcagcaggaggtaacgggcgtggttgtcaatagccagccaaacattgccaaggagacactgaagagatttcgtgctaccctctatcagatggagaaagacgggccggagggcaaacattggggcaactccaccgacgccatcgcatccatccagggattcgcaaacttcgttgctatggtgaatccatcaaaaggagcaaagctgcaggcacaggtgaaacgtatcaaggaaaagtatggtagaaagtcagctccctga

SEQ ID NO: 13431 - RNA, 1401 nt, synthetic construct
  source 1..1401: mol_type = other RNA
atgtcagagcaacctcgcacgaggcaggagctatatgaccgacttcggcagtccagcaagcaggaatttatactggaggaaatgattcgtctcggcttctgggctactgccgaacagatcgctattgatccaaccgatgagatgaggaggctgggagagatcactagagagttgcagcagcttcggcaagaaaatgcaagactggggaatgagaagaaactccgacaggagttgctgaagcagcgccttgcagaatctaaacgaaagcagcaggagacaaaggaacgccgcgagagagagcggattgaaaaagcacagaagtggcaggaacagaagcagacagggatcagttacctgggagcggaagtcagcggcgggctgaacaacacagagtcgaacgctgagcggctgtctaactatgggctgcccagacttgaaaatgccggtcagatcgccgcagccatgggcatatcagttggccagctgcgctttctcgctttctcccggaagacctccaccatttgccactatatccgctttaccatccctaaaaagaccggcggatcacgcagcattagcgcaccgatgcccaagctcaaagagtctcagaaatggattttagtgaacatcctcaacaagctggagctacatgaggctgcccacggctttagacgtgaccggtccattgtgagcaatgcgctgccacacgtgaaacaagatgtgatcatcaatttcgacctcaaagactttttcccatcaatctcgtaccgcagggtaaaggggttatttcaatctttgggatatagtgaggccgccgcgaccatcttcggactgctgtgtacagaattggaagtcgaggccgtggaattagacgggaagacttactacgtggctaacagcgacaggcatttgccgcaaggcagtcctgctagtcccgccattactaacctgctgtgcaggagactggatcgtaggttaactttgatggccgaaaacctcggtttcacatacacacgatatgcggacgaccttacgttctccgcaaccgggtctaacctcagacacatatgtaatgttctcaaacggacagaagatatcgttaatcatgaggacctaaccataaatcagcagaaaacccggattattagaaaaagccgacagcaagaggtcaccggagtggtggtcaactcccaccccaatatcgctcgggagacgctgaagaggttcagggcaactctttaccaaattgaaaaggatggtctggagggcaagcactggggcaacactacagatgttatggccgctatccaaggatacgcaaatttcgtgaaaatggtaaatcctgccaagggtgccgagtttatcgcccaggtcgaaagaataaagcataaatatccatga

SEQ ID NO: 13432 - RNA, 1413 nt, synthetic construct
  source 1..1413: mol_type = other RNA
atgagtgaccagccccgtacaaggcaggaattatatgatcgcattcgggagatcgggaaagaggagttcgtactggaggagatgattagatatggattttggccagccgagggcgaaatgccagaagaccctgccgatgagatcaggcgtagaggcgaactgcagcgggagttggcccagctacgacaggaatctcagaagcttcaaaatgagcaagcggttcgtaagagattgctcaaggagcgactggcccaatccagactcaagaggcaggaaaccaaggaacgtagggagcaacagcgacttgaaagggcccaggcttgggctattcggcagcagaaggagattctgtatctgggtgaacaggtcagtcctggccttaatcacacggaatccgaccgcattagactacagacctacaagctgcctctgctatcaaccgcacaagacatcgcacaagctatggggatcgcccttggacagctgaggtttctggccttcaatagaaagactgctactatttcacactatatccggttcaagatcccgaaaaaaacaggaggagagcgcctgattagcgcacctaagcccaaactcaagcaggcacagcactggatcttgtccaacatcttagaaaaactcgagctggataacgccgcacatggctttaggcgcgataggagcatagtgacgaacgcccaacctcatgtgggggccgatgtcatcatcaacatcgacctgaagaacttctttccaagcatcagctacccccgcgtcaaaggactcttcagatcttttggatactcggaagcagctgctacggtgttcggtcttttgtgtactgaggcagacatagaggaggtcgagcttgacagcaaaacctactacgttgctaccagcgatcggcatttaccccaaggctccccggcatctccagccataactaatatattgtgccgccgactcgaccacagactcactacagtggctaccgacttgggctttatttatacacgatacgccgatgatctgactttcagtgcctcgggcgaaagtctgaggttcattgggaaactgctcaagcgcacctcatctgtggtcgcacacgaagggtttacaataaaccagcagaaaacacggattttacggaagagccagcagcaggaagttacaggtattgtagtgaaccatcacctgaacatctcccggaaacagctgaaacgctttagagcgaccctgtatcaaattgagaaggacggccccgattctaagcattggggtaactcctctaatgtgattgccgcgatacaagggtacgccaatttcatcgctatggtgaatcccgagaaagcggccccattccaggctcagatccagcggatcaaggacaaatggctctcaaatcagcactga

SEQ ID NO: 13433 - RNA, 1758 nt, synthetic construct
  source 1..1758: mol_type = other RNA
atgaatacgaaccacttaatcacgataggcatcagcctttatcaggagaacaagtatagtgaggcgattgactgttttaaccagataattgccaataatcccaactccgctaccgcttaccactataggggactggtgcgtcggagacaacgcgatgaccagggcgctatcgctgacttacagaaagccgatacccttgtggccgacaaagaatacactaagctgtgcgagaaaatacagaacctgatcggaagggactacccacacaaatacaacaatgatgacaatcaggagttcgattacatcgagtacgaggataactggtacgctgacgaggatgagatcgcagcggcagaccctaactatatcccttcatccgagtttctgtcatgtgctgaggaggtttaccagctgatctcctacgagcttaaccagttcgagaattttctgagtaaccggctcaagactatcgacttactcagaaagaaaagagcggagaatagtaggtttaaccaagagcgactagagagcaaaaaccttcccatctataacagtcatgaggaaattgcccaggccatgggtatctctgtgaaaggtcttagattcctgactttctcacgaaaagggtatcactacattcgatttcaaattccaaagaagcccagcggataccgccagatatccgcccccaagaaattgttgaagaaagcccaaaattggattctggataacatcctggaaaaattggagcttcatgatgctgcacacggatttcgtctgaaacattctattgttaccaatgcgcagatacatgttggcaaagaagtcattatcaatatcgacctaaaggactttttcccgtctatcagctataaaagggtaaagggcttgttcaaatctttcggatattctgagacagcaagtaccatttttgctctgatttgcactgagccgaagatcaaggaggtagaaatcaatgggcagatcaattccctgctgagctggacggataggtacttgcctcaaggcgccccttcttcgcctgcaattactaacatcctctgcaggcggctggatagacggctgaattttatggcaaagcaatatggcttcgattatacacgctacgccgacgacctgaccttttccgcatccggggaaagcctggtgaacgtcaataacatcctcaagctcaccaatctcattgtcaagaaggaagacttcgagatcaatgagaataaaacccgggtggtccgcaattaccgcaagcaggaggttaccggaatcatagtgaatgagaagctgaacatcagcagagataagttgaaaacatttcgggccgtactctataagatcgaaaaagacggcttacagaactatacatgggggcaatcacaggacataattgccgcaattgaagggtttgccaacttcgtggctatggtgaatccagaaaaggggggcaagttcattgaacagatacaccggattaaggagaaatatgtgcgtaaaagagaaaagatcgtgctggtccatcaggaattcttgacacagagcaacattataaagcagattaacgagaaactccgcgaagtgaggtttaacaagattgaaaagcgacaatacctccaggaaacctacaataagaaatacctacaggaactgactgccgaggaactcctagaattcctgcactatcttattacactccagcccgaacagttctcattcggtgatacagacgatctgccattctga

SEQ ID NO: 13434 - RNA, 1695 nt, synthetic construct
  source 1..1695: mol_type = other RNA
atggacaactaccaactcatcactatcgggattagcctgtacaaggagaataaatatagcgaagccatcgattgcttcaaccagataatcgcgcaagaccagaattcatccacagcgtatcactaccggggccttatctgcagaaaacagcgcgatgatcaaggagctattaccgatcttcagaaagcagataccctggtggcagaccaggagtacactaacatctgtcagaagatccagaacctaattggtaaagactatagccacagttctaacaacaaaaataacgacgaattctctgatatcgaatatgaaggcacctggcatctcgaacaggaaatttatgatctcatttcctccgagctgaacaagtttgagaatttcctgagttcaagattagagactatcgaacttctgcgaaaaaaaaggggggaaaatagtcagtttaaccaggaaaaattggaatcgaagcatcttcctatatacaatagccacgaggagattgcccaagccatggggatttccgttaaagggttgcggttcctggcattctctaggaaggacaatcattacataaggtttcagatccccaagaagccttcaggttatcgacagattagtgctccaaaaaagttactgaaaaaggcccaaaactggatcctagacaacatcttagagaagcttgaactgcataacgctgctcatggcttccgactgaaatattctattgtgaccaatgcccagattcacgtcgggaaggaagtgataatcaacattgacttgaaggacttctttccttcaatctcctacaagcgcatcaaaggcttgttcaaatcatttggatactctgaaacagctagcacgattttcgccctgatttgtactgagccgaaaattaaagaagtcgagataaatgggcagatcaacagcttgctttcctggaccgatcgttatcttccccagggagcaccaagctctccagctatcaccaacatcctatgcaggcgcctggataggagactgaactttatggcaaagcagtacggctttgactacagcagatacgccgacgacctaaccttttcggcatccggagaatcactcgtgaacataaacaatatcctgaagctgacaaacttgatcgtcaagaaggaggattttgagatcaatgagaataaaaccagagtggtacggaattaccggcggcaggaggtgacaggactgattgttaatgagaagctcaacatatctcgcgataagctgaaaacattccgtgcagtactgtacaagattgagaaggatggcctgcagaattatacttggggtcaatcccaggatataatcgcggccattgaaggcttcgctaattttgtcgccatggtgaatcctgaaaaaggcggaaagtttatcgagcagattcacagaattaaggagaaatacgtgcggaagagggagaaggtggttctggtttatcaggagttcttgacacagagcaatattctcaagcaaatcaacgacaagctccgtgccgtccgcttcaataaaatcaagaagcgccagtacctccaggagacgtataacaaaaagtatctccaagagttagctgccgaggaactcctcgactttctgcacttcctgataaattggcagcccgagcaattcagtttcgatgacactgacgaccccccgttttga

SEQ ID NO: 13435 - RNA, 1800 nt, synthetic construct
  source 1..1800: mol_type = other RNA
atggacctcttcaacgagcctaggaagaagagcaatgtgcttatttacaaccgcaagtatcacgttatcaatatccttctcattaacctgcaatccgtggccttcaccaacaacatgaacactaatcacctaattaccattggaatctctctgtaccaggagaataagtactccgaggccatcgactgctttaacaagatcatcagtacggatagcaattgttgccaggcgtatcattataggggcctggtcctgcgcaagcaacgagatgatcagggggcaatagcagaccttaaaaaagccgacacactcattgccgatcaggagtacaccaacatcttccaaaagcttcagaacctgataggcaaggactattctcactttagtaagaacaatgacaacgatgagttttcttatatcgagtataaggggacttggcatctagaacaggaaatctacgacctgatatcatccgaattgaataagctggagaacttcctgtcctctcgcctgcagactatagaactgttacgcaaaaagcgggctgaaaactcgcaattcaatcaggagagattggagaacaaaaatctgccaacatataactcccatgaggaaatagcccaggctatgggaattagtgtcaaaggtttacggtttctttcatttagtcggaaaaatgatcactacattcgtttccagatccctaagaagccgtctggatataggcagataagcgcaccaaaaaagctactgaagaaggcccaaaattggattctcgataatatcctcgaaaaacttgaactgcatgatgcggcacacggattccgattgaagcactccattgtcacgaacgcccagattcatgttgggaaggaggtcatcatcaacatcgacctgaaagatttctttccctctattagctacaaaagggtgaaagggttgtttaagagcttcggttattcagagactgcatccaccatattcgccctgatctgcactgaggcgaagattaaagaagtggaaattaatggcgagattaatagtctgctcagctggacagaccggtatttgccccagggcgctccttcatccccggctattaccaatattttgtgtagacgactcgatagaaaattaacctttatggccaaacagtacggctttgactataccagatatgcagacgatctgacgtttagcgcttcgggggaaagcctggtgaatgtgaacaatatcttaaagctgaccaacctgatcgtgaaaaaggaagacttcgagataaacgagaataagacaagagtggtacgcaactaccgtcgccaggaggttactggcgtgatcgtaaacgagaagctcaatattcccagggataaactgaagacattcagagccgtgctctacaaaatcgaaaaagacggactgcaaaattacacttgggggcaatctaaagatatcattgctgccatcgaaggattcgctaatttcgtgagtatggtaaatccagaaaaaggtggcaaatttatcgaacagatacaccggattaaggagaaatacggcatcaaaaaggataagatttccgactactctccagttatcaggacacagtcatacatcatcaaccagatatactacaagttgtcaaagcttagctactcaaagaccaaaaggagaatgtatctgaccaaaacctacaacaagcggagcctgcaggagctcacagaagagcaacttgtcgagttcctcaactatctcaagaatctacagagttcctttgacgacttagacgagccccctttttga

SEQ ID NO: 13436 - RNA, 1704 nt, synthetic construct
  source 1..1704: mol_type = other RNA
atggactttaatgatatcctgaatcgaggaattgacctgtataagtcacaaaagtacatcgaggctctcgaatgctttaatcagatcatatcccaggaccctaacagctaccaagcctatcactacaggggcctgattagaagaaagcagcgcgacgatcaaggcgctatcgcggatctgaaaactgccaacacactgatcttcgacggggagtatacaaatatctttgagaagatccaggatttgataggaaaagactacccacatcacagcaacaatgagagtaatgataatgccgacttcatctatatcgaatatggcgggacatggtacattgagaaggaaatctatgagtggatctcggcagacttgaaaaagctcgaatcattcctcagtaaacgccttgagaagatagatctcctgagggaaaaacatcgtcaaaattctcagttcaaccagcagaagttggaaagcaagaatctgccgatttataactaccatgaagaaattgcgcaagccatgggcatttccattaaggggcttcgattcctggctttttcaagaaagcactaccactataaccgctttcagatcccgaagaaaccaagtgggtaccgtcaaatttccgcccctaagaagttattaaagaaagcccagaattggatcttacacaacatactcgagaaaatcgaattgcacgtcgctgctcacgggttctgtctccagcgttcgattgtgaccaacgcacagattcatgtgggtaaagaagtgatcattaatatggacctcaaggacttctttccctccatatcctacaaacgggtgaaaggactctttaagtctttcggctatagcgagactgcctctaccatatttgctcttatctgtacagaacccaagatcaaagaggtcgagatcaacgaagagcctaaatacatcttgtcctggactgatcggtaccttccccagggggcaccttcttctcccgccatcacaaacattctctgcaggaggctggaccggaggctgactttcatggctaaagaatatggctttgattacaccaggtacgcagacgacctcacatttagtgcggccggagagagcctggtgcacattaacaatatcctgaaattgacgaacctgatagtaaagaaggaagacttcgagataaacgagaataaaacgagagttgtccggaattatcatagacaggaggtcaccggtatcattattaacgaaaagctgaacatcagcaaggagaaactgaagacgttccgcgccgttctgtataagattgaaaaagacggtctgcagaactatacttggggtaagtcccaggatattatcgctgcaattgagggctttgcaaattttgtggtgatggtgaatccagagaagggagccaaattcatcgagctaataaagcggattaaagagaaatatctgcggaaacgcgagaagtctgtcctggtaaaccaagagttcataacccagtaccacatcgtgaagcagattaattacgaattgaaggaacttcgattcaacaagaccaaaaaaagacagcatctgcaggagaactaccacaaggcatcattacagcagctaactgaggccgaactgcttgaattccttcattacctaaccaactggcaacctgaggagttttgctttagcgataccgatgatccagttcccttctga

SEQ ID NO: 13437 - RNA, 1458 nt, synthetic construct
  source 1..1458: mol_type = other RNA
atgagttcttgtgacattaactgcatcatacaagacatcgaaggcagcatagaaggagaatttgaacagctggagggcagactgtctagacgtctgaagcattcacaggttttgcaaaagaaacgaatcaataacgcaaagtttgatccagaaaggttgcaatctaataatctccctctttgcaacagtcacgaggccatcgcattagctatggagatttctgttaaagggctgcgctttctggcattctccagaaaaaaacaccactacatcaggtttcagatcccgaagaagaccgggggcaatcgaaagatcagcgctccaacacatctcctcaaaaaggctcagaagtggatccttgagaacattctcgagaatatccagctgcatgaggctgcgcacggtttcaggttgaagcatagcattgcgaccaacgccgagcaccatatcggaaaggaggtaatcattaatatcgacctcaaagacttcttcccttctatctcgtatatccgggtcaaagggctgtttaaaagcttcggatattctgagactgcctctaccatttttggattgatttgtaccgaacccaaaatgaaggaaattgaggcaaacggtaaaaccgcctttctgttgtcatggaccgaacggtaccttccccaaggagcccctaccagtccggccattactaatgtcctgtgtaggagacttgaccgccggttgcactcaatggccaagcaatacggcttcgattatacgaggtatgctgacgatttaactttctccacatccggcgaaagcctgagaaacatatgcaacatatttcagaacactcgtttcattgtggaacaggaagatttcgaaataaatgagcagaagactcgggtcattcggcgctatcagcagcaggaggtgacagggatcgtggtgaacgataaactaaacgtatcccgagagaagttaaagaacttccgcgctgtcctctaccagattgagaaagacggtcttgaaggtcacaattgggggcaaagtgaggacatcattgcctcaatagagggctttgcaaatttcgtgagcatggtccacccagaaaagggcgcaaagttcaaagaacagattgataggatcaaggagaaatacgggagaaaaaaaaacccaaaagtgcccaatgtgtcccagcctctactgtcgcgaagcgatattgttgccctcatagacacgaaatttcaggagctgaagttctccaagatctacacggatatctacctgaacaagatctacaagaagcagtcactgaagcaattaacagaagcggagctgcttgagctcctgcgggatctgacaagtagcccctccgaggacgatgatcgtactcagctgaatttcgtgaagagactcaaagccctaattgcccagcgcatcaggtattatacacgcgctaccaaggactccgacttttga

SEQ ID NO: 13438 - RNA, 1872 nt, synthetic construct
  source 1..1872: mol_type = other RNA
atggctgaagcgaaaattgaggattcacgcaataatatggacatcaatgagctaatagtgcgtgggataagctattatatgcagggtaaatatggcgaggctctagagtgtttcaatcaggcaatttgccacgacttgaattgtgttcaagcttatcactacagaggcttaattcgccggagacaaaccgacaagcaggaagcaatagaagatctgcagcaggcggctcgactcctgaatgataaggaatacaccaccatcagcaacaacctgcagatatttatcgagcagaactgtttcaagaagactgagaatgtgaaatcagacgacagcgatcaaaacctgatctttcataatgagaactggtacgagtgctacgatgaccttgtggatgcctttcccgatgagtttatgtcatattgggagattgaaagtctgaggcaggagtgtgagagcatcgtggaggaagaattcgagaaactcgaaagatggctgagccggcagttgaaggattcacaggtccttcagaaaaagcgaatcaacaatgctaagtttgaccgggagaggttgcaatccaataatctgccactttgtaacagccacgaggcaatagcacaggccatgggagtatctgtaaaaggcctgcggtttctggcgttctcccggaagaagtcccactatattcgttttcagatcccaaagaagacgggcgggaacaggaagatttctgcccccacccaccttctgaaaaagacccagaaatggattctcgaaaatattttggagaagatccagttacacgacgccgctcacggttttcgacttaaacattctatcgtaaccaacgccgagcatcatgttgggaaggaggtcattataaacatcgacctcaaggacttcttcccttccattagttatatccgtgttaagggactgtttaagagctttggttatagcgagactgcatcgactatcttcggcctgatctgcacagagcctaagattaaagaaattgaggtcaacggaaaaatcgaattcctactcagttggacagaacgctacctgcctcaaggcgcaccaacttcaccggccataacaaatgtcctgtgcagtagactggacaggcgcttacacagcatggccaaacagtactctttcgattacactcggtatgccgacgacctcacgttctctgccagtggtgaatccttggataacatctgcaaaatttttcagaacacacggttaatcgtggaacaggaagatttcgagattaacgagcagaagactagggtgattagaagatatcaacagcaggacgtgaccgggattgtggtgaatgacaaactcaatgtgtctagggaaaaactgaagaacttccgggctgtcctgtaccaaatagagaaagacggcctcgaggacaggaattgggggcagtccgaagatatcattgcctcaatcgagggcttcgcaaatttcgtgtcgatggtgaatcctgaaaaaggggccaaatttaaggagcagattgaaaggatcaaggaaaaatacggaagaaaaaaggaggcgaagatcaacaatatttcacaacccattatgaaccagtccgatatcgtcgctctaatctatacaaagctgaaggaacttcgctgctctaaaaaggtgaaacagatctacctgaacaagatatacaacaagcaatctctgcagcaacttaccgatgaggagctgttggaagtcctccgagatttgacaacatggagctccggagaaagtggaaggcgccagatcaacttcgttaagaaatacagagccctctcctgtgagtacatccgacatgatacgcccgaccgcgaggacgttaacgaattttga

SEQ ID NO: 13439 - RNA, 1833 nt, synthetic construct
  source 1..1833: mol_type = other RNA
atggatatcaacgaacttatcttccagggcgtcagctatttcaaacagcgtaactatgacgaagcgttagagtgcttcaatcaggccatatcctgcgacctgaactgtgtccaagcataccattaccggtgcctgattcacaggcgacaacaaaataaacaggaggccctggagaatctgcagcaggcaacaaaacttcttaacgacaaggagtacactaccatctccaataatctacagattctcatcgagcaagattgctttaaaactagcgagaatgttcagtctgataacagcgaccataatctcattttttacaacgagaactggtacgaatgctatgatgatctggtcgacgcgtttcccaatgaatttatgtcctactgggaaatcgagagtcttcgacaggagtgtgaaagcatcgtggaggatcagtttctcaggcgggagtgctggctgagtcgacaactaaaacagagccagattttgcaggagaaacgcattaataatgccaagtttgactcagagcggttacagtcccagaacttgcccctgtgtaactctcaggagtcaattgcccaagctatgggtgtgtcagtgaaaggcttaagattcctcgctttctcccgaaaaaaataccactatatccggttccagatccctaagaagacgggagggaatagaaaaatctccgctcccacgcacctgctgaaaaagacccagaaatggatcttagagaacatactggagaagatacaactgcatgacgcagctcacggcttccgtctgaaacattccatagttaccaacgctgagcctcacgtaggcaaggacgttatcatcaacatcgaccttaaagacttcttccctagtatcagctatcgtagagtgaaaggactgttcaaaagcttcgggtactccgagacagcatctaccatttttgggctgatttgtacagagccaaagattcaggaaattgaactgaacgggaaaaccgaactcttgctttcatggaccaagcgctacctcccccaaggggcaccaactagtccggccatcacaaacatcctctgtcacaagctggatcgcagactttatagtatggccaaacagtatggatttggctatactaggtatgctgacgatctaacgttctcagcctcgggggagtcactcggacatatcttcaatatctttcagaacacccgctgtatagttgagcaggaggatttcgacatcaacgaacagaagactagagtgatccgccggtatcagcagcaagaagtgacaggtattgtggtgaacgagaagttgaatgtctcgagggagaaattaaagaattttcgggccgtcttgtaccagattgaaaaggatgggctcgaaggtcacaactggggacactctggcgatattatagcctctatcgaaggcttcgcaaactttgtaagcatggtaaaccctgaaaagggtgcgaaattcaaggaacaaattgatcggataaaggagaagtatggcaggaagaatcaggctaaggtgccaaacgtgagccaaccgattctgaatcagtctgatattgttgcccagatccacacacaactaaaggagttcagatttagcaagcgcataaagcaaatttacctgaacaagatctacaataagcagtctctgcagcagttgactgacgaggaactgctggagctcctcagggacctgaccacctggagttcagtcggacatggcagaaagatggtgaattttcagctgaagtacataggattgtcctgcgaaattaggtctgacacaccaaatgaagaagacgtgaatcagttttga

SEQ ID NO: 13440 - RNA, 1731 nt, synthetic construct
  source 1..1731: mol_type = other RNA
atggacataaacgaactgattgtcaagggagtctcctactatacacagagaaactatgacgaggcaattgaatgttttaaccaggctatctctcgagatattaactgcgtgcaggcttatcattacaggtgtcttattcatcggaggcagcaaaataagcaggaggctctggagaatcttcagcaagccgcccgcctgctgaacgacaaagaatataccacaattagcaataacctgcaaattttcatcggccaatactgcttcaagaaaactgaaaacatcaagagtgataactccgagcagaacatgtctagttgggaacgcgacctcgtgagagacgcagaaaattgcgccgaggcgtacatcgaggagaagttctacgagttagaaagatggctgtcaaagcgacttgagcactctcaaatcttacagaagaagagaatcaacaacgctaagtttgaacccgagcgcttgcagagcaacaatttacccttgtgtaatagtcacgaggatattgctcaggccatgggggttagcgtgaaaggattaaggttcttggccttctctaggaaaaaaagccactatatccggtttcagattcctaaaaaaacggggggcaatagaaagatcagcgcacccacccacctcctgaaaaagtcacagaaatggattctggaaaacatactcgagaatattcagctccacgaggcagctcacgggtttaggctaaagcatagtatcgttactaatgctgaacaccacgtgggcaaggaggtcataataaacatcgacctgaaggacttctttccgtctatcagctataggcgtgtcaaaggtctgttcaagtctttcggttacagcgagacagcgtcaacgatatttggactgatctgtactgagcctaagattaaggaggtggaggtgaacgggaagatagagttcctgctgagctggacagagcgctatctcccacagggtgcccctacgtccccagcaataacaaacattctctgctcaaggctggatcgcagattgcattccatggctaagcaatacggatttgactacactaggtacgcggatgatctgaccttttccgcctccggcgagtccctcgacaatatatgcaatatcttccagaacacacggtttatcgtggaacaggaagatttcgaaatcaacgaacagaaaactcgggttattagaaaatttcgccaacaggaggtgaccgggattgtggtgaatgaaaagctgaacattagtcgggagaaattgaagaatttccgcgccgtcctctaccaaattgaaaaagatggcctggagggccataattggggtcagagcgaagacattatcgcctcaatcgagggattcgcaaactttgtatcgatggtcaatcccgaaaaaggcgccaaatttaaagagcagatcgatcgtatcaaggagaagtatgggtgtaagaagaaggcagccgtaccaaatgtgagtcagcctcttctcgggcggagcgacattgtagcccaaatcaataccaaacttaaagaagtgggatgctcttccggctatacccagatctatctcaccaaaatctacaagaaacgatcgcttaaacagctgactgagacagaactactagaggttctgcgtgatttgacctcatcccaggctggagactctggccggaccgaaaccaatttcgttaagcgatggagagccctgatctactcatga

SEQ ID NO: 13441 - RNA, 1740 nt, synthetic construct
  source 1..1740: mol_type = other RNA
atggacttggacgaaatcctgaagaacgggattgaatactactgggagaagagttacgaacaagccatcgagtgctttaaccagatcatttcctttaacccgaattacgcgaaggcttaccactaccgggctctggtgcgtagaagacagagggacgacaaaggcgcccgtgaagatctggtgcaagcggcctctctgcttggtgatcgggagtatacagctatgagtcagaaaatgttaaagcttatcggttgcgattatcgacacaagtcacccccacgcgaagacgattttgacttcatcttctatgacgagaattggtatagcgactatgacgagctcagtgaaatgtttcctgaggagttcccaccttcgtgggaatacgaggttgatattctagatggtattgcctatgctggcgaagagctggacaggttggagacatggctgttcaaaaagctcgaaagagcatgttacatccagaagaaacgagccattaatgccaaattcgacgagaagcgcctgcgcgagaacaatctgcctttgtgtaactctcatgaggagatagcagcagccatcggcatctctattgccggcctcaggtggctggcttactcgcaaaagaagtatcattatacccacttcaagattcctaagaaaacaggcggggagcgaaacataagcacacccatcccccttcttaaaaaagcacagaattggatcctgaacaatatcctgattaagatccaacctcacgatgcagcccatggattttgcaccgagaggagcatcgtgactaacgcacagttgcacctgggaaaggaggttataatcaacattgacctcaaggactttttcccctccatttcatataagagagtgaaaggtgtctttcagagtttcgggtactccaaaaccgcgtccattattttcggacttatatgcaccgctccaaagctaaaagaaatcaaactcgacgaaaaactgcaccaacttttgtcttggaaagaaagatatctgccccaaggaagtccttccagcccagcaatctcaaatctggtctgtaggcgcctggacagcagactcaccgaaattgccgtcaagtacggatttaattatacgaggtacgccgatgatctcaccttctccgcctctggcgactccttacggaatatcagccatattctgaaagatacacggttgatcgtgcggctccaggattttgagattaacgagaataagactaggattatgcgcaaatctagacggcaggaagtgactggcatcgtggttaattccgagctgaacatatcaagagagacactaaagcggtttcgcgccaccttatacaacctggaaaaagatgggctggagaatcgacactggcgcaactcacaggggggggacatcatcgctagcatagaaggcttcgccaacttcgtcagcatggtaaatccgcagaaaggcgcaaaattccaacagcaggtgactaggattaaggaaaagtacaagccaaagaaaacgcagaactccttagctccccagctaatcaccaaaagcgatatcattgccctgatcaacgacgatataaggaagctgcattggagtaatagagatcgacggatatacctccgtcaggtctatggaaagcagtcactccagcaatttactgaagaggagcttctgaaggtacagaatcacttttgtagcttcctcgatgctttgtctcagaagatatga

SEQ ID NO: 13442 - RNA, 1935 nt, synthetic construct
  source 1..1935: mol_type = other RNA
atggacaatctggaccttcaacaaatcttgaatcgggggattgataattaccaggagaagaactacgaacaggcactggaggattttaaccaggtgatcagcatcaatccactgtttgcaaaagcgtaccattatcggggctggatttaccggatcctggagaagaaggaagaagctatccagaatttccagcaagccgcttcgctattcaaagatcgtgagtatagggttctctgcgaacagcttgccgaactcctggaatctctgttcccctcaaagttgaaaaaacagcagtccagcgaaataaacgatgatatctatagcgagtatcggaatttgttttggattgatgaggacggaaattggtatgacgatcctcctgactacgagtgtgacttctatgacattggagattgggaagattacatcaaccaaaaactcattaccatcaaaaaccgcctgttcaaacgcctggaaaagattgagtacctgcagattaagcgagagaaaaatgctcagttcgatcagcgcaagttagaggataacggcctgccgatttgtaacagtcatcaagacatagcaaagctaatgaaaattcgtgtgaagagactaaggttccttgccttttccagaaataaatcccactacacctgctttaagataccaaaaaagatcggaggcgacaggcacataagtgctcctatgccatttctcaagaaggcgcagctgtggattctccacaacattcttgagaagattaaaatccacgacgccgcccatggcttcattctgaatcactctatcgtgactaatgctcagccccacatcgggaaagacatcattatcaacttcgaccttaaagacttcttcccgagtatatcctatccccgggtgaaaggcttatttaagagtctcggttactccgaaaccgcttcaattatctggggcttattatgtactgagccaaccctaaaacagatcgagctggacggtgaaattcattccctgcgctcctggaccgagcgacatttgcctcaaggtgcgcccagctctcccgccatcactaatttgctgtgcagacgccttgaccaacggctgacacagatggcccagaagtacgggtttgtgtacacccggtatgcagatgacctgacatttagtgcatctgggaacagcctgacaaacctctctaacatttttaacgagactggctttatagtcaagacggaaggctttaacctgaatcaggacaagacccgaataatgagaaaatcacaacagcaggaggtaacgggcatgatcgtgaataacaaagtcaacattccccgcgaaacactcaagagattcagggccaccttgtaccaaatcgagaaggaaggactgatcgggaagcactggggcaattctaagaatcaagaattaatggtgtccctggaaggtttcgccaactttgttttcatggtgaatccagagaaggggtcccagtttcgtgatcaggtaaagcgcatcaaacacaagtattattgccagtcaaagaccaggagaagcatcatctctcaggagatattgaatcagtcaaacatcatcgggcttatctatgccgaactgaatagactctactgtaagaatggaaagagaaggtgttatctgatgcaaacatacggaaaaccttgcctacaggagctgactgaggaaaatctcttagagttcctcactgacctcaaaagccatgtcgagaacagtcccttcctggattcaaactttattcgggttctcgattttgtcaacaggctgtcgctgacacctaaccacctgaggcagtaccttataaaaacgtacggaaaacagtctcttctgcagattaaaaccgaggagctcaagaacttttatagcttgttcaagaagacaccaagcaaccgattcttgtggttctga

SEQ ID NO: 13443 - RNA, 1797 nt, synthetic construct
  source 1..1797: mol_type = other RNA
atgaacattaatgacctccttaagaccggcattgaatgttataaagccaaggattatgagacagccctccttgcctttaactctgcaatatcagtgaacccaaatctcgcatcggcttaccattattgcggaagcatctaccttgccttgaaccagaaggaaaatgccatcaaaaatttcagaaaggccgaagctattctcaaggataaagagtactccaaattgtgcaataagttggaagagattctcgttgaactgtttccatccaaaacactggactgccctgagaaccataataacgacgcactggatttccgagagtaccagaatctgttttggatcgacgaggatggtaactggtacgatgacccccctgatcacgacctatacgtgggatacgacagcgacgccaacgactattactgcgacctgttaagtaagctgaccagcattaaggactatttgttctcaaggcttaagaaaatccaaaccctagagctgaagaggtcacagaacagcgagtttgatcgaaagaagctgctcagccagaacctgcccctgtgctcatcccacctggacattgccagactaatgggtttctctgtggggtacctgaggtgtctggccttctcacgcaacaaatatcattaccagagcttcgagataccaaaaaagatcggaggaaagcgaaaaatatccgcgcccaatcagatgctgaagaaagcacagaagtggatccaaaataacatactcgacaagatcaaggtacacgatgctgctcacgggttcaaaatagaacacagtattctgacaaacgctagacctcacgtcaatcaggacattatcattagctttgatctgaaggatttcttccctactatttcttatcggcgggtgaagaagttgtttaaatctctggggtatagtgaaacggcgagcattgtgttcggcctattgtgtaccgagcccattattaaaaacattgaactcgatggccaagcttatgagttagtatgctggactaagagatgtctgcctcaaggcgctccctcctctccaggcatcaccaatctgctttgctgtaacctggatcagcggctttctcaaatggccaataagtatgggttcatctacacaagatacgcagacgatctgagcttcagtgcctctggggagagcttggactacataacgaatatctttaagggtgtcaggtctatcgttaggtccgaaggatttacacttcatgagagtaaaactcgcgtcatgagaaaacaccagcagcagaaaatcaccggcatcgtcgtgaatcaaaaactgaacatctcccggaaaactctgaagaggtttcgcgcgctcctttatcagatcgaacaggagggttttttcggaaaacactgggggcactaccgcaattacgatctgttgcgtttcattgagggcttcagtaattttgtgtacatggtcaatccggacaagggcgtgttatttgttgagcaagtgaaacggatcaaagagaaacatcccgtaaacatcaataagatatcgcagagctccatcattacacttatctattccgaatttcagcggattgattgtagcccgtcaacccgtcgcaagtatttgaaagagacatatggcaagcagtctctccaggacctcactgaggaaaacctgttagaactgctcgatcatctgaaatccactgaagcagtgtactcactcaccaacaaggaaatcaactacttcgttaatatcaacgacccaacctccataagtaaggaggatttattttga

SEQ ID NO: 13444 - RNA, 2232 nt, synthetic construct
  source 1..2232: mol_type = other RNA
atgttctctcagagtaaaaagctggacaagctaatcaaccagggcattgattactataaacagagccaatacgaggccgccctggaatgttttaaccaggccatcgctttaaacccgaattgcgctcgggcgtatcattatcggggttggctccatttggctaacaataacccaggtgagctactgaacgacttgcagaccgtatgcaggctcctgaacgataagtattatgagaggctcgtaaacaaaattgagaaaatcattccgcagctgttctacagggaggactctctcagctggatctactgtgaagaggacgattcttggtatgaatcttatagtgacatacctggcggcgatatttacatcgggataatcggggatatcgaagccgagttgatggaacaaagaagccaggagttctattggttgcgaaattggctcttcgcccgaattgaggagattaataacctacagctcaaacgaaataagaatgcaaagttcaaccaggaaaaactcatcaggtatcagctgcctctgtgcaatagccactcggaaatagctgcagcaatcggactctcagttaatgggcttcgctatctggcattcagtcggaataagctccattataccaggttcaacattcccaaaaaaactggagggaaacgcgaaatcagtgccccattgcccctgctgaagaaggctcagaattggatccttcataatatcctggaaaagctggagattcatccggcagcgcatggcttctgcagacagaagtcaatcgtgacaaacgctctgcctcacgtggggaaggatgtgatcatcaatatagacctcaaggatttcttccctagcatatcctatccacaagttaagggactatttaagtctttaggctattccgagacagctgccgtggtgttcggcttgatttgcaccgaacccagagttcagaaactggagatcgatggagaaagctgtctagtgaacttaaaagagcgcaggcttacacagggggctccctcatcccccgcgattagtaaccttctctgtaaaaaactggaccaccgcctatcaaacatggcaaaaaagatgggattcatgtacacccggtacgccgatgatctgacttttagcgggtctatagatagtcgggagaatattggccggctgtttaaggtgactaatctgatagttcaggaggaaggacttgctattaatcccgacaaaactaaggtccgttggaaaaaccgacaacaggatgtcacaggtctggtggtgaatcacaagatcaacatttccagaaagaccctgaagaaatttagggctacactgtaccacatcgagcaggacggatttagaggcaaacattggggccaaaccaacactaacgaccttatggcatcaattgaaggcttcgccaattttgtatgtatggtgaaccctgaaaagggtgccaagtttaagcagcaggtgcagcgcatcaaagacacttataagaaaacggatcagaaagcacaccaggccaaccacgaatcccccaagacatcagcccaaatatacgacgtcgtgttcttgatctttagcgcccttttctggcttggctggacgtacaagaagaagcttgagtacttgcgtcagacatatgggaacaccgctatcaaacaattaagacccaaccagcaatgggaattcctcaattacttgttggaagcgatcgtcagccaggagattaaaacccacttatctctggccgacctgcagtctaaggagattcacaatttcaaacaagttctgtgctgcctggactactacaaaggacggaagtgcaagtcctacgcaattccaagttttatcatcaataacacgcctatttgggaggacaagatggccgattatctcgattttctttgtcgcatataccgtgaatacctgagactgggttggaccgacaatcaaagggagaactctgccgccaaaacttatctgcaggaaatttaccacgtcctgagccccctcgcattaacactgaagcagctgcaagatttcctcgagtacctcaagctgcagccaacccctgaggtctgttccaattcccagccagactcctatgagtatgactttagcgactcctacgagtacgattttagcgactcatacgaatacgatttttcggactcttacgagtacgacttttccgattcgtgcgagtatgaaccaccttactga

SEQ ID NO: 13445 - RNA, 1548 nt, synthetic construct
  source 1..1548: mol_type = other RNA
atgggagtgtatgatgactatgatgacaacgactacaccgatgatgcgaacgaagaatactatcaagagtatcttgagtgggccacatatttctcccagggcttagtagactcgtcggatcaggggtggttttcatccgacccatcttacgagtccaacggataccagaacatcgaccggatcgtagataaactgtatgagagcggggaggatttcgagtttgacgattgggacaaagaggacgagtaccctttggactttaatgctaaacgggaagaagacgagaagttcaagttggccgaagcgttaaagattcgtgaagagaagcagagattcaataaagaaaggttacaggagaatgggctacctctctgttgcagtcatagtgccattgcaaaagccatgggcatcagcgtcaacaaactcaggttcctggccttcagccggaagcgctatcattaccgaaattttcagatacccaaaaagaccggtgcaaagagagatatttctgctccaatgccatacctgcaacaggcacaatattggattcagcacaatattctcaagaagctggaactgcacaacgcagcccatgggttttgcagggaacggagcatcataacgaatgcccagccgcacgttggctcagaagtgatcatcaacatcgacttcaaggattttttccccacgatatcctataagagagtgaagggactgttcaaaagttttggttattcagaggaagcaagcataattttcgcccttatttgtaccgagcccatgctgaaagaggtggaactcaacgagaaaacaaatctctttctttcatggacagacagaaggctgcctcagggatcccccacttctcccaccatatctaaccttctctgtaggcgcctggatcgacgcctgacacaaatgacagagccgctgggctttatttacactagatacgccgacgatttaactttttccgctagcggcgagtcagtgcgcaatatctgcaatgtgtttaaccgcatgaggtccatcatcaagtacgaggggtttgagatcaacgaggataagactcgagtcatccgaaaaagtcgccagcaagaggtcaccggcgtcgtggtcaatagcaaattgaacgtttccaaggagactttgaagcgcttcagagctacactctatcggatcgagaaggatggctttcagggaaggtactggggccaatctaatgacctgatcgcgagcctacagggattcgctaacttcgtgtacatgataaaccctgaaaaaggggccaagttccaggaacagattaggcacattaagcagaagtacaaacagggtcctaaccagagtgttccagagagtaagttgctcaacctatcagacatcatcgctcttaccaatattgaactgcggagactgaattggtctattcaggaacgtagacgttatctgaagaaaacctacggtaaacaaagccggcagcaactcaaggacgaagaattgctggagttccttaattacctgaaatctctgcccaagccaaaatga

SEQ ID NO: 13446 - RNA, 1308 nt, synthetic construct
  source 1..1308: mol_type = other RNA
atgtctgtcaaccagggcgagtcaagcgatgactcctacgagattgacgaagatattgagcagcaattaaaccgctggtggcgcgaggccaacgatttggagaatgactactggtatcgccaaaagcagctgcagggtaagaatacgaggaataagcaggggaaggaaaagctgcttgagaaatattatcttcctcagtgcaactcttttagggagatttccaagctcatcaacattgacttggccgacctacggcttctggtgttttcccccaaacaggatgccgcaactaaacaccactatatcttgttctacatcccgaaaaagaccggaggagagcgaatcattagtgcaccatcccaaaatctgaaaaatgtccagtactggatactgaaaaatatcctcaagaagctcgagcccagtctgcatgacgccgcccatgggttccggaacagcgagatcattaaggaaaaacacacaatcaacatcaagttcttcatcacacagattctcaaggccaagtatatcagcattttctataaattccggttgatcttgaagctcataatatacgctattgcactgccagagctgattcagtatccaaaatttggcaagaggaggtcaatcgtgaccaatgcagaaccccacgtcggcgctgatgtgatcataaacgtagacattaaggatttcttccactctatctcatataagagagtgaaaggcctttttaggtctttcggttactctgaaagcgcttcgaccatttttgccttactctgtacagtaacttttgtgaaccatcgctcgtacctgccacaaggcgcgcctactagtcccatgattaccaacctaatctgccggcggctggatagaagactgactcatatggcagaaagctttggattcaggtacactagatacgctgatgatttaacattttcctccagtgacgaatccgtctgcaacattggcaaagttctgcgtcatacagaagggatagtgaaacacgaagggttcgaaattaatcgagacaaaacccagatcatgagaaagagtaatcgacttgaggttacgggcatagttgtgaatagcaaaccttcaatcagcagagagaagctcaagcgtttccgtgcgaccctgtaccaaattgagaaggacggactggagggtaagttttggggaaacagcaccgacgtgatgtcatctatccagggttttgccaattttgtctatatggtggaccctcagaaaggggctaaattccgcgatcagatccggataatcaaagaaaagtacaaatgttga

SEQ ID NO: 13447 - RNA, 1308 nt, synthetic construct
  source 1..1308: mol_type = other RNA
atgcccgtttaccagtccgagagctccgatgactcgtatgagatcgacgaggatgtcgaggcgcagctgtcccgaggttggcgtgaaaccaacaatttagagaataactactggtacgagcaaagacagctccaagggaaaacaaaacggaataagcaggggaataaggagcttctggaaaaatactgcctcccccagtgtaatagctttcgtgccatctctaacctcataaacatcaatctagaggagcttcgactgctggtgttctcacctaaacaggacgcggccaccaagcatcattacattcggttttacctgcctaaaaagactggaggggaacgaataatctccgcaccaaaccagcacttaaagaacgtgcagtactggatcctggagaatattctgaagaaactcgacccgagtatccacgatgccgctcatggctttaggaattccaggattatcgagatcgaaaataacaagctagacatcaacctgttgcctatcaagaccctgaacaccagatatagcatcttgtacaagttctggataatagtgaagcagatcatttacgtggatgcttctcatcggctcacccaatacccacgcttcggcaagcgccgctctattctcacgaatgccgaaccccacgtcggcgcagacattatcattaacgtagatcttaaggacttctttcactcgataagttataagcgtgtcaaaggattattcatcagcttcggctattccgagtcagcttctacaatcttcgctctgctttgcaccgtgacttttgtgaatcacagaagctatcttccgcaaggcgccccaacttcccccatgattacgaacctgatttgcagaagactagatcgccgcttgactgagatggctgaaaggttgggatttaggtacacaagatatgccgacgacctgaccttctcagcctctaatgaaaacggctgtaatattggtaaagtactgaggcacacccagggaattgttaaacatgagggcttcgaaataaaccaggacaaaacaaggataatgcggaaaagtaacagattggaagtcactgggattgtggttaacacaaagccaagcatctctcgggagaaactgaagcggtttagggccacactgtaccagattgaaaaggatggactcggtggaaagttttggggggagagtgaagatattatgagctcaatccaggggtttgcaaatttcgtctatatggtggatcctcagaagggcgcaaaattccgagagcaaatccgcatcattaaagaaaagtatcggtattga

SEQ ID NO: 13448 - RNA, 966 nt, synthetic construct
  source 1..966: mol_type = other RNA
atgtctgccccaacaaggcgccttaaagatgcacagtactggatcctcaacaatatccttaaaaagctcgatagctctctgcacgacgccgcccacggatttagatcctcacgggtgattaaaactgagacgaatggcaagaatgatttcctgcgcagcctgcaacacttggagccccggcattttgggaatctttttaacttttggcgcagaattaagagtactatatacctgctcacgctgtctctcagtagcagcaagataaagttcggtaaacgacggtctattgtgaccaacgctgaaccacacgtgggtgccgacgtcttgatcaacatcgacatcaaagacttcttcccgagcatatcctatcgacgcgtgaaggggctgtttaagtcgtttggatattctgagtccgcaagcaccatctttggcctcttatgtactgtcactttcgtgaaccataggtcgtacttaccccagggggcccctacctcacctatgattacaaacctgatctgcaggcggctagatcgacgtctcacacagatgggagagcggttcggcttcagatacactaggtacgcggacgatctgacattttctgcttccaatgagtcattgtgcaacatctgcaacattcttagacaaaccgaaagtatcgttcggcacgagggttttgaaattaacaaggacaaaacacgcatcttaagaaagtgtaatagactggaggtcaccgggattgtggtaaatagcaagctgtccatctccaggcagaaactaaaaaggttccgcgctaccttgtatcagattgagaaggatgggctggaaggaaagcattggggcaagagtgaagacctgattgcatcaattcagggcttcgctaatttcgtatatatggttgaccccgaaaaaggagccaaattccgtgaacagatccgtatcataaaggagaaacatggctgttga

SEQ ID NO: 13449 - RNA, 1548 nt, synthetic construct
  source 1..1548: mol_type = other RNA
atgagtgagaagagacgaactagggaggaaatctttcagcgcatgcgggagacatcaagagatgaggtgatcctggaagagatgatccggcacgggttttggccaagagaaggccggctggccgaggatcctgctgacgaaattagacgcaaaggggaaattgaacgggaactgcagcagcttagggcccagaatcgctctttacagaatgaagccgctttgctcagggaaatgaggaagcggcgctttgcagagtctcgcaaaaagaggcaggaaacaaaagagcgtagagagaagcagcggcaagagcgtgcagaggcctggcagcagaaaaaagccgaggaaattacatttctgggtacgggagtctctgtcggtctatccaacaaaaagtcaaacgaggaattgttgaaaaagtacaacctcccggtgtacagatccccggaggaaatcgctgccgcaatggcagtgacgatcagtacattgcgttttctggccttcagccggaagacttccaccgttagccattacatcaggtttaagatcccaaagaaaacgggcggacaacggttaatcagcgccccaatgccccgactgaaggaagcccagacctggatcctggcgaccattctcgagaaaatccccgttcatcaagccgcgcacggatttcgcgcaggccatagcattgtgaccaatgcagagccccaccttggtaaggaagtcatactcaatgtagaccttaaagacttcttcccttcggtatcctatcgacgagtgaagggcctgttttcaagctttggctactccgaggctgtagcgactctgttcgctctgctgtgtactgagcctgacattgaaaaggtggagctcgatgggaagacctactatgtcactcagacacgccgtcacctaccccaaggggctccaactagccctgcaattactaacctgctttgcaggaacttagactataaactctattgcttcgctgagaagcttggattcacctatacaaggtatgcggacgacttgaccttcagtgcctcgaatgaggccgtcaaaaaggtgggctacattttgaagaagctggaagagatagtcaaaaaagagggcttcgaggtgaatcaggaaaaaacaaggatactgcgctactcaagacagcaggaagttaccggtgtgattgtgaacgagaaactgaacgtgtctcgaaaagttcttaggaatttccgggccacactctaccagatagagaaggacggactagaagggaaacgctggggacaagcacaggatctggtagccgccttacaggggttcgctaactacgtttatatggtgaatccagagcagggcagcctgctcagaactagagtgcaagctatcatagaaaagaccaagtggaaggctgcagctagacctgtgaaacccagtaagatggaggaggttgcgaccctccagaccgaatctgccgtggaggaagtcgagatcgagcagaagaaacaagataaggattacgattcctctaagaaatggtggaagctgtggtga

SEQ ID NO: 13450 - RNA, 1449 nt, synthetic construct
  source 1..1449: mol_type = other RNA
atgactgatcagccatcctctagaaaagaactatatgctcgtattcgcgagatcggcagggaggagtttctgctggaagaaatgacccgctatgggttttggccggagggcgaggaaatgcccttagatcctgtggatgaaatccaacgaagaggagaactggagcagcagctgaagaagttgcgacaagagaacgcccatctgttcaatttgaagaaactgggtcaggaagcgtacaaacagcggctcgtggagagcaggaggaaacagcaagagactaaggagcttagagagcgggagcggcaggaacgtgctaaagcctggcaggagaagaaagagaacgatatcatctacctgggcgaagaaatcagtggcggacttaacaatgtcgaagggaatatatttaggcttgagatctataacctgcccatactgaataccgctcaggatatcgctaatgcaatggacattaccgttggagagttacggttcctcgccttttcgcggccaacgtccacggtcagccactatatcaggttcaagatacccaaaaaaacaggcggcgagcgccaaattagcgcaccaatgccccgccttaagaacgttcagacctggatcttagacaatatcttgtgcaacgtccctctccatgaagcggttcatggatttcgcgccggtcatagtatcctgacaaacgccgagccccatgtggccaaggacgtcattattaatttcgacctgaagaacttcttccctagtatttgctacaagagggtgaagggacttttctttagcctgggctacagcgaggctgcagctaccatctttgcactcctgtgcactgaacctaatgtggtggtggtagaactggatgggcaagtgtactacgtggcccaatcagaccgccaccttccacagggatcccctgctagccccgccatcaccaacatcatgtgtagaagactcgacaaacgcctctcagaaatggccgctaaactcgatttcgtatacacaaggtatgcggacgacctgaccttttcttctagtggcgactctctaaggcacatttgtaacgtgttccggcgaactgaatccatagtatcccacgaggggttcacagtgaacagagagaagactagactactccgtggcaagtcatcacagctggaagttacgggggtggttgtaaatgagtttccgaacatatccagaaaagaattgaaaaggttcagggcaactttgtatcagattgagaaggatggtccacagggaaagcgatgggggcacagcgacaatgtcattgcagccatcgaggggttcgccaattttgtcgcaatggtgaaccctgagaaaggtcgtgagctggtgcggcgcgtcaagcagattaaagagaagtacacaggccggcgaagacggtctacaaagattctcgaacacgatggaacctga

SEQ ID NO: 13451 - RNA, 1401 nt, synthetic construct
  source 1..1401: mol_type = other RNA
atgactgagcaaccacggacacggcaagaactgtatgaccggattcgccagacctctaaagatgagttcatattggaggagatgatcaggttagggttctggcctcgccaagggaccttacccgaggacccagcagaggagattaggcgacagggagagctgcagagggaattggaggccttacgaagcgagtctcggaagctgaacaacgaggaacatttgaggaaagctgcccgcaagctgcgactgcaggaatcgcggcaaaaacagcagcagaataaagaacggcgcgagcaggaaaggattgccagagcacaggtctgggaacagcggaagcaacacgaaatcctttatcttggtgaaggcgtctcaggggggctctccgcaacggaatgcgatcacgagagactagctagttacggcctacccgcccttgggtcagctgagcagatcgcgtcggcgatgggcatttccgtgggtcaactgcgtttcttggcattctccagaaggacatcaaaagttagccactacatccgttttacaatccccaagaagagcggcggggagaggttaatcagtgcacccctgcctcgcctgaagcatatccagcactggctcctcgctaacctgctgacaaacatcccgctgcacgaagccgcacatggattccgaacgggacatagcatagtgaccaatgccagaccccatgtaggcgctgacgtggtggttaacctggacctgaagaatttcttccctaccatcacctacaagagagtcaaggggctcttccgggcccttggttactccgaagcagccgctaccatttttggcctgctctgtacggaacccgaagtagccgcgctgtctctggaccagactacctattacgtgagtcagggtactagacacttgccacagggagctccgacaagtcctgccataaccaatctcctctgtaggcgcttcgatcgcagacttacagccatggcaactgccctgggaagccagtacactcgttatgccgatgatctgacctttagcgcttcaggcgagaacttgagacacatttgcactctacttagacgcattgaatctatcgtgactcacgagggttttgttattaatgaggctaagacaaggattcttcgcggcggctcccagcaagaggttaccggtatagtcgtgaacaacaagctgagcgtgtgccggaaaacactcaggcggtttcgagctctattgtttcagatcgaaagagatggcccttctggaaaacactgggagggagcgccaaatctgtttgcagccatgcaggggttcgccaattttgtctatatggtggacccagagaggggcctccctctcagacagaaagtgcgacatctccgttccctgcatggatga

SEQ ID NO: 13452 - RNA, 1437 nt, synthetic construct
  source 1..1437: mol_type = other RNA
atgactaaccagcccaggactagacaggaactgtatgataggattagaaggagctcacgcgatgaggtgattttggaagagatgattcgtctgggattttggccggccgcaggggaaatgccaaaggatccagctgacgaaattcgaagaaaaggggagatcatgagggagctggaggatctgagagcccagaatcgacagttacacaatgaggaggctctcaagaaagaagccctggcacagcgactcgcagaatctaagagaaagcagcaggaaaccaaggagaggagagagagggaaagacaagagcggctcgaaatctgggaactcaagaaacagcaagagatcgttttcctcggtgagggcgtgtccgcgggccttaacaagactgaatgcgaccgtgatcggctgcagagttacgggttgcccgaatatggaacttctggagaaatcgccgctgccatggggataagcttgggcgaactgaggtttctggctttttcccgccgggcgtccaacgtcagtcactacatcaggtttaagattgccaagaaaacaggcggggagcgcctgatcagtgctccaatgcctcggctcaagcaagctcaaacctggattctctaccacatcctcgagaaggttaacctacatgaggcagcacacggcttctgtcgtggaagatctatcgtaaccaatgctgcaccgcatgtcggtgccgatgtcgtgataaatctggatcttcaggacttcttcccttccatctcatataaacgcgttaagggtctgtttatatctctgggctactctgaggctgccgctaccatcttcgggttgatttgtacggacgctgcggttgaagccgtcgagcttgacggaaaaacttattatgtgtcgcttggcgaccggcatttgccccaaggtgcccctagttcacccgccatcacaaacttaatctgccgcagactagacctgcggctgacaaagatggccgccagcctgggatttgtttacacaaggtacgcggacgacttgaccttctccgggagcggcgaaaatctccgccaaatttgcaatgtgctgaagcggaccgaggccatagcaactcacgagggcttcacaatacaccctcagaagacccgtgtgctgcaccgctcacagcaccaggaggtaaccggcattgtagtgaatgagaaattaaacgtggaccgggagacacttaaacgctttcgggcaacgttattccatatcgaaaaagatggcctagccgggaagcattggggaaactatcctgatctgatccagagcatcgagggtttcgccaattttgtggcaatggtgaacccagagaaaggaggtaaacttaaggaacaggtccagcgaattaaggctaaataccggcccaagagggtgaaacgcattcgaagaaaaagcaactga

SEQ ID NO: 13453 - RNA, 1419 nt, synthetic construct
  source 1..1419: mol_type = other RNA
atgtccgagcctagtcccccaaggacacgtgaagagttgtgggaccgcattcggcagacaagccgggaagaaataattctggaagagatgatacggctgggattctggccagcgcagggcgaacttcctcaggatcccgccgatgaaatcagaaggcggggagagatccaccgagaattacgcgaactcaaaagagaggatcggagactgcaagacgagaagattctccggaagcagatgcttgagaagcgattggccgagtcccgaagaaagcaacaagagacaaaagagagaagagagagagagagacaggagcggagcgctgcttgggaacagcgacgccagcaggagatactttatctgggcgaaggggtgtccggtggtttaaaccagaccgaagggctgtccgacaggctgcagcaacatagactgcccctttgtctgactgccgagcagctggccacagccatgggcttgacgatagctgcccttcggtttctcgccttcgcacgtcgtacctctccgacctcgcattatgttaggtttcaaatccccaaaaagactgggggcctcaggttgatcagcgcaccaatgcctaggctcaaacaggtccagtattggattctcgacaacatcctggataggctaaccccccatgacgctgcccacggcttttgccggggaagaagcatcgtaaccaatgcgctgccacacttgggggcagatgtggtcataaacctcgacttacaggactttttcccaacgatctcctatcgccgagtgaagggcctgttccgcagttttggttactctgaagccgttgcaacaattcttgctctgctgtgcactgagcctgaagtagagactgtggacctggatggacaaacatactacgtggcgctaacagatcggcgtctgccccaaggtgctccgactagccctacaatcgctaatctcatctgtcgtagattggacaggcgactgactgaaatggccaccactctgggcttcacctacacgcggtacgccgatgacctcaccttttctggctcaggagacgctctgcgccagatctgcaatctgctacagcgcagtgtggcaattctcacccatgagggattcaccgtgcacgatcagaagactagggttttgcgaaactcaaggcagcaggaggttaccgggattgtggtcaatcacaagctgaacgtggaccgcgagacactcaaacgcttccgcgcgatcctttaccagattgaaaaagatggacctgcaggcaagcaatggggccattctcgggatctgatggcctcaattcacgggttcgcaaactatgtcgccatggtgaatccagagaaggggcagaaattactagctcaggtcaaaaggatcaagcagaagtacaagagaaaacgcaggtga

SEQ ID NO: 13454 - RNA, 1431 nt, synthetic construct
  source 1..1431: mol_type = other RNA
atgacagaacccgcccagccaagaactaggcaggaactatgggatcgtattcggcaaacttctcgagacgaagttatcctcgaggaaatgattcggctcggattttggcctgcgcagggtcagattcctcaggacccagcagacgaaatcaggcgtcgcggcgagattgaccgcgaattgaaggaactccgtaaggaagacagacaactgcaggatgagaaggtcctgaaaaagaggctgttagagcagcggctcgctgagagccgccgaaaacagcaggaaaataaagagagaagagagagggagcggcaagccaagtcagaggcctggcaggcacggaagacacaggagatattattcctgggtgatggggtatctcagggactgcatcaccagcaaggggatgagcaacgcttgcgttctctcgatcttcccatatgccacactcccgcagagctggcagctgctatggagatctcgatcggagaactgagatttctggcattcgaccgccatgtgagctttgtttcacactacgtgaggttccagatcccaaaaaagacaggggggacgaggttaattagtgctcccatgcctcgacttaagaggagccagtattggatactgaaacacatcctgaccaggataagtccacacgatgcggcccacggattccggcaagagtttagtattgtaacaaacgctcagccccatgtaggcgctgatgtgatcattaatttcgacctgcaagactttttcccgagcatatcatacaagcgggtcaaagggctatttcgctccctcggctattccgaggccgtggcaaccatcctgggacttctgtgtaccgagccagaagtggaagccattgaaatggatggcaaaacttactacgtggctctgaccgaacggcatcttccacagggcgcccctacatcaccggctatttccaacctcctatgtcgacgcctggatagaagattgagcgagatggccgagaacgcggggttcatctacactcgctatgccgatgacctcaccttctcctctgcgggcgacgctcaacgccagatttgcaacgtcctgaagagaacggagagtatcgtcacccacgagggttttacgatcaatcctcagaagacaagggtgttgaggagctcccagcagcaggaagtgactggcattgtggtcaatgacaaactgaacgttgacaaggccaccttgaaacgattccgagccaccttgtatcaaatcgaaaaagatggccttgaggggaagcaatggggtaactcccagaatcttctgtctgccatccatggctttgccaattttgtggcaatggtgaaccctgagaggggaaagatcttcctcgagcaggttcagcggatcaagcagaaatacggaaaaaagaagcggagagacagaccctga

SEQ ID NO: 13455 - RNA, 1413 nt, synthetic construct
  source 1..1413: mol_type = other RNA
atgaccgagcagcctcgtacacggcaggagctgtatgacttgataagacagaccagcaaacaggaattcatcttgagcgagatgattcgcctggggttctgggacgagaattctaacaatccagaggaccccgccgaggagataagaaggcagggagaactgcagagacaattacaagaactccagcagcagaatcgccaattgcacaatgaaaaagctctgaaaaagcagcttctgaaacagcggttggaggagtctaaaagaaaaaggcaggaaacaaaggaaaggaacgagcgtaagagacaagagcggtcacaggcatggcaggaaaagcaagcccatgaaattacatacctgggcgaagatgtcagttccggcctgaacaatctagagaacaactgcgatcgtctccagaagaacaacctgccagttttccagaccatcgaggagctagccgcagccatggggatgaccgtaggtcagctccgcttcttggcattcgaccggaagacatccacagtgtcgcattacatccgcttcaaaatagctaagaagactggtggcgagaggctgattagtgcccccatgcctcggatgaagagcactcaagattggatcttagaccgcatccttgagaagattcccatgcacagcgcggcacatgggtttcgcagagggaggtccattgtcacgaatgccactccccacgtgggaactgatgtggtggtgaacctggacctgcaggatttctttccttctatctcttacaagcgcgtcaagggcctctttcaggccctgggctactcagaagctatcgcgaccgtgctggcattagtgtgtaccgaagctacaacagaggaagtggagctcgatgggaaaagttatttcatcgccacttctgaccggcaccttccccaaggggcacctacctcaccggccataaccaatctgctatgtcggaggctggacaagcgacttgccaatatggctgtgtcccagggctttatatatactaggtatgccgatgacctgacgttttcaaccagcggggacgccattagaaatctgtgcaatatccttaaacacaccgaaaatattgtgagtcatgaaggttttacgatccacccaaacaaaaccagggtcttacgaaagagccagcagcaggaagtgacaggtattgttgtaaacgaaaaactcaacgtagatcgggctactctcaagaaattccgagctactttgcaccacattgagaaagatggactggcgggcaaacattggggatccggcaacgaccttatggcagagatcgagggatttgctaattacgtcatgatggttaacccggagaagggcgagccactggtcaaacaagttaagctcatcaagaagaagtacggactcagaaagcgatga

SEQ ID NO: 13456 - RNA, 1416 nt, synthetic construct
  source 1..1416: mol_type = other RNA
atgaccgaacaaccccggacccgtcaagatctgtacgatcgcatcaggcagagctccaaagaggagttcatcctagacgagatgatccgacttggcttttggtcagccaatggggaaattcccaacgatcctgcagacgagattagaaggcgtggcgagattcagcgagagctcgagactctacgggctgaaaataggcggctgcacaacgaggaagcactgaagaaggaagccttgaagctccgtatggcagagtctcgacggaaacaacaggaaacacgcgaaagaagagagagagaacgccaggagagagcgatagcctggcagacacggcaggaacgggaaatcacatatctgggagccggggtcagtgcgggcttgaatctcacggagtctaatctggcaagactccagcagcataggctgccaatcttacacgcggctgccgacctagctaacgccatggggataactgtaggacagctcaggtttctggcattcagtaggcgcatcgctaccgtgagtcactacgtgcggttccagatccctaagaagactggtggctttcgcgctatcagcgcaccactgccgcgtcttaaacaggcccagcagtggattcttgataacatactcgagggtgtggtccttcacccaactgcacacggctttcgtcgcgggcggtcaatcgtcacaaatgctgagcctcatgttggagctcttgtggtgattaatatggacctccaagacttcttcccctccatctcatacgccagggtgaagggaatcttccgctccttgggttacagcgaagccatagcaaccattctgggtctgatttgcactgagtcggacgtgacagagatcgagttggacggcaggtcttactatatagcccaggagctcaggcatttgccccaaggggcacctactagcccagccctcactaacttactgtgtcgaagattggatagacggcttgataggatggccaagagcaggggatttatttacacccgatatgcggacgacctgaccttttccacgacagatcgcgagcgcctgcgggatataggcaacatcctcaaagggacgcacgggattgtcacacatgaaggactgaccatccatcccgacaagacccgggttctgcgccagtcacagcagcaggaggtaaccggcattgtggtgaaccagaaattaaacgttgacagaacaaccctgagacgatttagggctaccctgtaccaaattgaaaaggatggcctggccggcaaacagtgggggcaaggtgctgatctgttacagtccattgccggattcgccaattatgttgccatggtcgaccctcacaagggccgcgaattcctggcttctgtgcagcgaatccaaaaaaaatatggaagaagaaagcggtga

SEQ ID NO: 13457 - RNA, 1488 nt, synthetic construct
  source 1..1488: mol_type = other RNA
atgacgagccagcctgagacgcggcaagccttgtatgatcgcatcaggcagtccagcaaggacgaggttatcctcaacgagatgatcagactgggattctggccaactgccgggacacttcccgaagatcccgcggaggagattagacgccaggccgaaatacaacaggaattggccgatctcaggaccgagtctaggaagctcaacgatgaaaaagcactgaagaagaaactgctgaagcagcgaatggaagcatccaaacaaaagcagcaggaaacaaagatccggagagacagggaaaggcaagagcgggccgctgcatggaagtctcgacaagcgcaggatactagactcccctgggaaggagtgtcagccggactgtcgcaaaccggctgcgatcgtgaccgcctgcagcagtatcacctgcccgagttagggaccgccgctgacatagctcaggcgatggggttgcctctcggtcagctgagatttctctcattctcccggagaatctctcatattagtcactacgtgcgatttcgtatcgcaaaaaaaaccggcggtgataggctgatttctgcccctatgccacggctgaaggcagcccagtactggattgtcgctaacattcttgagccgctgaaagtacacgacgcagcacatggcttttgcaggaataggagtattgtgaccaatgcgacacctcatgttggggccgacgttgtggtaaatcttgatctcaaagacttcttcccctccatctcatatgctcggatcaaaggactgttccgtgccttaggctacagtgaagccgctgctacaatatttgccttgctatgtaccgaggccgatgtcgaggaggtagagctggacgggcggacatactatgtggcacagagtgctcgccgcctgcctcaaggagctccaacatctcccggcctcactaacatcctgtgtagaaggttggaccgccgacttaccggactggcgcaggaactgggctacacctacactaggtacgccgatgacctaacattcagcgcaagcggtgcagctgccggacaagtcggtagactattgcgccaggttaaagacatcgtcactcatgaggggtttgaagtgcacccgaagaagacgcgagtgcttcggcaaagccgtcagcaggaggtcactggcgtggtggtgaatgagaagcttaacgtggaccggaaaaccttaaaacggtttcgcgccaccctgcaccatattgaaaaagacggattcaagggcaagacatggggtcaccagtccgacgttcagactaacgtgcaggctaatgtccaggcaaacgtacaagagtcagatattcagggctccaatctcttaagcgctgtgcaggggtttgccaattatgtgtatatggtcaaccctgaaaagggcgggccattcctcgaccaggttaagagaataaaacagaagtacaagctggatcgcaaaccaaagagatga

SEQ ID NO: 13458 - RNA, 1428 nt, synthetic construct
  source 1..1428: mol_type = other RNA
atgaatcagcagcctcagacaaggcaagccctgtacgatcggatcaggcagtctagcaaggatgaagtgatcttgaccgaaatgatccggctgggattttggccatcaagcggcgaattgcccaatgatcctgctgaagagatccagaggcagggcgagatccagagagagctatcagagctgagggcagagaatcgcaaattaaacgacgaaaaggccttaaagaagaggctcctgaaggagcggcttgtggcctccctgcagaagcggcaggagacgaaagcccgaagagagcaagagcgccaggaacgcgcagccgcatggaaagctagacaggctcaggacattacctatctcggtgagggggtgtctagcggtctgaaccacgtagaatgcgatgtcgaacgactgcagcgccacaatctaccagagttaggcaccgctgccgcaattgccgccgctatgggcatttcggttggcgaactcagatggcttgctttctccagaagaacttcccaagtctctcattatattcgattccgcattcccaaaaagactggcggcgagagacttatatccgctcccgctccccggctgaagaaagctcaatattggatcgaggcaaacattttgcaactgatcgagattcacgatgcagcccacggcttctgtcggcagcgaagtatcgtgactaacgctcagccacacgtcggggccgatatcgttacaaacttggaccttcaggacttctttccctcagtctcctaccgccgtgtgaaggggatgttcagggcgctcgggtactctgaagcagccgcaaccattttcgccctgatatgtaccgaacctgaggttgagatggtagagctggacgggaggacatactacgtcgcacagagcgacaggcggctgccacaaggagctccgacatcacctagcattaccaatatcctctgccatcggcttgaccgtagactcacgggacttgcccaggagtttgattacgcctatactcgctacgcggatgacctgacatttagtgcctccggagccgcaactgaacaagttggccggctgctacgacaggtgactcagatagtaagtcacgaaggcttccaggtgcacccgcagaaaacacgtgtcctccgaaaaagccggcaacaggaagtcacgggtatcgttgtgaatgacaagctcaacgtggacagaaagaccctgaaacgctttcgcgcgaccttgtaccagattgagcaagacggactggccggaaaggtgtgggggcatagtgccgatctgatgggagctatcgagggtttcgcgaattatgtgtatatggtgaacccagataaagggagccattttctcgcgcagatcaagagaataaagcaaaagcaccgtcctaaaaggcatcagcccaggaaatcttga

SEQ ID NO: 13459 - RNA, 1431 nt, synthetic construct
  source 1..1431: mol_type = other RNA
atgagcaaccaaccaaggactagacaagaactgtatgacagagtgaggcagtccagcagggacgaggtcattttggaggagatggttcgcttgggcttttggcccgcagagggggagatgccacaagaccccaccgatgaaataagacgaaaaggcgagatccagagggaactggccgcccttagggccgaaaaccgcaagctacacaacgaggccgcaatcaaaaaacagctttacaaagagcgcctggctgcatctaagaagaagcgacaggaaaccaaggaacgaagagagcaggaacggcaatctagggctgcggcctggcgtgatcggaaagccagagatattgtatacctgggcacaggcgttagcggtggcctgaatcaaactgaatgtgacagaactaggctccagcaatacggccttcccgcctacggaacggccgaagagatcgccaaggcgatgcagataagcgttggccagctgcgtttcctggctttctcaagacgaaccgcacagatatctcactatgtccgattcaaaatcccgaagaagacagggggggaacgccttattagtgctcccatgccgcggcttaaacaggcccagtattggatcgctgagaaactgctggcagctatccctttgcatgaagcagcgcacgggttctgctcagggaggtccatcgtgactaacgcaaccccacacttgggagccgacgtggtgattaatctcgatctccaggatttctttccctccatttcctatccccgcatcaagggtctgttcaggagctttgggtacagcgaggcagccgcaacaatttttgcgttgctgtgtactgagcctgatgtcgtggaggtagggctcgacggccaacactattatgtggctcagagtcaacggcacctccctcagggagcccccacatctcctatcctaacgaatttactgtgccgcagactcgacagacgtttaaccgcaatggcggccgaactgggctacaggtacacccgatacgctgatgatctcaccttctccgctactggacagccgcagcaacaggtgggaaagctgcttcggcggacacatgcaattgttacacatgaggggttcaccatccatccacagaaaacacgggtcctacgctcgggtagacaacaggaggtcaccggtgtagtggtgaacgagaaactgaacgtggaccgcaagacgctgaagcgtttcagggccttactccatcagatagagcagagtggttatgacgaccagcactggggcggacagccagtgtcatttgctcagattcagggatacgccaattttgtcgagatggtgaatcctgaacggggagcccagtttcaggcccaggttaagcggatcaagcggaagtaccctcctcgcgtccaagcttttaaaccagcttcatga

SEQ ID NO: 13460 - RNA, 1545 nt, synthetic construct
  source 1..1545: mol_type = other RNA
atgtccaaccaacgcccacgaacccgtcaggaactgtatgagaggatcaggcagacgtccagagaggaatttatactggaggaaatgattcgttttggtttctggcctgcgcaaggagaaatcccccaggatcccgccgatgaaatccggcgcagaggtgagctgcagcgacagctgggggagttgaattcccaggagcgcaatctgcgcaatgaagagaagatgttgaaagagctaaggaagcgtcggatggaggaatcaaagcgaaaacggcaggaaactaaggagcgcagggagcggcagagacaagagagagccaaggcttggcaggagaagaagaagcaggacattacctatctgggagagggagtttctgcagggctaaataacaaagaagtgaactcatctcggcttaaccaacacaatctgttaagctactctaatgctagcgagatcgctagcgcaatgaacataagcattaacgccttgagattcctcgcattcactcgcaaaacctcaacgacatcccactatgtgaggtttaaaattcctaagaagacagggggcgaacgcatcataagcgcccccatgccaaggctaaaagcagcccagaattggatactccacaacattctcgaaaaagttacattgcacgacgcggcccatggcttttgtcagaaacatagtatcgtgactaatgctaagcaccatatcggcgcagaggtgatcgtgaacattgacttaaaggatttcttcccctcaatctcttataagagaatcaagggcctcttcctgtcgcttggctactctgaggcagctgctaccatcttcggcctgatctgcaccgaacccattgtcgagcaggtcattctcgatggcaagacttactacgtggccacgtcagaacgtcatttacctcagggggcccctaccagtccagcccttacaaatattctctgcagacgactggataagcggctgagtaaaatggcctcgaatctggggtttacgtacactaggtacgctgacgatctcacttttagcgccaaaagtgaggccagtagaaacgtctgtaatatccttgccaagaccgacaacatagtcaaacacgaggggctgacaatcaactccgaaaaaacacgggtacttaggaaaggtcggcagcaggaggtgaccggtatcgtggtcaacaagcaactgtccatttccaaaaagacactgaaaagattcagggcgacccttttccagatcgagaaggacggacctgacaacaaacactggggacatagcaaagacgtcattgcttctattcaaggattcgcgaactttgtttatatggttagcccagaaaaaggccgcctgctcaaaactaaggtaagggctatcatcaaaaagtacaattggaaagcagcacagcggaagcgattgccactcccgctgactaccgtaccacctacagtgcaggagattcaaaaggtgcccgagacagtgatagaaaagccgcaagaacagaagaccaataagaaatggtggaagttgttttga

SEQ ID NO: 13461 - RNA, 1557 nt, synthetic construct
  source 1..1557: mol_type = other RNA
atgagtgaacggccaagaacccgccaggaactctatgagaggatacggaagacctctaaagaggagttcatcctggaggagatgattaggtttgggttctggcccgccgagggacaaatacctcaggatcccgcagacgaaatcagaaggcgcggcgaaatttccaggcaattaaatgagctgcacactcagaatcgacacctcggaaatgaggagaagatgcttaaagaactgcgtaaaaagcggatggaagagtcaaaacgcaagagacaggaaacgaaagagcggcatgaacgcgagaggaaggaacgtgctgaggcctggaaggagaaaaaaaagcaggacattatctatctcgggcagggggtgtcttcagggctgaacaataaagagtccaatgaagagcggctgaaaagctacaacctccctaagtattccaacgcgagcgaaatcgctacagcaatgtccattagtattggagccctgcgctttctcgcattttctcgaaaaacatcaactaagacacactacgttcggtttaaaattcctaagaagacaggcggtgagcgtaccatcagcgctccaatgccaaggctcaagtccgcacagaactggattctacacaacattctggagaaggtaaagctgcacgacgctgcgcatggcttctgtacccaacattctattgtgagcaatgccaaaccacacataggagccgaagtcttggtgaatatcgacctgaaagatttcttcccgtctatctcatataaacgcatcaaggggcttttcaagtccctgggctacagcgaacttgccgccaccattttcgctcttatctgtactgagcccactgtggaggaagtgtcgttggacaatcagacgtactacgtggcaacttccgccaggcatcttcctcaaggcgcccccacatcacctgccttgaccaatatactgtgccggagactagacaagagactgactgaagctgctaaggagttaggctttacctatacaagatatgccgacgatctgacctttagcactaaaggcgaattttctcgaaacatctgcaacatcttgaacaaagcgcatgatattgtgaaacacgaaggtctgacggtgaactcagaaaagacccgcgtcttaagaaagggtcggcagcaggaagtaacaggagtcgttgtgaacaaaaagctcaacatcagtaagaagactctgaaaaagttccgagctacactctaccagatcgagaaagatgggcccgagggaaagaggtggggtcacacccccgatgtcatagcagccattcagggcttcgcaaattttgtgttcatggttaaccccgagaaaggcagattgctgaaatcgaaagtgaagagcatcatccaaaagtacaattgggtaccagagtggaagcgaaagctcagtagcccgtccgaggttcagcctaatgtgtctacactaagcacccttccagtcaccagtacagagaacaaggtcgagactcagaaaacaaccgaaaataagacgaacaagaaatggtggaagctgttttga

SEQ ID NO: 13462 - RNA, 1575 nt, synthetic construct
  source 1..1575: mol_type = other RNA
atggatagaccccgcactagacaggaactctacgagcagatccgcagaacttcacggcaggaatttatactagacgagatgattcggctcgggttctggcctgcagccggtgttatgccccacgaccccgctgatgaaatcagaagggaaaccgagatcaggcgggaaatcgctgaggtgcaccagcaaaaccgccacctatataatgaggaggccttgaagcgagagatgcgcaagcggaggattgaagagtccaggcgaaagcagctcgaaaataaacagagacgagagctggcacgtcagcagagagctgcggcgtggaacgaaaaaaagcaaaaggaaattggattcctgggggaaacagtaagcggggggctcaaccagaccgaatgcaaccaaggcaggttggagaagttttctttgccccgctttacaaccccggaggagatcgccaagggcatgaatctgtccgtccctcggctgaggttcctggcttttgataggaaaactagccgagtctctcattacgtccggttccagattccaaagaagacaggaggcgttagaatcatctccgctcctaaaccctacctcaaagcagcccaggagtgggtgctgcagactatcctggagagggtaccagttcacccagctgcccacggttttctcgccggacactcaatcgtgaccaacgcccagcctcatctgaaggcggacctcatcctgaacgtggacttgaaagactttttcccgagcgtgcattaccagagggttaaagggttgtttaagagcctggggtatagtgaggccgccgcaaccgtgttcggccttttatgtactgagcgcgatacgcaagaggtagagcttgatggagagcgatacttcgtgggtctttccgaacggcgattaccgcagggagcccccacaagtcccgcgataaccaatctactgtgtcgcaaactggatgcccggctgcataaactcgccatgaagcacggcttcgcatatactcgctatgctgatgaccttacatttagcgcatcaggtcctaatactcgtaacctttgcaatgtactgaaaggcctcgcagccatcgtcacccatgagggctttacaatcaacccatctaaaacccgcgtcctgagaaagggcgaccagcaagaggtgacgggaataattgtgaatgaaaagctgaacctggcaagagaggtcttgaaaaaatttcgggctattcttttccagattgagaaagacggccccgagggtaagagatgggggacatcgcccgatgtcattggaagcgtggtgggctttgctaactatgtgagaatggttaatcctgagaagggcgctcaattccaagcacaggtgaggcgtataattgaaaagtacgggtggaaacgtgtgcggatgacgccagccaagccagctgaaatcgccttcgaccccgccccaaccatgattttaacctccgcaccacctcctcccgaaccggaagaaaagcctcctgttgctccccaggcgccaccaagttctgccgacggaaagagtaaaaagtggtggaagatgttctga

SEQ ID NO: 13463 - RNA, 1554 nt, synthetic construct
  source 1..1554: mol_type = other RNA
atgatggaccaaccacgaactcgacaggaactgtacgaacgcatcaggcggactagcagagaagaattcattttggaggagatgatccggctcggcttctggccaagagagggacaaactccttctgaccccgctgacgaaattcgccgcagaggagagctgagtcgtgagctgaccaaattgagaacggaaaatgcccggctgtacaatgagcaggcacttatccaggaaatgcgaaaacgccgcctcgcagagtccaggcagaaacagcaggaaaccaaagctcggcatgaacgtgaaagacaggagcgcgcacagaaatggagagaaaagaaacagcacgagatagtgtttctgggtgagaaagtttctggaggcctgaattacacggagtgtgatgaggctaggttgaaccagaacggcctgtcagccttcagcactgccgaggatatcgcggccgccatggggatcagcctctcagaccttcggtttctggctttcgacaggaagacctccacagtttcgcactacgtgcgtttcaaaattcctaagaaaacagggggggaacgactgatttcagctcctaaacctcacctgaaggccgcacaagaatggattttgcacaccatcctggaaaaagtcactctacacgaggccgcacacggttttcgaaccggccgttctatcgtcagcaacgccaggccccatcttaaggccgaggtgattataaacatcgacctgaaggacttctttccgagcatcgcataccccagggtgaaggggctcttccggagtctcggctatagcgaacaagcggccacgatttttggcctcatctgcacagaaccggatgtcgaggaggtcgaattagatggcaagacatacttcgtagcgctcagcaccaggcacctgccacagggtgcaccaacctctccagctctcacaaacatcttatgtagacggttggatcggcgccttacaaaactggccgagaaccgcggttttgtgtattcaagatatgctgatgatctaaccttctctgcctccggtaatgcaaagcagaatatatgcaatgtgcttaggggcgtagagtccatcaccgctcatgagggactggccattaacacagagaagactcgaatcttacggcattctcgccagcaagaggtgactggcgtggtggtgaacgagaaactaaacgtttccagagaggagctgaagaggttcagagccgtcctgtttcaaatagaaaaggacgggcccgaaggaaagaggtgggggaactcgaaggatgtgattgctagtattcagggattcgcgaattacgtggctatggtcaatccggagaaaggcgccgagtttcaggcgcaggtaaaggctatcatacagaagtatgggtggcaacggcccgcatcccatagaaggagcatggcctcaagcgagtcccagtatcctggacctgcttccgccccagagcccgaagttacctcacccgcaacacctgaaagtgagtctagtaagagtaatgacaagaaatggtggaagcttttttga

SEQ ID NO: 13464 - RNA, 1524 nt, synthetic construct
  source 1..1524: mol_type = other RNA
atgacaactcagccaaggactagagaagaattgtaccagaggatccgacaaacgagcaggcaggaatttatcctcagcgacatgatcaggctgggattttggcccgacgctggtgtcatgcctgaggatccagcagacgagataagaagaagaggcgaactgcaacggcagctcgatgagttacgtgcccagaaccgaaagctgcacaatgagcaggctctgcttaaggagctgcgaaagaagcggctgctggagagtaagcagaagcaaaaagagacgaaggaacgccgtgaacgggaacgtctggagcgggctgaaaagtggcagcaaaggaaggccaaggaaatcggctacttaggaaaagaggtttcaattgggttgtcgtacgctgagtgcaacgccgaaaggctatctcagtacgggctcccacacttcgaaaatgccgaacagatagcagcagccatgggcattacagtctctgaactgagatttctcagcttctcccggaaaacctcaaacgtaaaccactacgttagattcaaactgcccaaaaaaactgggggcgagaggctgatttctgcgccaatgccccggctgaagcacgcacagcagtggattctgaccaacctcctagagaaggtgcagttacatgatgcggcacacggcttccgcgctgcccatagtatcgtcagcaatgcgaaaccccacctcggcgccgaggttattatcaatcgcgacctgaaggacttctttccctccatttcatataaacgcgtaaagggagtgttcaaaagtttgggttatagcgacgccgctgccactatctttggacttctttgcacagagcctgatgtcgagaaggtggagctggatggtagaatctattacgtggcgaccggcgaaaggcatcttcctcagggggcccccacatctcccgctattaccaacattctctgtcgaaggcttgataggcggatgcagaagatcgcagatgaatgcgggttcgtttataccagatacgctgacgatctgaccttttccacatccggggagagcaagcagaatatatgtaacgttctccggagatctgagtccgtggtggcccacgaaggcctggaactgcatccagacaagacccgtgtgctccggaagtcacgccaacaggaggtcaccggtatcgtagtgaatgagaaattgagtatagatcgcaaagagctgaaacgctttcgagccgtcttgttccaggtggagaaggacggacctgacgggaaacattggggcaagagccccgatgtcatcgcctcgcttaaaggattcgccaactatctccaaatggtggacccggagaaagctgccgagtaccaaaaacgggtgcacgcattgattgagaagcatggactacagccgtcccagtttacatatcgcaatcctgcagctccagtggatgcagctcctgccagacctgacttaccgaaagaagagactaagcctaaaccagaaaagaaacgctggaagctgtggtga

SEQ ID NO: 13465 - RNA, 1515 nt, synthetic construct
  source 1..1515: mol_type = other RNA
atgtctaccgagcggccacagactcgagaggagctctacgagcgaattagggacgggcggaaggaggaattcgttctagaggacatgattcggcttggattttggcccgcccggggggaaatgccacatgatcctgctgatgaaatccggagacgggcggagctgcagcgtgaattgggcgagttgagggcacagcacagaaacctttataacgaggaggcgctgataaaggagcttcgtcgtagacgcctggaggagagtagaaggaagcgccaggaaacaaaggagagacgcgagagggagaggagggaacgtgccgaagcttggcggcagagacagggccaggaaatcgtttatctgggggaggccgtgtcaggcggattaaatcacaccgagtgtgacgcagccaggttgcaatcgtacgggttgcccccccttgggactgcagctgagattgccggtgcactgggtgtaagcgtcggggaactgagattcctcgcctttgatcgcaaaacatctactgtgtcccactatgtgaactttcaggtacctaaaaagacaggcggattgcggcagatcagcgcacctatgccgaggctcaaagcggctcagcactgggtccttagaaatgtactggaaaaggtggaggctcatgagtgcgcccatggcttcagggctggtcgcagcatcgtgtcaaacgctcgaccacacgtcggagcggaagcagtcgtgaatctggatctgcaagacttctttccgagtattggatacagacgggtcaaggggctgtttagggccttcggctactccgaagcggcagccaccatcttcggtctgctctgtacacaacctggtacagaggaggtggaattagacggacgccgctatttcgttgccaccggcgaacgccaccttcctcaaggcgctccaaccagtcccgccgtgaccaacatcctgtgccgacgactggataggaggttgctcaaggttgctgacgagcttggctttgtctatacgcgctacgcagatgacctgtctttttctgcttccggcgaaagcttaagacatctggggaacctgctcgagagagtgaaggcagtggtgcgccatgaagggttcaatgtccaccccgataaaaccagggtgctacggcgcagccgacagcaagaggttactggcgtcgttgtcaatgacaaacccaatgtgtcccgatccgaactaaagagatttcgcgccacgctgtaccaggtagaaaaggacggacccgcaggtaaacgatggggacggtcacccgacgtgatagccagcctgctcggatacgccaacttcgtgtatatggttaatcctgccaagggagccgaactgcagagaaggacacgtgccctcgcagataaatacggccacgagcctgtgaaagtggagcggccgtcaagacggcggcaaccagaacctcaggccgctgctccaagtccagaaccccagccaactcagaaaaaatggtggaagctctggtga

SEQ ID NO: 13466 - RNA, 1509 nt, synthetic construct
  source 1..1509: mol_type = other RNA
atgtccgctctggctgtcaaaccactaactcggcaggaactttacgagagaatggcagaaaccagcagagatgaagtgatccttgaagagatgatccgcttcggcttctggccagcgcaaggcgaagtgcctttcgaccccgccgatgagatccgcagaaggggggagttgcacagggcactggacgaactgagagccgagcagcggaaactgggggacgaagccaagctgcgcaaggaggcccgtaaaaaacggctgcttgaatcacgtcggaagcagcaggagacgatcgtgagacgggaaactgaaagaattgaacgcgctacacagtggcaggagaaaaaatctaaagagatcggctacctaggggcaggggtttccgctggactagataataaggaggccaatgtcgagaggttacagcgatacaatctgccaagattcgacgacgctgcaagcttggcccaggccatgggcctgactgttggtgccctgaggtttctctccttcgcccgcaagactagtaagaccacccattacgtccggtttgcactccccaagaagaccgggggagtacgagtgatatccgccccaatgccccgtctgaaagccgcacagcattgggtcctgcagaacatcctgcagccagttgaattacacgaggcggcgcatggatttcggcctcagaggagtattgtgagcaacgcccgaccgcacgtagcttctagcgtggtgatcaatctcgacttgaaggacttttttccgacactcgattatcgccgcataaagggagtgttccgagctcttggctacgctgaggccacagcaaccattttgggcttactgtgtactgagcctgaggtcgagaaggtggagctcgatggagaaacttactatgttgctacatccgcaaggcacctcccacagggagcccctacctcacctgcgcttacaaatattttgtgccggaggttggataggcgactcctgaaagtggcagaggaaatggggtttgtgtatacccgatatgccgacgacatgacgttttcaacaaagcaggagcaggatagtaagcagattgggagacttctccatagagtagagagcatagtggcgcacgaaggtttctgcattcatcccacaaaaaccaggattatgcgtagcgcctcaaagcaggacgtgactggcatcatcgtcaacgacaagccttctatcgataaagccaccatgaaacgcttcagagctgtcctgtttcaagttgagaaggatggccccataggcaaacagtggaaccactctagggatgtgctggcctcgctgcgcggttttgctaacttcatcttcatggtcgaccctgctaagggagcagcctatcaacggcgggtgggtgctctgattgacaagtacgattggaagccccaacctctcccctatcaaaagaagacgaaaccagttgaacctcccgccccgcaacccgtagcacaaaggccatggtggaaattatggtga

SEQ ID NO: 13467 - RNA, 1506 nt, synthetic construct
  source 1..1506: mol_type = other RNA
atgtcggaacagccccgaacacgccaggaactgtacgaagagatccgccggcaaggtggccgggatgtctacgttcttgaagaaatgattagactcggcttctggcgtgagagcacaggactgcccgacgatccggctgaagagatcaggagagccgctgagctgcaagccgaactggacagactgcgcgccgacaaccggaagctgtatgacgagcaagcgatgctgaatgaactcagaaagaagcgcttggccgaaagcagggagaaacaaaaagaaaccagggcgcgtagggaacgggagcgacaagagaaagcggagaactggcggcgaaggaaagaaaccgagatcctctaccttggagctgaggtgagcgggggcctgaataacaatgagactgatcgggagcgcttagagaggggcggactacctgtgttttctaacgtcgaagaactggcacgcgcaatgaacctgaccgtgggaaagattaggttcctcgcttatgataggcgaacctccgagacaacacactacgtaaacttcaagctgcctaagaaaactggggggcatcggctcatttccgcccccatgcccgcattaaaagccgcccagacttggatcttggagaatatcctgggccgtgtggcagtgagtgatgctgctcacgggtttctgcccgcaaaaaatatcgtctctaatgcaagactccatgtgggcgcacagaccctcgttaatctcgacctcgaaaattttttcccttcaatcgggtaccgcagagttaaaggtatttttagggccttcggttatggtgaagccctggcaacagtcttcgcgctgttaacaaccgctccagatactgaggagatcgaactggacgggaaaacttactttgtagccaccggcgaaaggcatctgccccagggtagtccagcctctcctgcgctgtcaaatattgccgccagacgactggacaagggactagccaagttggccgctgcccacggctgcaagtacacgagatatgcagatgaccttacgttcagcaccgaggaccgcgatgctgcaataggccggttactagcacaggtgaggtttgtggtggaaaaacagggattcaaggtcaacgaaaagaagactcgggtgctaaggcgggggagacagcaggaggtaacaggaatagtcgtgaacgacaagctttccatagatcgcaagaccttgagaaaattccgggccgtgctttttcaggctgagacgaagggcttggagaaccttagatggggaaactctcctgacctggtcgccgccttgaaagggtatgctaactttgtgtttatggtagacaaagagaagggctacgctttccagcagcaggttcgccgaattgccgagaagtatgattggcagccagctccccctcgtttcccgccaaaaaaaaaggttgagccagaggaacctgctccagagaagcccgcaaaggatgagaagccatggtggaaactctggtga

SEQ ID NO: 13468 - RNA, 1506 nt, synthetic construct
  source 1..1506: mol_type = other RNA
atggaacagcccagaacacgccaggagctttatgaatatgtgagacagcatggggggagggacgcttttgttgcggaacagatgatccgtctgggcttttggaagtcctccgacctgccaaatgacccagtggaggaaattaagcggatacacgatctgcaagaggaactgaacaaagtccggaatgagaacagaaagctgttcaacgagcaggccttattgaaggagctgagacaaaggcgcttggctgaaagcaaacagaaacagaaggagacaaagttgaggcgtgaacaggagagaaaggagcgagccgaggcatggcagaaacggaaggagactgaaattgtttacctaggtgaaaaagtgtctgggggcctcaacaacttcgaagagaacgccgaacgtctcacagccaacgacctcccaagtttcgctaacattgagcagcttgctaaggctatgaacctgaccgtaggaaagctccgattcttggcgttcaataggcaaacatcagagacaaagcactatatccactttcagctgccgaaaaaaaccggcgggtttaggctgatttcggcccccatgccacagttgaagacagcacagcactggattcttcacaacatacttcagaaggtgagcgttcatgaagcagcccatggcttcctcccagagaaaaatattgtgtcaaatgcccaacctcatgtgggcgccaaaatcgtggttaactttgacctgaaagatttcttcccctctataaattttcctcgggtgaaaggtgtgttcagatcattcggatactccgaggccatcgcaaccattttttctctcatctgtactgcccccgagacagaagaagtggagatcgacgggaagacgtacttcgtcgctatcggcgagcgccatttaccgcagggtgctcctactagtcctttcctgactaatatcctctgcaagagactggataaagggctacagacgctggctaagaactacgattttacgtacaccaggtatgcagacgacctcactttctcaacaaaaaacgatggcgagaagctcactgatttcatcaataagatccgctacgtcgttgagaagcaagggctgaccatcaatgagagtaaaacccgaattctacgaaagggccggcagcaggaggtgaccggaattgtcgtcaatgacaaaatatccgtaaatcgcaagaccctgaggaagtttcgggccgtcttacaccaggccgagactaaaggactggagggacttagatggggtaatagcaatgacctgatcgcatcccttgacggatttgctaactttgtactgatggtggatgcagaaaagggcaagatgtataaagcccaagtaggccggatagcggaaaagcacggatggaaaagctctaggagcggtaaattcacccctcaagagttgcgcgaagtggtcgaaaagaaggaagagaagcccaacgataatcagggaaaagattggtggaaagtgttttga

SEQ ID NO: 13469 - RNA, 1587 nt, synthetic construct
  source 1..1587: mol_type = other RNA
atgaatcaagcccgccaggccctgtatgataggatccgggagagctctaaagacgaagtcatactggaagagatgatagctctcggattctgggaccctgctcagcctggcaaagaggcagcagccgagctgatcgggaagaccgctgaactggagcgcgaaatgtccgcactgcggtccgagatggccaggatcgataaccaggaggccatgcttaaagccctccggaaacggaatatggagcaggcgaaagcaaggcgcgttgaaactaagaagcgcagagaggcagagcgccaagctagggctgaggcatggaggctgaaaaagcagcaggatattctctacctgggtgaaggttatagccatagtctaggggaacagggagcttgtgacgcagccgccctcgacgaaaacggtgctctgccggcatatgagaatgcggccgcccttgctgccgctatgggaattagtattggagaactccgatggctggcctttgggcgcaaggtgtcacagacaacacattatcagaggttccaggtacccaagaaatctggcggactacgacttatcagcgcaccaatgcctagactgaaggagatccagtcctggattctgagagaaattttagagaaggtgcccattcggtcagcggcccgtggctttgtgagaggcaagagtattgttgacaacgctcggcctcacgttggtgctgacgtggtgatcaacgtggacatcaaagacttcttcccaactgtcacatacccaagagtaaaaggtgtgttccgcaagttggggtatcgtggccaggttgccactatcctggctatgctgaccacagaaccagaaatggtcgctttggaaatggatgggcagcgctattggatggccaagggtgagagacggttacctcaaggcgcgccctcatcgcccgccttaaccaacattatctgcaggggcctggacgccgaattggaggagctcgcgctggttaatgagtacgagtacacacgctacgccgatgacatcactttcagcaccaggggccgagaagccaataggcggatcggaggagtattgagaaagattgaacagcacgtcggcgctcatgggttcaccttgcacccagataagacgaaagtgctgcgtaacaatgcccggcaagaagtgactggcatcgtggtcaacgagaaactttccgtagaccgaaagaccctacgaagatttagagccgtgatgttccaggtggagcaagacgggcctgagggcaaacattgggggcaagcagagcacgtgatagccggccttacggggtacgcccactttctcaagatggtggatcccgcccgagcacagccctttctcgagcagctggcacggatagttgaaaaacacggaaaccctgtctaccccgagagaagagccgcacgtgctcctagctggaggaggtaccagccggattctgatcaagcagaggcgacagatgctgcgccagcagctaatgaagcacccgcccatccgtcaggatctgagggcgaagctgccacccccgtcttggagaagaagccatggtggaagttttggtga

SEQ ID NO: 13470 - RNA, 1599 nt, synthetic construct
  source 1..1599: mol_type = other RNA
atgaataacgcaaggcaggagctgtacgacagaattcgcgagtcttccaagaaagaggtgattctggaggaaatggtcagtctaggcttttggaatgaggccgacccagcctttcagaaggcccagggcgcgatagagaggactggagagctcgaacgcgagatgagggcgctgcataccgagctgagccgcttagagaacaaagaagccatgatcagagccatccgtaaacggaacatggcgcaggccaaggaaaggcgcgcagagacaaaggcgagaagactggccgccagaaaggcacgcgccgagaagtggcgcagggagaaacaacgggacatactgtacctcggagacggccattcgcaaactctgcaggacagggaatcagatgctgcccggttgggcagaaccggcgaccttcctgtcttgcatgatgctgctcagctagccagtgcaatggagatttccgtcggggaattacgatggctggcgttcggtaggaaggtgagcaaagtcgcccactaccagcggttctacgttccaaaaaaaacaggcggtttgaggctgatagccgcacccatgcctcgtctgaaagaaatgcagcgatgggtccttagggagatcctcgagaaggtgcccctacacgaggctgccaccgggtttcgcaatggtatctctatcgtggataacgcacggcggcacgtaggctccgatgttgtgatcaacatggaccttaaggactttttcccgacactgagctatagacgtgtgaagggtgtgtatagaaagctcggctactctgggcaggtggcgaccatcctggccatgctgacgactgagcccgaaatggatagggttgagatggatggaaccctttactgggtcgctcgcggcgaacgacgacttcctcagggggctcctagctccccagcactgactaatattgcttgcaggcgtctggataggcggctcgccgcattagcagaggagtggggctatagatattcacgatatgccgatgacttgacattttcagcaaatggggaagcagctagtagagccggaaaaatcctccggggggcccgattcatcgtagagcaggagggcttcgtggtccatcccgataagacaagggtgctgcgccgtggacgacggcaagaagtaactgggatagttgtaaacgataagctcagcgtggatcgcaaaacgttgcggcgcttccgcgcaacccttcaccaagtggagagacacggtccccaagggcggacttggggacactcccctgacgtgattgcggctctgaccggttacgccacattcgtgaagatggttgactctgaaagggctgaaccctttctcgctcagctcgagcggatcagagagaaatggggctatgagcccccagcttgggaccctggcccgattagagagccctcatggcagcggtaccagccggaaccagaaccagccgaatctgacattgctacggaagctaccgctgaagccgggggagcagcaggaagtgaggctgaagccagagcccctggagaagctgaaagcgccgagaatcataagaagccatggtggaaattctggtga

SEQ ID NO: 13471 - RNA, 1575 nt, synthetic construct
  source 1..1575: mol_type = other RNA
atgtcaagaccagctgcccccagtcagccaacgcgtgagaatctctatcagcggattcgggagacttccaaggccgaagtggtgttagaggagatgattcggctgggtttctggcccgctggagaaggaattccaaaaggacccgaagctgaggacaggcgcacaggcgaattagaaaatgaactcgcagctttgagaactgaaatgagtaggctccaaaatgaagcggccatgcgtcgcgccctttatcagaaacgcctggaggaagcgcgacagaaacggcaggaaacccgaaggcgacaagaagaggctaggagggcaagggcagcagcatggaaacaggcaaaggaaagggagatcggatacttgggcgaggggatttccgcaggccttaaccaccagctatctgacgctacgcgcctcgctcaacatggcttgccattgctgtcgaccgccttggatgttgctagtgcgatggacatatccgtgggagaactccgtttcctcacctttgtgcgtcgcgtttccaaacatacccactatcgccggttcttcattcccaagaagaccggcggacagcgtctgatcagcactcccatgcctcgcctgaagcaggcccagtactgggtgctgggtaacatcctggagcggattccaatacacagctgtgcgcatgggttcgtagccaagcactccatcgtgaccaacgcctcgatgcacaccgggaccgacgttgtcgttaactgcgatctcgaaaacttttttccgacaatcagctaccgaagggttcgcggacttttccgggctctcggctacagtgagcaagtggccaccatcctggccctgctgtgtacagagccggaggtagacagagtggaatgtgatggagagacttatcacctgtgcacatctgagaggcacttacctcaaggggccccctcctcacccatgctgactaatatcctctgccggagactagatagacggctgtctaacctggccgagacgttgggcttttcttatagccgatacgctgatgatctgacattttcaggtagcggggaggccaggggcaaagtaggcaagctgcttaggaagacagaaggtatagtctcacatgagggatttcgcatcaacagagacaagaccagagtgcagaggagagggagacggcaggaggtcacagggatagtggtcaatgagcgccccgccgtcaatcgggagaatctgcgcagaatgagagccgtactattcagactcgagaaagacggcctgagaggccagcactggggtagagggggagaggtgatcagcgccttagagggctacgcacatttcgtcgcacaggtggatcctgccaaaggcgggcgattccttgaacaactggtggctattaaggcgaagctgggttggcagaggccaaagcatcttcggcgccctaaacgaactcctagctggaaacggtctgccactgctccagctgccactcctgcagacgtgatgccagctgtcgcacagcctgccaagccggaacctgcaacacctcccaaaaagccctggtggaagttttggtga

SEQ ID NO: 13472 - RNA, 1263 nt, synthetic construct
  source 1..1263: mol_type = other RNA
atgccaaccgtcgatagccaggaccaggtcgtggaccgcgatttgtgtttggacccactgagaacggagctagagcagcgacttggcgacgaggcccggagaaggctgagaagggagaggaaccttgcagccagacgtaggagtagaacccccagaccaacaccgcctcgggttcctacccagaccctgacatatctcggcgatagattgtcaggagggctgcaagatcgcaggagtaggctggacaggctggctgatcacccccagctccctgtactccacgatgctgatgacctagccgccgccatgggcattgaaatctcagaactgcggtttctcgcatttgcccccacccacagtcgcgtgaaccactatcagcgcttcctgcttcctaagaaaacaggcggtcatcgacaaatttccgcccctatgccccggttaaaagcagcccagcattggatttaccagaggatactcgcacaagtcccggtccaccgtgcggctaagggattcctgcccggccattctattgtggacaatgcccgcccgcatgtaggagccgatgtggtaatcaacatggacctggagaattttttcccaacaatcacctttgcccgcgtgaaaggactcttcagaacactggggtactccgaacaggttgctactatcctaggtttgctctgcactgaacccgaggttgaaacatatgaatggctcggggagaggtatcatgtcgcacgagggcctcgatttttaccacaaggcgctccatctagccctccagtcactaatttgttatgccgacggttggaccgtcgcctcgatggtcttgcgcggtcactgggattccattacaccagatacgccgatgacctgaccttcagcggctccggggaagctactgacagggtggggaagttacttggaaaagcccgcgacatcatagagcacgagggtttccgccctcaccccaaaaagacgagggttctgcgggcaggtagacagcaggaggtgactggaatcgtggtcaatcggaaacttagcctggaccggaagactcttcgcaggttccgggctgttctgttccaggtggagctcgatggccccgcaggtaagcgatggggcaacggaggggatctgctggcatcgctggaggggtacgcgcactttgtgcacatggtggatgctgaaaagggcagagcttttttggaccgggtggaggccattaaggcgcgttacggctctgactccatagaactgtga

SEQ ID NO: 13473 - RNA, 1506 nt, synthetic construct
  source 1..1506: mol_type = other RNA
atgtcagatcggaggcaggaaatttaccagcgcataagagaatcctccaaagacgaggtggtgctggatgagatggtcagacttgggttctggccccaacagggcgtcctccctgaagaccccgctgaggagattaagcggcaagcggccttgagggacgaattggcatcactgactgcccggttacagaagctgggaaatcaggaagctctgcgacaggagcttaagcgtcgcagactgttagagtcacgaagacgccgccaggagacaaagctgagacgcgttcatgcacgggagctgagagcctttgagtggaagcaaaaacagcgcgcatctatcacttatctgggtgaagaggtttcccggggcttgtcgaacacagcctccgatgaagctagactccgagccctgggccttcccgtattccatgaagcgtccgacatcgcacgggccgctcagattgaggttagccacctgcggcaccttgcttttcacagggtggtgtctagacgtagtcactatgttcggttctacctaccgaagaaaacaggcggcactcgcctgatcagcgctcctaaacccaaactcaaatggattcagcactggattttgaggcacgtccttgagccactgaaggcagaagacgtggcccatggcttcgttaaagcccgatctattgtgagtaacgcctcagcgcatgtcggccaggatatcgtgatcaacgtagacctgaaggattttttccctaccctgacataccgtagggtgtgggggttcttccgaaaactggggtattctgggcacgtggccacaatctttgcccttttgaccaccgagccagcagtcgacgagctggaactcgacgggagccgttactttgtcgcgacaggcgagcggtttctcccgcaaggagcaccaacgagtccagcactcaccaatgtaatatgcaggaaaatggaccgcaggttagctggcctcgccaggactttcggtttgacgtataccaggtacgccgacgatttcaccttcagcggtcccggagagacgaatgttggacgcttctttggggcactcactagagtagtgaccgaagagggtttcagcattcatccgggaaagaccaggatctttaggaggggaagacgacaggaagtgactggtctagtggtaaatagcggcaagcctaccgttccacgagccaccctcagacggtttcgggctctactgtttcagatcgagaaggatggcccagaagggaaagtctggaaacctggggtcgatgtcgtgcgtagcatccagggattcgcccgctttgtggctatggtggattccgagaagggccgcgctttagaagcccgggtgcagaagatagtggcagaaagggggcctgcctctctcgctagtactagaacagtggcgaaggccaagtcgcactggtaccccccactgaaacccctgggagagcagccccaactgaaccttcctcatgctcagcaagacacatga

SEQ ID NO: 13474 - RNA, 1563 nt, synthetic construct
  source 1..1563: mol_type = other RNA
atgcagctgctggagaagaacaagaagatactcgaagaaatggtccgcctagggttttggcccgaatcccaaccgctgcccggactgaatcccgaagagcagacaagatacgagacactcagtaatgagctggccgctattcgtaccgagcttacaaggctgaaaaacagagaggctatgttgaaagccattcgcgcccaaaggctcgccgatgctaagcggaagaggctcgaaaccaaggctcggaacgaagagaagcggttggagcgggcccgaacatggaaacagattcaggcaaagcagatcacttacttggggatgggtgtgagcgccggattgagcgagcaggtcggccagtccgaacggctgaaaacccagggcctcccatcttggtccacgcctgcagagctggctaaggccatgaatatctccgtgggcgagctgcggtttttaacattccacagacgcgttgtgaaacattcccactacatccgcttccatatgccaaagaagaccggtggcactagattgatctcagcccctatgccgcgtctcaaagagcttcagcactgggtgctggaacatgtgctagagaagatccctatacacgactctgcgcatggctttaggaaacatcactcaatagtcacgaacgctcagccacacgtagggcaaccaatgttaattaacctagacctgaaggacttcttcccgactcttacatatcggcgagttaaaggccttttcagacagcttgggtatagcgagagcatcgcgactgtgctgggactgctgtgtactgagccagaaatggaccaggtaaagctggacggacagccctttttgattgccaagggcgataggcaccttccacaaggtgctcctagttctcctatgattactaatctgatatgcaggcggatggatcagagactggctaagctggctgcaagttttggatttatctattcgcgctacgcagacgatctctctttctcaggggccgagctggacagccgagaaacaggccggctgctgaagagaatccaaaacattgttaaccatgaagggtttgtggtacaccctcataaaacgaagatctgccgaagtggacagcgcaaagaggttaccggtattgtcgtgaactcgttctgttccgtcgatagaaagactagaaaaaagattcgcgcaatcttacaccacatcgaaaaggatggcccttcagggaaaaattttggtgctaaccccgacgtgttagaggcgctcctctcctacgcacagttcatggccatggttaaccccgaacagggacttcccgtcctgaataaggtgaaagccttggccaatcagatcggctacaaacgtaaaacctatcgacgcctggctagctcttctaaaaggttcaaaaggtttgtgcctgatccagcactcttcgccaaacccgaaccggcccctagcttgcagaaggaaaccgccgagcaaaggccaacccccctacccaagcaagacctcaaaaccaatgcggaggcaccagcaaaaaagccttggtggaagttctggtga

SEQ ID NO: 13475 - RNA, 1398 nt, synthetic construct
  source 1..1398: mol_type = other RNA
atgaacacccaacccgctaccaggcaggaattatatgacagggtccgggcttcgtcactgcaggaagtcatcctggaggagatggtcagatacggctattggcccaaggaaggcgagataccagaggaccccgctgaggacatcaagcgagagggggaactggtgcgagagctaggcaaactcagaagtgagctcgagaaactgcacgacatggagaaactgatcaaggccgctcgccgcaaaaggatgctcgagagccgtgagaggcagaaggagaatcggctgcgtcgcatccgagaaagggaggaacgggcggccgcatggaaggagaggaagcagcacgagatcctgtacctgggcgagggtcactctggaaccctatcatcccaggtgtctgatgaagaaagactggccgcccaccacctccccatttttcatacccccgaagatttggcacttgccatgggactatccatcggtgccctccggttcctgtgcttctctagaaaggttagcaagactagccattatcagcggttttacctgcctaagaagtctggggggaaaaggctgatctccgccccaatgcagcgcctgaaaagtgctcaacactggcttctcgaacacgtgttggagcaagtagctatccacccaagtgctcatgggttcaggaaagaacacagcattgtgacaaacgcggaagcccacgttggagctcatgttgtggtgaacattgacattgaaaacttctttccaactttccattaccctcgggtatgggggtgttttcgagcgctgggctactcacctgccgtctctacatgtatgaccctcctgtgcacagagcctgagatcctggaaattgagttagacggagaattatggtttgtgcagcagggatcgagagctcttccccaaggcgcaccgacgtcacctaccctcacaaatatactgtgccgcagattggataagcgcctcgcaggtcttgcaagagtccacgagtttacatacagccgctatgccgatgacatgacattcagtggcaatgataacgtggatgtaggaaaactgctcgcctctcttaggtccgtgttgcatcaggagggtttgaagatacatcctaataaaaccgcggtttataggagagggcgtcgtcgcgaggtgacgggaattgtcgtgaacgaaaagttgagcgtgagccggaagactctgcgaagatttagagcaactctattccagattgagaaagacgggccagaagggaaaacttggggaaacggcggtgaccttttcgcctccatacaaggctacgccaatttcgtgcacatggtcgatccggaaaagggccgggcatttctgcagcgcgttcagcggattatcaatttacattcccggtga

SEQ ID NO: 13476 - RNA, 1077 nt, synthetic construct
  source 1..1077: mol_type = other RNA
gtggaactgacgtatttgggacccagagtctcaggtggcctaggaccgactggcgatcggagaactagcgacggtgctcggttaagtgcggccggactgccagttgttcacacagcagctgaactcgctaccgcagccggcttggcattgggtcagctgcggttcctggcttttgcgcgagaggtgtctactacaacccactacaggcagtttaccattcccaaacggtccggaggagacagggtcatctccgccccaatggcacggctcaagaaattgcagcattggatcctggagcacatgctcaataagctgcctctcgccccccctgcacatggatttcgcccaggccggagcacggtgagtaatgctctgcctcatcttcaatctgccatcgtgataaacgtggacctgaaggagttcttccccacagtaacataccccagagtcaaggggctgtttcgtaagctcgggtatagtgaggaggtgagcactgtcctgggcctggtctgcactgagcctgacatcgtggagactgttctagacgggattacatactatgtggcacgtggccctaggcggttaccacaaggtgccccgacttcgccagccataaccaacgcactgtgccgccgtctggacaaaagaatcgccggttttgcagcaaagcacgccctgaccttcaccagatatgcggacgacctcaccctgtcaactaaagatcctgccgggcgcgtgggcgcttgtcttaagttccttaggaaggtcgccgtcgatgaaggcttcaccgttcaccccgaaaaagttagggtggtgaggacaggccgacgacaggaagtgaccggcgtggtcgtgaacgaaaaaccaggcgtcgttcgcgccgagcttagaaggtttcgcgctctcttattccagattgagaaggatggacctgccggaaaaaagtgggggacccccgggacagatgtactcacctctgctcttgggttcgcttcctacgtggccatggtagatccagtaaaaggggctgcgcttagaacacaggtgttggccctgcgcgcccgatttcccacgtga

SEQ ID NO: 13477 - RNA, 1440 nt, synthetic construct
  source 1..1440: mol_type = other RNA
atgagcaacttgccccccccacgggatcggaaggaactgtacgagagaatcgcactcggggggaaggatgacgtgattgccgaggagatgacgagactggggttttggtcgggagaacaggctcaattggtggatcctccagtggaggcggccaggaaggctgaactccgggaacggctgggtaagcttagggagcaagccgctcgcatgaggaatctcgtgactttggaggcagacctaaagaagcagcgtatggcagccagccggaagaaacgtgaggagactaagcagcgaagactgggggagcgtgcagcagctaaggagcgaaccaaagccaccaaggcccgcgaacttggctatctcgggcctggagtaagtgctggcttgggcccggagcatagggcgtcagatgtagcacggctccaggcgcagaggttacccgtcgtgcacaccgcggcagaacttgctgccgcaatcggagtgagcctcggagagcttagattcctggcttttgcacgcgaagtgtccacaaccacgcattaccggcggttcactatccccaaaagatcaggcggagagcgggtgataagtgcccctagaaaacgcctgaagcgggtgcagcactgggtgcttgctaaagtcttagaacccctgctgggtgacccagccgctagtgacccagcccacggtttccgctctggtcggagcacagtttccaacgccgtgccacatgtcggagctgccgttctggtcaatgtggacctgcgcgacttttttcctactgtgacatataggcgtgtcaaaggtctgttcgccaagcttggctacggagaggaggtcgccacagttctagccctggcctgcactgaacctgatattgccgaaacccagttggatggcctcacttactatgttgcacgcgggccacgacgattacctcagggcgcacccacctctccggctatcacgaatgctttatgtaggcgattggacaggcgtgtgctgggctgggcagacaaacacggctttgcctacactcggtacgccgacgacctgacactgtcttccaaagatccagctgctagagtcggtgcctgcctgggcttcctgaggcaagtggcaggcgccgaagggtttacagtacatcctgaaaaggtcagagttgtcagaagaggggggaggcaggaggtgacaggcgttgttgttaacgagcgcccctcagtccctagggtggaactgcgcaaattcagggccctcctacaccacattgacatggatgggcccgcgggaaaaacctggggaagaaccgacggagcggatggcggagatgtactggctgcggctctggggttcgcatcctatgtggccatggtggatccggctaaaggtaccgccttgcgagcacgcgtactcgccctcagagccaagtatcccggctga

SEQ ID NO: 13478 - RNA, 1422 nt, synthetic construct
  source 1..1422: mol_type = other RNA
atggcagatctgactccgcctaagaatcgtaaagagctctacgagagaatagcccgagggggcaaggaggaggtgattgtcgacgagatggtgcggctgggattttggccaaacactcaacccccccctggagatccccccgatgaaatccgccgcatggccgaactgagaacacgcttagcccaattgcgccagcaggctcagggtctacgtaacctcgcccagctagagattgacttaaaaaaacagcggctcgcagagagtaagcggaggagagagcttaacaaacagaagctcctgggtgagagagcggctgcaaaggccgcgacccaggagaaaaagaccagagaactgacgtacctgggaaaagatgtcagcgcaggcttgggccccactctggacagacggacttcagacgcacccaagctgacgacccaaaaacttccaattgccaacactgccgctgaactcgctgccgctatgaaggttagtctgggccagcttagattcctggccttctcacgggaagtgtccacaaccagccactatcaccggtttaccatacctaagaaaacgggaggggaaagggttatctccgcgcctcacaagagactcaaggccgtccaacattggatcctcgagcatgtgctggaaccacttgcactggccgagccagcccatggatttgttccgggccgaagcacagtgtctaatgccgttcctcatgtgggcgccgctatcgtggtcaacgtggatctgaaggatttctttcctaccgtgacctaccgacgcgttaaagggctgtacaagaagttgggctattcggaggaggtcgccacagtactgggcctactatgctccgaacctgacatcgcacagaccgagttggacgggaccacctactttgtggcaagggggcccaggcgattaccacaaggagctccaacttctcccgcgattacaaatgcattgtgtcgccggctggatcggaggatcaatggctgggcgaagaaacacggtttcatctacacaaggtacgccgacgacctgactgtcagcaccagggacagaaacgccccggtaggcaagatgctggcattcttacgaagggtggtgacagctgaggggtttgctgtgcaccctgacaaggtaagggtagtacgtaggggccgccgccaggaagtcacaggagttgtggtcaacgatcggccaggggtccccagagatgaccttcgacgtttccgggcactgctcttccagattgaaaaagatgggccagctgggaaacgctggggacacaatgaaggtaatgtgcttgaggctgctctcggttatgcatcttatgtggccatggtggaccctgccaagggcgaagttctgagggccaaagtgctcgctttgagagctaagtataaacagtga

SEQ ID NO: 13479 - RNA, 1425 nt, synthetic construct
  source 1..1425: mol_type = other RNA
atgtcggaaaaagcacctgccaacaggaaggagctgtttgaacgcatcgcaagaggcagcaaggatgccataattctcgatgaaatgcagcggctcgggttctggccatcccagcagagcttgcctaacgaacccccggacgaagtcactcggttagctgccgctagagcccgtctggccgaactccatcgcaatgcctctcgcctaaggaacttggtggaactggagagagaggctaaaaagcagcgaatggctgaatcaagggcccggagagtggctaccaaacagaaacggctcggcgagcgcgcggtaaaaaggaccgcaactcagcaacgcaaaaccatagagttgcgttatcttggcgctacagtgtcagccggtctgcaaccaggtgtcggagcaattaccgacggagctgccgccaccatcgctcaactgggcttacctgcgtggcagacagcggcggacattgcgagggccatgcaggtttccattgggaccttgcgacacctggcatacgcaagagaggtgagtaccataaaccactaccatcgcttcagcatagctaagaagagcggaggggtaagggtcatctcagcgccccaggtcaagctcaaagccgcccagaggttcattctggatgaattactggctaaattcccactcagcaatgcagcccacggatttgcagctgggcgcagtattgtaagtaacgccgcacctcatgtagccgcggcaattttgatcaacgtggacctgcgagatttctttccaaccgttacttaccggcgcgtgaaggggctgtttcggacgatcggctacaacgaggaggtcgccatcgtgctagccctcctgtgtacagagcccgagatcacggaaacccagctggacggcgttacttactatgtcgcaaggggcgagcggaagctgcctcaaggagctccgacttctcccgctatcagcaatgccctgtgccgaagactcgatgccagacttgggggctggtgcgccaagcatgggtttgccttcacaagatatgctgacgatcttacactctcctcacacgatcggaatgccaatgttggggaggcactggccgttgctcgtcgattagtggctgcagagggattcgtggtccacgcagataaagttcgcgtagtgaggcagggtggacggcaggaggtgactggtgtggtggtgaatcaaaagctgtctgtgccaagagacgagcttagacgttttcgggccctgttgttccagcttgagcatgacggccccacggaaaagtcctggcacggcgtgggagctgacggaacaggtgacgtcgtgcagtctgctaggggctacgcatcctatgtccacatggttgaccccgctaagggcgccatcctacttgcaaggctggatgccctgacaaagcgatga

SEQ ID NO: 13480 - RNA, 1527 nt, synthetic construct
  source 1..1527: mol_type = other RNA
atgtctaatcgcaggcaggagctgtatgatcgaataagaagcacatccaaagacgaggtggtgctggaggagatgattcgcttgggcttttggcccaggcagggttcaatgcctctcgaccctggagatgaagtcaggcggcggggggaaattgagcgggaattggctgcattacgcactgagcagactcgcctcggtaatctcgaggccctgaaaaaggaagccttgaagagacggctggccgagagcaaggaaaaacagaaagaaactaaggccaggagagagcgagaacgggttgcaagagcggccgcttgggcacaaaagaaagcgggagagattggctttctggggaccggtgtgtctggaggcctgggacacaccgaaacagatgagcctaagcttgtcgctcagagcctaccagcactccggagcggaaccgatattgctcgggccatggggatcacggttggggagttacggtttctagcctttgacagacgcacgagcgaaacgtcccactacgttagattcaccattccaaaaaaggccggtggggagagacttattagtgcccctatgccacgcctcaagtcagcccaggcgtggatcctggagaacttgctgggcaaagtggccttgcatgacgcagcacatggcttccgggcggcacgttcgatcgtgaccaacgctagaccgcacgtgggggctccactcgttattaacgtggatcttaaggatttcttccctacactgacactgggacgtatcaagggggccttcagagccttgggctatggggaccacgtcgctacagtgctcggtctgctgtgttcagagcccgatgtagatcaggtggtgttagatgggaaaacattttacgtggccaatggcaagaggaggctgcctcaaggagcccctactagtccagcaatcaccaatatcgtctgccggcgcctcgatagaaggctggcgagtgccgcgcaaaagcacggctttgtctatactcgctacgccgacgacctaactctctcctccatagaccccgccgctaacccagctagagtactgggcgtacttaggtggatcgtcgcaggtgagggatttgtggtccatcccaagaagacacgaatccttcgtaagggcgcgcgtagggaagtgaccggcgttgtagttaacgagaaactgagcgtgtcacgcgagcagcggaggaaattccgagccttcctgtttcagctggacaaagacggacctcagggcaagcaatggggagcctctccggacgtattcgcctctgctttaggctatgctgcatacctcgcaatggtcgaccccgaaaggggtaaacccgtccttgcccaggctcgagccatagcaaagaaacatggctggaaagggaaaccccgacccgtgaaggctgtgcaggctgcaccgatgcctcccgttgctccaccagtggccgaacccatggcacccacctccccagaagctccagccgagcctaaaaagaagtggtggaagctgttctga

SEQ ID NO: 13481 - RNA, 1584 nt, synthetic construct
  source 1..1584: mol_type = other RNA
atgacttaccgcagatattcaacccagcccagtagccgccaggagctgtacgacagaattagggattcctctaaagatgaggtaattctcgaggagatgattcgtctggggttctggcctgctgcaggtacaatgcccgatgacccagcggacgaaatcagaaggaggggcgagctggaagcagaactcagagccctgcgaacggagaggagccgactccacaatatcgaggccttgaagaaggaagctcgcaaacgtcggatggctgagtcgcgacggaagagacaggagactaaggaacgtagactgcagcagcgtgtcgaacgggccgctgtttgggcggagagaaaaaaatccgagctgctgtatctgggggaagaggtcagtgccggtctaggagaggctgagcccgacgctcaacgactcgcacgccatgggctgcccagcttctctgatgctgcccagctagctcgagccatgggcctcagtctcggtgccctgaggcaaatgtgtttcgatagggcgacatctcgaaccaccaattatataagattcgtgatccctaagcggacaggtggtgtgagagagatatccgcccccaggccacgtttaaaagaggctcagcgctgggttctggacaacatcctttcaaagatagctctgcacgatgcagcacacggcttcagagataagaggagcatcgtaagcaatgcccacccacacgtgcagccagcagtgcttgtgaacgtggatttgaaagactttttccctacagtcacataccggcgggtcaagggaatgtttcggaagttagggtactctgagtccctgtccacggtccttggactcctgtgttccgaaccccgagctacagaactctcacttgacggagtgacctattacgtggccctgcaggagcgggccttaccacaaggcgcacccacttcgcccgctgtgacgaacatcatctgcagggggcttgacgcaaggctatgcgcgattgcctctaagctggggtttgtctatacccgctacgctgacgacctgaccttttcctctaaagataagactgttaacgtgggtcgcttgcttaggcagctccgcaagattgtggacgacgaaggatttgtggtgcatcctgacaagacaagggtcttgcgcgccggccgcagacaagaagttaccggcattgtggtaaatcatacccccaatgttacccgggatgtcttgcggaaattccgggctaccttgtaccaaatcgaaaaagacggaccgcaggggaaaacttggggccatagcgatgatgtgattgccgccgtggaggggtttgccaactatgtggccatggtcaaccctgataaaggccgccctttagttgaacgggcgagagccctggtaaaaaagcacggcaaaaagccaacccccccgaagaaagccaagaagccagcagcaagcactgcgccgcctcctcaggctaggagtgaagcaccagccgccactgcagcccagtcagaaccacctgagacagacggagatgacggcggaggcaagaaaaagaagaaaaaatggtggaagatcttctga

SEQ ID NO: 13482 - RNA, 1587 nt, synthetic construct
  source 1..1587: mol_type = other RNA
atgtccagaccctcttccaggcaagagctgtacgaccggatccgcgagtcctcgaaagattctgtcattctggaggagatgatcagactggggttttggccccaggcaggcgtgcttcccgaagatcctgccgacgagatcaggcgccgtggggaactcgaggggaggttgaggtccctccgcaccgaacagtcgagactcagtaatgtggatgccttaaaacgggaggcccggaagcggaggatggtggaaagccgccgcaagcagaaggagacaaaggagagacgactgcgggagaggcgggaaagagcggaagcttggaaagagaggaagggccgcgaaatcgtttatctgggcgagggtattagcgccggcctgagcgatatcaagttagacgccacaaagctagcaggccaagggctccccagtttcgcagatgccgccgcagttgcgcagaccatgggtctgtctatgggagagctcagacggtttgccttcacgcggaccaccagcaaaaccactaactacatgagattctccatacctaagcgaacaggaggggaacggcacattagcgcgcctctgccgcgactcaaagaagcccagaggtggatccttgatcacgtgctcgccaaggtgccccttcatgaagctgcccacggtttcgtcgggggcaggagtatcgtctccaacgctacagggcacctgcagccaactgtgttggtaaacctggacttggaaaattttttcccgacagtgtcatacagacgggtcaagggcttgtttcgctctctcggctacagcgagcaggtggccaccatttttggtcttctgtgcactgaaccggaggtcactgagctggagctcgacggagccacttactatgttgccttggaggaaagactactgccccagggagcgccaacctctccagctattaccaatctaatatgtcgcgctctggatgctaggctgacttcaattgccacagctcttggctttcactacacccgatatgccgacgatctaagctttagtgcacagggcgccgacgctgatgctggacgtctgcttagaagggtgcgacatgtcgtagcagaagagggcttcgtggtgcatccaaagaaaacgcgcgttttacgccgggggagacgtcaagaggtcacaggcatcgtggtaaacggtgaccgtccttccttggccagggatgtgctgcgacgtttccgggctaccctgtttcagctggagaaagatggcccagcaggaaaaaggtggggccgagccgttgctgacgaaggtgacgacgtcattgctgcggtggaggggttcgcgaattatgtagtgatggttgaccctgagaaaggccagctcttacaggaaagaacccggaaactggtggccaggtatgggaagaagccaacacctccccgcggaggatctggaggctcaggaggaggtggagggccaagacccgctgctgaagcacctgccgcagcagcacaagcacccgtggttgaggctccccctacggcacctactgaagccccatcaaagaaaaagaaggagaagtggtggaaagtcttctga

SEQ ID NO: 13483 - RNA, 1635 nt, synthetic construct
  source 1..1635: mol_type = other RNA
atggccgagcctccacggaccagacaggaactctacgagcggattgtcgccacttcaaaagacgaggtggtgctccaggagatgattagactggggttctggccagctgctgggaccttacccgaagacccagccgacgaggttagacgtcgggccgaactgcaacgacagctcgatcggctccacgagcaaaatagacatctttacaacgagcaggccctcataaaggaattaaggttacgccggctggcggagtccaagcgcaaacagcaggaaacaaaggagcgcagagagagggaaaggctagctcgagccgaggcatggaagcaggaaaaaacgaggagcattgtttacgtaggggagggggtcagtgcaggtctgggtaagcgggaagcaaagcccgaacgcctgaaggagcatggccttcccaactttacctcggccgccgatcttgcgtcagcaatgaaaattagcgttggcgccctgcggttcctttgctttgcacggaaaacatcatctgtgtctcactacgtgcgtttcaggatcccaaagaaaagcggaggcgaacgattgatatccgcacccatgccgaggctaaaggcagcgcagagttgggttctgcacgagatcctcgagaaattggcgctgcacactgcggctcatggattcgtcaggggacgtagcatcgtctccaacgctaggccccatgtggggcacgcattgatagtcaacgtcgacctgaagaactttttcccaacagtgggctatccaagagtgaaaggactgttcgccagcctgggatatagtgaagaggttgcgaccctgctgggattgttgtgcacagagcctgacgtggaggaactggtgctggacgggcagaggtatttcgtggcccgaagcgaaagacacttaccgcagggggcacccacatcccctgcaatcactaatcttttgtgtcgaagactcgaccgccggcttcagaagatggccgacgaactgggctttgtttatacgagatatgcagatgatctcaccttttcggctaagagcgaggatgtggggcaggccgccgaagtactacgaagactccggaatatcgtggctcatgagggctttgtggttcacccggaaaaaacacgcgtgttgagacgcggccggcgtcaagaagtgactggtgtcgtcgtgaatcacaagcctggcgtacctagggatgtcctgcatcgcttccgcgccaccctgtttcaaatcgagaaggatgggcctagcggcaaacgctggggagcctgtaaggatgtgctggcgagtatcagaggctttgcctcctacgttcgtatggtcgatcccgctaggggtactccgctctgcgctagggtcgacgctattgtggccaaatactctggaaaacctagtcccccagctccctccggtgcaccagcaaagaagcccgacgtaccaaaaccagacgccgcaaaacctggcgccgctggatcagtacctgccgctactaaaaccgccgaggctctggctaaagctgcccccacgcctgcttccgtggtgtctgatgcaaaggagccctcatctcctgcctctgacgccaagacaccaaccggcaagaagtggtggaaggtgttctga

SEQ ID NO: 13484 - RNA, 1677 nt, synthetic construct
  source 1..1677: mol_type = other RNA
atgctggctccttgcggctctccaccgagtaagcgattagtgttcctgggagcctcacggaccctcgagcaatggcttgctgtgcggccgccccaaatgcacgccaatagacctgaaccaagccgcgcgatgtcgcagccttcttccagacaagcactgtacgaccggatcaggaagagcagtaaggatagcgtcattgtggaagagatgattaggttagggttttggcccgcagcaggtaccatgcccgaggatcctgctgacgaaatccggaggcgggcagagcttgaagcacagttacgagctctgcggacagagcagacccggctccacaatatcgaggccctcaaaagagaagtgagaaaacgcaggatggccgaggctcgtgaaaggcgcaaagagactaaggccaggaagctggcagaacggcaggcacgcgctgagacatggaaagcaaaaaaggagactgacatcgggttcttgggcgagggtgtttccgctgggcttgggcataagggatgtgatgcagaacggcttgctgaacatggcttgccggaactggccgatgctgctgccgttgcagcagctatggggatagatctgggaactttgcgcttcctcgcatacgcctgtacaacgagccgtgtctcgcattatgtccactttttcataccaaagcgcaccggaggcaagagagccatttccgcaccgatgcccaagctaaaacacgcgcagcattggattttagccaatgttctagatccagtcgccctggacgaacacgcgcatggtttccgccacgggcgttcaatcctgaccaatgctcagccccacttgggctctcgggttgtagtaaactgtgacctccagaacttttttcccaccgtgagttaccggagaacgaaaggcctcttccagtccttgggctatggcgagcaagtggcgtccatttttggcttgatctgcacagcccctgaaacccaggaggtggagctggacggccagaggtatttcgtggccctcggcgatcgtgttcttccccaggggtcaccagccagccctgcaatcaccaacctgatctgcagaggcctggatcgcgctctcgagaaaacagcgcgccagcttggcttcaggtacactcggtatgctgatgacctgagcttctccagcgatgacgccaatgccgacgtagggcgcctactgggaagggttagatggctggtccagagacatggatttgtcgtgcaccctgacaagacaagagtgctgcgccagagtagacgccaggaggtaaccgggattgtcgtgaatgagaggcctgccgtcccccgtgaaaccctgaggaggttcagagccactctgtttcaaattgaaaaggacggtccagccggaaagagatgggggcgagccaccggagataacggagtggacctcatggctgccatcgagggattcgccaactacgtggcgatggtggacccagcgaaaggtcgacccctcaaagcccaggtggccgctctgatagcccgataccccaaacaagcaacgccatttaagggccggcgaaggccttcacagtctactgactctcccacatctgagcctaagcgagatgccactgctccagaggtggtcgacggtacaaaaaaaaagaagaactggtggaagctgttttga

SEQ ID NO: 13485 - RNA, 1254 nt, synthetic construct
  source 1..1254: mol_type = other RNA
atgtccggtgaccgtccccgcacaaggcaagaactatatgaccggattcgcgagacttcgaaagatgaagtgatcttggaggacatggtgagattgggtttttggccaaggaccggggagatcccccaagaccctgcagatgagatccgccgaaggggcgacctagagagacagatcgctgcacttaggacagaacaggccagactctccaatgttgaagcgctgcgaaaagaactcaagaggcgccggctgctggagtcaaaggagaagcaaaaggcgaccaaagaaagacgcgaacgggaacggttagcgcgggctgcagcatgggctgaggagaaaaagagggccatcgtgcatcttggggccggggtcagtggaggcctgagtaagggagctcctccaaatctggaaaagttgacagctctgggcctccccaggttagccacagccgcagaggttgccgcggcaatgggtattgctgtgcctgagcttaggtttcttgcctatgcacgcaaggtgtcacagaagacccattacgttagatttacaattcccaagaagacgggaggggcacgactgataagcgctccgatgcctcgactgaagagagcccagagatggatcctggatgccgtactggccaaggttgccttggagggtccagctcacgggttcgtcgttgatcgctccattgtcaccaacgcaaggcctcacctgggatcccaggtggtggtcaacctcgacttgcgtgattttttcccgtcacttggattcagaagggtgaaaggcatgtttgagggactcggctacggggaagaagtgtctactatattcgcgctgctcaccacagaaccagaaattgacgaggtcgagctggacggccagacttatttcgtagccaccactgctcggaaactcccccaaggttctcccgcatctcctgcaatcacgaacgtggtatgcaggcgtctggataaacggttagccggaatggcccgggctcttgggtttacctacacgcggtacgctgacgacctgaccttcagcagcaaagatcgcgccgctgatgtgggcaaactcctgagacgtgtgcgatggatagtcaaacaggaaggcttcgccgagcacgagaagaagactcgcgtgctccgaagaggccggtgtcaggaggtaactggcgtggtcgtgaatgataaaccaagcgttcccagagaggccttgaaacgcttccgggccctactgtttcagctgtga

SEQ ID NO: 13486 - RNA, 1560 nt, synthetic construct
  source 1..1560: mol_type = other RNA
atgtcaaaacagcccacaacgcgcaaggccctttatgagagaattgctaagagtagcctggatgaggtcatactagaagaaatgatcaggcttggattctggccttctagcagcgatgctcccagcgatccggctgaggagatcaggcgcagagggcacttgcagaggcgcctcaatgaaatacgaacagagcagctcggtctgcagaacgaggccaaactgaaagaggaggcccgtaagaagcggatgtccgatgcaagagaacgcagattacagaatagggagaggcggctgagggagcgttcagagcggagagctcagtggcatcagaaaaagcaagaggagatcggttacctcggcgatggattttccgcaggcctgggtaagcgtgagtgtgatgacaagcggctccaggcccagggcattcccgttctcggtgacgcaatgtccctatccaatgcaatgggcatttcgctgggccagctgaggttcctggcattctcacggaaaacaagccgctattcccactatcagcggttctccatcccaaaaaaggatgggggggtgagaatgatcagtgcgccaatgccacggctgaaagctgcacagacttggatactagaaacgatccttaacccacttcccatgcatgacgctgcccatggtttcaggcctgggagaagtattgtgagcaatgcgaccccccacataggagcagacgtggtggtcaatttagacctcgaaaactttttcccttcagtgggctaccggcgagtaaaaggtttgttcgggcacttcggatacagcgaggaggtggctacaattctggccctgctgtccacagaacccgaattgactcagatcaagctggacggcgacacgtattacgtcgctaaaggcgaacgattcctcccccaaggagccccgtcttctccagcaattaccaatctgctctgccgtcggctggatagacggttagagggtatctgcaacaagcttgactttcgatacaccagatatgccgacgatctgtcattttctgcaagaggggaacctgcaaagcttgttggcaagttgttgtctcaagtggagtggctggttgccgaagaaggctttaaaatccaccctgacaagacccgcgtattccgcagaggaaggcggcaagaggtgaccgggcttgtcgtgaacgatggactgagtgttccgcgagccgtgttgcgcaggttcaggaccctgctgtttcaaattgaaaaggacgggacagatggcaagaggtggggcgccagcgacgatgtcttagcctccgctatgggatttgctaactttgtcgcgatggtacagccagagaagggagccagtttgcagacccaagtgcgcaaactcctgaagacttacggcaaggccaaagctcctcgcgcgcagtctgccgagtcaaaggggactgaatctaaaggagccgaaagcaaggggaccggccgaggacctaccccaacatcggacgaaactgacaaaaaaactgaggacctcgcccccaagaaaaagtggtggaaactattttga

SEQ ID NO: 13487 - RNA, 1578 nt, synthetic construct
  source 1..1578: mol_type = other RNA
atggcccagcagcctcctcgtaatcgccaggagctgtatgagcgaattcagtcgatcagcaaggaggagtttgtcctggaggacatggtcagactgggcttttggccggcaagatccggcgtacctggcgatccccgggatgaagttcatcggaaggcagagctcgaaaaacagataagggctctgacaagcgagcaagccagactcggcaacctggaaaagctgaaaaaagagctccggaagaagcgtctcgctgaatctaaagccagacagaaggagacgaaggagcgccgcgagagagaacgagttgctcgggccgaagcatggaaggcccggaaagccagagagattttgttccttgggagaggggtgagcggcggactgaatcaccgcacccctgaggcccctaagctcgagagacagggcttaccccgtcttgaaacccccgaagctttagcccaggcgctcggactaagtgtcggtcagctgcgggccctgtgctacgctaggacagtgtccactaaaacgaactacgtgaggtttgccttgcccaaaaagaccgggggcttgcggcttatttctgccccccttccgaggctaaaagcggcccagcattgggtgctgaagaatctgctcgaaaaggtccccatgcatgaagctgcacacggtttccgcccggggaggtcaatcgtgtcaaatgcaaggccacatgtgggggccgcagtcgtggttaacctggatctgaaggacttcttcccaacagtagtatatccgcgcgtaaaggggttcttcgtgaagttgggatatagtgaggcaacagctactgccctatctctgctctgtaccgaacctgacatggaggaagtggaactcgacggccaaaggtacttcgtcgctcagggcggtcgtcgactacctcaaggcgctccaacttccccagcactgaccaatttgttgtgcaggcgcctggatcgacggcttaagggggcagcaggcaaactcggttttacctacactcgctacgcggatgatcttactttttccgtcccaagaggaggaacgggggacgtgggcaagatgttaagactggcaagatttgtcatcaggcacgagggattctttccccacccagaaaaaacccgggttctgaggcgcggtggacaacaggaggttactggagtcgtggtgaacgacaagccaggcgtggatcgggagacactcaggaggttccgggcgcttctgcaccagttagagaagtcaggacccgagggtaagaaatggaacgggagcaccgacgtgatcgcaagcgtggttgggtttgccaattatgttgccatggtggaccccaccaaaggtaaggccttccaggacaaggcccgcgcgttggaacgaaaatacggccgaaaaactgtgctgccccctagacctaaagccccagccgctgctcaacccggaacagctaccgtggcccccacaccaccttctagtgggacagctgctccaggcggacctcccaagccagaggaaccccaggaaccaaacgagccgcctaagaaaaaatggtggaaactgttttga

SEQ ID NO: 13488 - RNA, 1563 nt, synthetic construct
  source 1..1563: mol_type = other RNA
atggcacagcagccccccagaaatagacaagagctgtacgatcgaatccgggagacgtccaaagaagaagtgattttcgaggaaatggtccgtttgggcttctggcctgcgcgtagtggggttcccggtgatccagctgacgagctccacagaaaggccgacctgagggcccaactgcgggcattaacaaccgagcagagcagattaggtaatctggaacggctaaaaaaggaactccgcaagaaacgcttggccgaaagcaggaggaagcagcaagagactaaagagaggcgggaaagggaacgcgtagctagggcagaggcttggaaagcccggaaggccaaagagctgctgttcctcggaaggggcgtttcgggagggctgagccacagaactcctgacgtggcgaaattagaacggcagggtttgcccaagcttgaaacacccgaggtcctagctcaagcgttggggatgaccgtgggacagcttcggggattatgtttcgccagaaccgtcagtaccagaactaattatgtgcggtttgccctccggaaaaagaccggcggcctgaggattatttccgccccgcttcctcgactcaaggcagcacagcactgggtcctcgagaacctgcttgagaagctgcctatgcatgaagccgcccacgggtttcgacctggacgctctatcgtgacaaacgctctcccccatgtcggtgcagctgccgtcgtaaacctggacctgaaggattttttccctacagtggtttatcctcgagtgaagggcttcttcgtaaagttaggctactcagaggccacagctaccgccctggcactgttgtgcaccgaacccgatctagaggaggtcgaactggatggccagaggtactatgtggctcagggtggaagacggctgcctcaaggtgccccaactagccccgccctcacgaacctgttgtgccagcgccttgaccgcagactaaagggcgtcgggcgaaaactggggtttacttacacccgatatgcggatgacttgacattctcactgcccccagggggaccaggcgatgtaggaaaacttctcaggctggtgagatttgttatccagaaggagggcttcgttccacaccctgagaaaacccgcgttctcaggagaggccgtcagcaggaggtgacggggatcgtagtgaatgacaagccgggagtcgaccgtgaaactctccgccgctttagagctcttctgcatcagctggagaaatctgggccagagggccggacatggaacggttccacagacgtgatagcatccgccgtgggctttgccaattacgtgatgatggtggatccgaccaaggggagggtgtttctcgaacaggcccgtgccctggagaaaaaatacggacggaaagcggtggttcctccgaggcgcaaggcagcaccaccagctcaagccggcactgctgccgctccaccttcaggtgcacgccttggcgaggagcccaagtctggggaacccgctagtcccggagcaccagctaagaaaaagtggtggaagctgttctga

SEQ ID NO: 13489 - RNA, 1602 nt, synthetic construct
  source 1..1602: mol_type = other RNA
atgtcaagccagcccccccgcaatagacaggagctgtacgacagaatcagagccggctccaaggacgaggtcgtcctcgaagaaatggtgcggctgggcttttggccagcacgctcaggactgccaggtgatcccgccgatgtcgtgcaccgacgcaacgaactgcaaggcgagattagggcattgacgagcgagcagtcccggctagggaacctcgaggccatgaagcgagagctcagaaaacgccgcctggaagagagtcgaagaaaacagcaggaaacaaaggagcggagagaacgtgagaggctcgctagggctgccgcatggaaagaacggaaaggcaaagagctgttattcctcggcaggggggtcagcggaggtctttcagagcgaacccctgatgaagccaagctaaccaggctcgggttgcccgttttggccacgcctgaggtgttggcccagacccttgggttgtctgtgggcaaactgcgggccctgtgcttcacaagaacagccagcacaacctctaactacgtccgctttcagctccccaagaagacagggggcaccaggctgatatccgcaccgcttccccgattgaaggcagcgcagacctgggtccttgaaaacattctggaaaaggtacctgtccatgatgccgctcacggatttcgggccggtaggtccatcgtgactaatgctcggccacacgtaggggccggggtagttgtgaacttagatctgaaagacttcttcccgtctgttttatacccacgcgtgaagggcgtgttcgtcaagctgggctactccgaggctaccgcgactgtgctggcgttactgtgtactgagcctgatgtggaagaggtagagctggacggacagaggttcttcgttgctcagggaggcaggcgcttacctcaaggtgcccctacctcacccgccctcacaaatatcctgtgcagaagactagaccggaggctcgcaggtgctgcccgtaaactggggttcgtgtataccagatatgctgatgacctgacgttttctgcccatggacctggaccacatgacgccggcgaactactgcggtttgtgcgatggcttgttggggaagaggattttactccccacccagaaaaaaccagggtgttgcgacgcggccgtcaacaggaggtgactggcgttgtggtcaatgacaaacccggagtggacagggagactctgaaacgtttccgggcactcctgcaccagcttgagaagagtggaccagagggcaagcgctggggcaatagtggagacgttattgcgagcgccgtgggatacgccaactatgtggcgatggtggaccccgtcaaggggaaggccctgcaacagaaggccagagccctcgaggcccggtatggtagacgtcctagtccgccacctcgggccaaagcagccaagggtgctgctcaggcagggtctagcgcacctgtatcctcggctgctccgccagcacaagcacctgaaacaccagctgctgctccagcagcacctgctgcgactccagatagcggccagaaacccgcggaaccccccaaaaagaagtggtggaagcttttttga

SEQ ID NO: 13490 - RNA, 1548 nt, synthetic construct
  source 1..1548: mol_type = other RNA
atgagctcacagcccccgaggacccgacaggaactgtatgatcggattcgcgccacatctagggaagaggtcatcctagaggacatggtgagactgggattttggccggcgcgcacagaacagccaggtgatcccgccgaggtgatccaccggagaaacgacctgatgggccagcttcgcgctctgacaaccgagcaacaccgcttaggcaatcttgaggcaatgaagagggagctcagaaaaaggcgccttgtggaatccaagcggaagcagcaggagactagggagcgaagggaacgtgagagagttgccaaagccgccgcttggcgggaaagaaaggggaaggagttgctgtttctgggcagaggcgtaagcggaggcctctctgccagagagactgatgaagcaagattgacaagacttggcctgcctgtgcttaccagcccagaggccctggctgaggcattagggctacgggtcggtcaattgagggccctctgttttacccgcacagcgagtaccacccatcactacgtgcggttcctgctgccaaagaagaccgggggaaccaggttaatctccgccccgttaccgcgccttaaagccgctcaggcttgggtcctgacccaagtcctcgaaaaggttcccgttcatgaggccgcccatgggttcagacctggcaggtcaatagtaaccaatgccagaccccatgtgggtgccgcagtggttgtgaatctcgatctgaaagacttctttcccagtgtggggtaccgacgagtgaaatttgccttcatgcacctgggatactcagaagccacagcaaccgttctggctcttttgtgcactgaacccgacgttgacgaggtagagctggacggccggaggtactacgtctcgcaaggaacaagacgactgccacagggggctccttcctctccagccattacgaaccttctctgccgcaggttggacgctcgtttgacaggaactgcacgcgccctgggtttcgtgtacacacgctatgcggatgacctgaccttttctgcaacggggcctggccatcacgatcctggaactctactcaggcgagtgaggtggctcgtgaaacaagaggacttcaccccccacccggacaagacacgtgtcttacgacggggccggcagcaggaagttacgggtgtggtggtcaacgataaacccggtgtcgatcgccagaccctaaaacgctttagagcattgctgcaccagctggacaagacgggcccagagggaaagcgttggggagcaggggcggatgtactgagctccgcagtcggctatgcgcacttcgtggctatggtggatcccctcaaaggccgggccctcgaactcaaagcacgggagctggaacggcggtatgggcgtaggccaccacctgctccacccactcctccacccgctgctacagccgcaccagctcctgaacccactccacctcctgctcctcccactgagcctactcccgccagtcctgaagcgcctaagaagaaatggtggaagctgttctga

SEQ ID NO: 13491 - RNA, 1629 nt, synthetic construct
  source 1..1629: mol_type = other RNA
atggacaggaggcagcagctgtacgatagaattcgatccactagcaaggacgaggtcgtactcgaggagatgatacggttgggattctggcccgcaaggggcacactgccgtcagatccaggagatgaaatcagagacttagccgaggcccaaagggagctcgctgcactgcggactgagcagagtagactgcataacctggaggcactgaagaaggagctcttcaaacgtcggcttgcagagagcaaagcccgccaagccgaaactaaagcccgtcgggaaagggaaagggtggcgagggccgaagcctggaagaacgagaaaactcgcgctatcgtctttctgggacgcggagtctccgggggtctagctgatacgacctgcgacgaagccagactgcagaaacagggtcttcccgtcctgcggaccgctgaggatttggccagggcagccggtgttacggtgcctgagctccgcttcctcgcttatgctaggacaaccacagccgcccgcgtgagccactacagacgatttcagattcccaaaaagaccggcggcgtgcgaatcatttctgcacccatgcgccggttgaaggcccttcagcgctggcttcttgacgctgttttggccagagttgaggtgcacgatgcggcccacggttttagagccgagcgcagcatcgtcaccaatgctgggccccatgtgggcgcaagagtcgtggtgaatctggacctcaaggacttttttccgaccgttactctgccgaggataagaggggtatttcgaagtttaggctatggagagcacttggcaaccattttcgcactccttgcttcagagccggacacagtaagggtcgctctggacggggctgaatacgacgtagcccaaggaccacggaggctccctcaaggggcaccaacatctcccgctatcacaaacgtgctctgcaggcgcctggacaggagactgttccacgccgccaagaagctgggcttcgcgtactctcggtatgccgacgatctgacgttcagtagcacctctaaagaagagaacgccgggcagttactgaagcaggttcgatttatcgtggcagccgaaggcttcgtgccacacccggataagacccgggtcctgcgaaagggcagacagcaggaagtgacaggcgtcgtggtgaatgacaaactgggggtggatcgggtgactctacggcggttcagagctctccttcatgcgttggataaggacggggcgaatggaaaacgctggggctcctcccccgatgttttcgcgagcgcctgtgggtttgcttcgtatgtagccatggtggaccctgtgaagggcagagctctgttggcgcgtgctcgcgagattgcagcccgtcatggatggaagggaccaccccgaggcccagataggtcaggtggcccatcaggacctggtggtgcccctaaaccccctgccccagcaactcccagtgaacgtgctcccgccccagttgcaggcttaccaggggagccactagcggcaccccctacacctgaacctcccgctccagaacctcctgcaccagcctcccctcctacacccgaaacccccgctaagaaaaaatggtggaagctgttttga

SEQ ID NO: 13492 - RNA, 1587 nt, synthetic construct
  source 1..1587: mol_type = other RNA
atggcacaggataagcgccaggcgttgtatgaccggattcgggctacatcccgtgatgaggtggtcctggaagagatgattaggctaggtttttggcccgctcgaggtgaagtgccacacgaccctgccgacgaaattcgcgcccgcactgagatgcaacgcgagctgagcgcgctgcgaaccgaacagagccgactcgggaacctggaggcgctcaaaaaggaactgtacaaacgtcgcctggctgccagtaaggcgaaacaggctgagacacgcgcacgcagggaaagagagaggctggctagagccgagggatggaaaatccgaaaggcaggcgacatcgtgttccttggcagggaagtaagcgggggcctgtctgacacgacctgtgacgaggcgaagttaacaaagcagggcctcccggtgctgagaaccgctgtagatgtggctcgggctgcaggcgttggtgtgcctgagttaaggttcctcagctatgcccgaacaactagcaggatatcacactaccgtcggttcgccatacccaaaaaagccgggggagtgagggtgatttctgctcccatgccaagactcaagcggctccaacgctggttgctggattcagtcttgtcccatgtcgaggttcatgatgccgcccatgggttcagggagggacggtctatcgtgtccaacgccaaagcccacgtgggagctagagtagttgtaaatatggatctttcagacttctttccgggggttctgtttcctagagtgaaaggaatgttccgggccttaggatacggcgactttgtggccagtgtactggcccttgtcgccacagagcctgatatgcagaaagtcgtcctggacggccggacctttcacgtcgcagaagggccacgtaggttaccacagggtgctcccacctcaccagcggtgaccaacgtgctttgcagaaggctcgatcgcaggttgtttctggccgcccgaaagctaggcttcgtttatactagatacgcagacgacctcacattttcggcccatgatgatgcaagtgccggcagaaccgggcaactcttggcacaggcgcggtttatcgtggaggaggaaggcttcacgccacacccgaagaagactagagtgcttagacgcggtcggcgccaagaagtcacgggcatcgtcgttaatgatggactgggggttgagagagagaaacttcggaagttccgggccctgttgcacagcatccgggcaactgggattgaaggcaagacctggggtgacagtccagacgtgctggctagcgctcgcggctttgcctcctacgtggccatggtgtctccggaaaaagggagagcactactcggacaggtggccgaactggaggccaggtatggagcagcaaggccccctcgagcctccaaggaaggcatgcatgcaaaagccgcccctacctccgcaggacacgctactcccgttgctacatctgaggcaccccgtcccgagaatgtcccacctgaagctcctaagcccgaagctcccaagccagaggcagaggctcctaagaaaaagtggtggaagctgttctga

SEQ ID NO: 13493 - RNA, 1407 nt, synthetic construct
  source 1..1407: mol_type = other RNA
atgtcagaccgcagacaagcgttatatgacagaattagggcctcctctaaggatgaagtaatactggaggagatgatcaggtttggcttctggccagcagctgggttacctggcgatcccgccgaggaagtccgtcgacagggcgaactccagcaacgattgaccgccctgagggccgagcgagacaaactggccaatgttaacgaactgcgccgcgaagctaggaagcagcgtctgcgggcaagcaaggataaacggcgcgagacaaaagcccggagactacgggagagggcagctagagctgctgcatggcgcgccaggcaagcactggaactgacttttctaggggcagaggtgtcaggggggatgcaggacacaacctgtgatcgggccagacttgcggcccagggtcttccagcattcgcaacggcggccgaggtggctcaggcaatgggtataactgtgggggagctgagattcctggccttcgcccggagagctagccgtatctcccactacaggagatttacaatgccaaagaaatcgggaggcgttcgcgccatttctgcacccatgccgaggctcaaaagagctcagcactggctgctggcccagatcttggccaaggtcccgactcatgacgccgcccatggcttttgcgctggacgcagcattgtgacaaacgctcgccctcatgtcggagcggctgtggtggtcaatctggacctgcaggacttctttcctaccgtggaactgccccgagttaagggcctcttccgcgccctgggatatggcgagcaggttgcgaccgcctttgcccttttggctacagagcctgtgacagaggccgtggagctcgacggacaggtctggcatgtggctgcgagtgccgcagcacgcagacttccccaaggaagccccgcttccccagccattacgaacttgttgtgtcggaggttagacaggcggctccgtggcgctgctactgcattggggttcacatatacccggtacgctgatgacctgacctttagtgccactgcacctgcagcggtggagagagcaggcaagctcctgactcaggtacggtggctcgtgggccaagaagggtttgtggtccaccccgataaaaccagagtgctaagacgtggcaggaggcaggaggtgacgggtctggtcgtaaatgaacggctcggggtccctcgagatcagctgaggcgcttccgggcccttctccaccatctggacagacgtggcttagaaggagcccgatggggtgcctccggggatgtactcaccagtgcagctggtttcgcctcttacgttgctatgatcgatcctgttcggggagccccacttgtggcagaagtcgccaggttggctgcgcgacttgctccagcccgctga

SEQ ID NO: 13494 - RNA, 1647 nt, synthetic construct
  source 1..1647: mol_type = other RNA
atgcctgataaacgccaagaactgtacgagcgtatcagagcgagctctaaagatgaggtgattctggaggagatgattagactggggttttggcccgcccagggccatttgccagacgatcctgccgatgagatcagacagcgggcagcattggagcagcagcttgccgcgctgagaaccgagcaagctcgcctgcacaatatagaagccctgaaaaaagccctgcggaagcagaggctcgaagccagcaaggccaaacagcgggagactaaggaacggcgggaacgcgaacgagtagctagggccgctgcctggcgggaacacaaccagagggccatcggatacctggggcgtggggtttcagggggactcaaccagacggccgctgaccgagccgctttaaccaggcatggcgcgccggtcctagaaacagcggcagagctcgcagcagcaatgggcctgacgataccccagctgcggttcctcgcattcgcaagggcaacttccacagtgaaccactatcagcgctttgcaattcccaagaaaaccgggggcttacgccgtatctcggcgcctatgcctcgattaaaggccgcgcagaggtggattctagatcacgtcttagctggcgttgccttgcatgacgccgcgcacggatttagacctgctcgtagcatcgtgactaatgccgcaccacacgtaggtcgggacgtcgtggtcaatctcgacctcaaagacttcttcccaactctgacatatccacggatcagaggcgtgttcaggggcctaggctacggacccgctgtagcaacaatcctcgcgctcctgacctccgagcccgacattgatacggtggagcttgacgggcagacctttcatgtggcctcaggggagcgcaaacttccacagggcgctcccacaagccccatgatcactaatatcgtctgccgccgctttgacgctaggttggccggtgcggccaggaagttgggcttcacatataccagatacgccgacgacctgacctttagcggaccccgcaccgctgatgctggtgcattgctgtcagccgtgcgcatgattgctacggccgagggctttgccgagcatccagacaagacacgggttctgcgcagggggcgtcaacaggaagtgactggagtggttgttaaccagagacttgccgtcgacagagctaccctgcggcgattcagagccctgcttttccagatcgataaggacggccccgcaggcaagacctggaacgatgctcccgacctgttcgcagctataataggctatgcacactttgtgcacatggtcgatgccacaaagggagccgccctcgtggcccaagcaaaagctcttgctgctcggcatgggtggcgaccagcaagaaggccccctcctaagactagaggaggttctggtggaggcggaggtgggcctggtggatctggaccaggtgggtctggttccaggcctggcgaggctgaacgaaccgccacaagtaccggacccacaccgtccactgaaccggctcaacccgctcaaccagggccaccagatgctcctagtccgcccgatgcaccgagtcctgatgccccacctcctgccaagaagaaaaagtggtggcagattttctga

SEQ ID NO: 13495 - RNA, 1545 nt, synthetic construct
  source 1..1545: mol_type = other RNA
atggctgggcaacctacatcacgggaggccctgtacgagaggattcgaagcaccagcaaggaagaggtgatcttggaagagatgatccgcctcggattctggccagcccagggtacagttcctcatgaccccgcagaggaaattcggagaaggggagagctggaacgccagctggccgaactgcgcgagaagtcccggaagctctacaatgaaaaagtcttaatcgctgaacagaggaaagcgcgcctcgcggaaagtcgccggaaacagaaagagactaaggcaagaagggagcgggagcgtcaggagcgtgcacagaaatgggcggccagaaaagcgggcgagatcctgcacctgggggaagatgtgtcgggcgggatgtcccacaagacatccgaccccgagcttctgaagggagagggcttaccagtgctggcatccgccgaggaactggccaaagccatgggactggaggtgaatgcactgagattcttggcttataatcggaaagtatctagagtcagtcattaccaccggtttttgctaccgaagaagacgggaggattcagactaatatcagcccccatgccccgcttgaagagagcccagacatgggcccttgagcacattttcgctaaacttcgtgttgacagcgccgcacatggctttgtggccggtcgcagcattgttagtaatgcaaagccgcacgtaggggctgacgtcgtggtgaatttcgatctcaaggatttttttccaaccgtgacctttcctagggtgaagggagctatacgtcgcctcggctattccgagtctttggctacggccctcgccctcgtgtgtactgaacccgaccttgaagaagtggctttggacggcgttacatggttcgttgctagagggccccgtcatctgccacagggatctccctgtagccctgcgatcactaacctgctgtgccgacgactggaccggaggttaggaggactggcgcaggccctggggtttgtgtacaccaggtatgcagacgacctcaccttctcaggccgcggcgaagcagccgagtcaaaacgggtgggcaagcttctgagaggcgtcgccgatatcgtcgcccacgagggttttgtggttcacccagagaagaccagggttatgaggcgcgggagacggcaagaagtgactggcatcgtcgtgaacgataggccaagcgtccctcgagacgaacttaggaaattccgagctactctctttcagattgagaaagatgggccggctggcaaaagatggggtaacggtggcgatgtactcgccgccgtccatgggtatgcctgcttcgtggctatggtagatccggcccggggtcaaccattactggcgcgagcaagagctcttctagctaagcacggagggccctcaaagtctccaggtggctccgtccctagggtgccctctcctaacccccaaagcgtaaacgcccctgaggcaccaaaacctgctgcacctgccagtcccgcagctccagcaaagaaggggtggaagctgttctga

SEQ ID NO: 13496 - RNA, 1563 nt, synthetic construct
  source 1..1563: mol_type = other RNA
atggcatctcagccgagcactagggaggccctgtatcaaaggattcgggaaagttctaaagacgaagtgatcctggaggagatgatccgcctgggcttctggcctgcagctggagatgttcccaatgatccagcagatgaaattcgtcgccgcggtgagctgcagaggcaactggacgagctgcgggagaaagggagaagattatacaatgagaaggctctgattaacgaagcccggaaggcacggatggctgagagccgaaggaaacaagcggagacaaaagcccggagggagagagagcgaggggaaaaggccagtgcctgggctaagagaaagtccggcgagatactgtacttaggggagggcgagtctggtggcttatcacagaagacttcagatccctcaaaactggcacacttcggtctgcccaaattggataccgccgaacagctagctgctgccatgggtattgagataaaagcgctgaggttcctggcctacaataggcggacatccaaggtgtcccattaccgtaggttttttatccccaagaaaaccgggggccagcggcttatcagtgcgccaatgcgccggctgaagaccgctcagacatgggttttgacgaacatcttggacaaggtgactctgcatgaagccgcacacggctttaggcaggggagatccattgtcaccaatgccagaccccacgtggggtcagccgttgtgttgaacctcgatctcaaggatttttttcctaccgtgaccgtccgccgaatcaagggagtatttcgcgcgcttggctatagcgaagcagtggccacagcattggccctcgtgtgcagcgaacccgaagtagacgaggtcgctctcgacggagagacttattatgtggctcgagggcccagacacctaccacagggatcccctgcatcgcccggaataacaaatcttctgtgtaggcggctcgaccgtcgaattgaaggattggctcagagccttgggttcgtttacacgcggtatgctgacgaccttacgttcagcgccagagccgatagggccggttctgtgaatgtagggaaactccttagagcagtgaaagacatcgtggaacatgaaggcttcaacgtgcatcctgataaaacccgtgtgatgcgcagaggacgcagacaagaggtcactggcgtcgttgtaaacgaccggatgggcgcgcctagagctatgctacgcaagttccgggccactctctaccagatcgagaaggatggcccgatgggcaagaagtggggaaacggcggcgatctcctggcagctatccacggctacgcctgcttcgtcgcccaggttgatgccgacaaggggaaagccctcatggcccaggtcgacaggattttcaacaagtatgggaaacctcgtcgcccaggcggtggtggaggcaaaggaccaggtgggggagggggaaaaacccccgacgctgcacgaccagctacaggagccaccacacaaaagccagctgagcctgcgccagaagccccgaaaaagaagcctgcatggaagctgttttga

SEQ ID NO: 13497 - RNA, 1587 nt, synthetic construct
  source 1..1587: mol_type = other RNA
atggccgctggccagccttcgacgagagaagccctttacgagaggattagggcttcctcaaaagacgaatacatcctggaagagatgataaggcttggcttctggcctgcaagcggtgcagcacccaacgatccagccgacgaaatccgtagacggggcgagctgcagagacagctcgacgagctccgcgaaaagggtcggcgcctgtataacgagaaggcactcatagctgaggctcgcaaactgcgcatggccgagagcaagaggaagcagaaagagacaaaggagcgacgggaaggccagagaattgcgagggcccagctgtgggcacaacggaaggccaaggagctcctgtacctgggggaaggcgtatccggcgggctaagcgaccgggttagtgatgccgggaagctgaagacacatggccaaccccatatcgattctgtggagcagctggcacaggctatgggcgtcgaacttaaggcactgcgtttcttggcgtatagtagacggacctcacgagtcaatcattataggcggtttctgttgccgaagaaaacggggggccataggctcattagtgcgcctatgccacggttgaaaaaagctcagcggtgggtgttagaaagagtgctggacaaggtggctctgcacgatgccgctcatggttttcggaccggcagatctatagttagcaacgccagaccacacgtgggagccgacgtgctagtgaatctggatttaaaagacttcttccctactgtatccctgccgcgcgttaagggggtcttcaagtctctggggtactctgaagccgtcgctactgcattggctctcgtgtgcacagaacctgagatcgatgaggtcgtgctggacggaattacttattttgttgcccgcggtcaaaggcacctacctcagggcagtccagcaagccccgggattactaatcttctctgtagacgtctggaccgacgcttggccggactagcagccagcttgggcttcgtctacacccggtacgctgatgacctgtcgttttccgctcgccgacctgccgttggctcaatcaaggtggggaagctccttcgtgcggtggccgatatcattcggcacgagggcttcaccgtccacccagacaagactcgagtaatgcgcaagggctctaagcaggaggtgacaggggtggtggtgaacgataggcttagcgtcgacagagctacaatccgcaaatttagggcaaccttgtaccaggtagagaaagatggacccgccggaaaaaggtggggtgccccaggaggagatctgcttgcatccctccacgggtatgcatgcttcgtggcgcaggttgaccctcagagagccgctcccctcttagcccaagtgcgcagaatctttgaaaaacacggcaggccgttacgaggaggaccaggtcccggaaaacctccaggggggggtggaggaaaaccacccgaagctcaggtcgccggcaaaccgggtcctcaagcggaagctccccgtaccgagtccaaacccgaggccgagtcaaccgcccccaagaagaaacccttctggaagctgttttga

SEQ ID NO: 13498 - RNA, 1560 nt, synthetic construct
  source 1..1560: mol_type = other RNA
atgagtgccaagccaaatcggcgccaggaactctatgatcggatacgcaacagttcaaaggacgaggtcatccttgaggagatgatcagactgggattttggccccgtgccggcgagattccagctgatccaggcgacgaaatcaggcgaaggggcgaactccagcggcaactcgatgagctgcgacgcaaggcgagtcggctgtacaacgaggcatctctgataagagaagctcggaaacagcgcttagccgacgcccggaggaaaaagcaagaaacccgagaaagaagagagcgggaacgtcaagagcgagccgccgcatgggcagcaaggaaacagcatgaggtcgtgtatttgggggaaggcgtgtcatccgggctagctgaacacacgtccgatgtggggcgtttgcaggctgctggactgcctctcttcgcagaccctggagctcttgcccaagccatgggcgtacccctgggcgaactgcgttttctagccttccaccgacgagtcgccaccttaacccactaccggcgatttcagattgccaagaaatctggtggcacaaggctcatttctgctcccatgccgagactcaaaagagcgcaggcctgggtgctccggaatgtcctcgacaaggtcgcactgcacgaggctgcgcatggctttagggggggcaggagcattgtaagcaacgcagctccgcatgtgggagcggatgtggtgataaatctcgacgtcgaaaacttctttcccaccatcacactgccccgggtaaagggggttttcagggcgttgggctacagcgaggccatcgctacgattcttgccttactgtgcaccgagcccgagacaactgaggttgagttagacgggcgcacctactatgtgggtcttggggatagagttctgccacagggtagccccgctagcccagctgtgactaacgccctgtgtcgccgcctggacagaagacttgatggtctggccgagcagctgggtttcgaatacacacgttatgccgatgacctcaccttctcacggagaggcgacatcaggtcgacagaggtaggggagctactggggaaggcagctgatattgttagacacgagggatttcgggtccatcctgacaagacgagggttatgagacgcggccggcagatggaggtgactggagtggtggtgaatgacaagctgagcgttgacaggaagaccctgagacgctttagggccgcactgttccaggtggagaaagacgggcccgctggaaaacggtggggagatggccccagattgcttgcgtctatgcacggctatgcctccttcgtgacaatggtcgatcgcgcaaggggggaacctttgttgaggcgagtgcaggcccttatcgagcgctacggagtcggagcctcaaatgcgtccgcagcccctggtgaaggtaaagccgccgcaccaactgccactggagaggcaccctccgctgcacagacagatgctccggaaccagaacctactcctccagctcctcaacctaagaaaaagaaatggcgcctgtggtga

SEQ ID NO: 13499 - RNA, 1527 nt, synthetic construct
  source 1..1527: mol_type = other RNA
atgtctcagaggcctacaacaaggcaagagttgtacgagaggatcagggccagttcaaaagatgaggtgatcttggaggaaatgattagactgggcttctggccggcccagggagaaatgccaacagacccggcggaagacatacggcgacgaggcgaaatcgagcgccagctggaggagctgagacgcaaggcctccagattgtataatgagaaatccctgatacaggacgcgagaaagcgacggatggccgaaagcaagcggaagaaagaagagacacggctgaggagggagcaagcgcgtagggaaagggcagcagcctggagggaacgtaagcagaatgagttggtgtaccttggcgagggcgtgagtggaggactgggacagcatgaaggacatccagagcgtctggctgccgcaggactacctgctattgctgacgccagggagcttgcccgcttaatgggggtgagcgtgggcgatctgcggttcttagctttccaccgggcggtggcaacgatcactcattatcgccgctttcagatcccaaagaagtctgggggaaccaggctaatctcagcgcccatgcccagactcaaagcagctcagggctgggtcctgcgatctatactggatcgggtggacctccacgctgctgcccatggttttaggcctgggcggtccattgttagcaacgcccaaccgcatgtcggggcagcagtggttgtcaacctggacctgcagggtttcttccccactattacactgccccgcgtaaagggggttttcgcagccctcgggtactcagaatcagttgctaccattctcgccctcctctgtaccgaacccgaaacctttgaggtagagttggacggaagaacctaccacgtgggcctcggccctagagtgcttccacaaggcagtcccgcttcccccgccatcactaacgttctctgccgcagactggacagacgcctccaggggttggccgatcagcttgggtttacttacacccggtatgcagatgatctgacatttagccggaagaaaggcgcgagtagcgccgaagttggggagatgattaggaaagccgtagacatcgtaggccacgaggggttcacggtgcaccctgacaaaacccgcgtgatgaggcgggggaaccaccaagaggtcactggcgtcgtggtgaatgataaagctagcgtcgatcgtcggacgctgcggcgatttcgcgccacactattccaggtcgagaaagacggcttagcaggcaagagatggggagctggtggtgatttgctggcttcgatgcacggctatgcctcctttgtggccatggtcgatcgagagagaggggccccccttctggccagagtgaagagacttatggctctgcacggtcgaggcccatctggaggtggaggtggcggaggttctgcaggacctcgtcccgcagccactacccctgaaccagcccaggctccagctcctgcaccagaaaagaagaaacgctggaagttatggtga

SEQ ID NO: 13500 - RNA, 1572 nt, synthetic construct
  source 1..1572: mol_type = other RNA
atgagccgtcagccctctacaagagaagagctctacgagcggatccgcaattccagcaaggacgaggtgattctagaagaaatggttcggttgggattttggccagccgcctctgggcaaccaggagatccgggagatgagatcagacgccgaggcgagttgcagagaaagttgaacgatttgcgtacgaaagtcagtcgactttacaatgaacagcagttgatcagcgatcagcgaaaacagaggctcgcggaaagtcggaggaaaagacaggagactaaggaacggagggaacgggagagacaacagaaggcagagctgtggaggcagcgcaaggagagggaggtgctctatctgggtgacggggtcagtggaggcctgctggaacgcaaaactgatcaggctagactcgtgggaggagggctgcctgttttagcggggcccgaagcggttgctgcctctatggggatcacagtgggcgctctccggttccttgcctactccagacgagtgtcaaggatctcgcattaccgcaggttctctatcccaaagaaaacaggtggacgacgtttaatttcagcccccatgcctcgtctgaaagccgcccagagatggattctggagaatatcctagaaagagtacccgtgcacgaggccgctcacggctttttagagcgccgctccattgtcactaatgcggttccacatgtgggcgccgatgtggtaataaacttggatcttaaggacttcttccccaccgtcacgtacgaaagagtcaaaggcttgtttgtatctctcggctattcggagtccgtggcaaccgttctggctctgctcagcactgagcctgaggtcgccgagctggagctggatggcaactcctactatgccgcacagggtccccggcaccttcctcaaggctcaccagcctctcctgcgattaccaaccttctgtgccggagactcgacaggcgactacaagggctggcacgaaaacacggctatcagtacaccagatatgctgacgacctgacctttagcgcacgggggatggtgagcacacggagcagtgaggtgggccgcttactgaggggtgtggccgacatagtaacgcatgagggtttcgaagttcacccggaaaagactagggtcatgagacgtgggcgtaggctcgaagtgacaggtatagtcatcaacgacaaactttccgtggaccgaaaaaccctccgccgctttagggccactctgtttcaggtcgaacgggacggcccagaggggaaaaggtggggagaatccaaggatctgatggccgctcttctgggctatgcctcattcgtggcaatggtggaccctcagagaggacggcccctgatttcccgcgttcgggcagtacatcgcgcacacgggtaccaaccggctgcaccaaagcggagggctgctcctcctacagccgcttcaactgcaccttctagtcccgccagagacaccaccgctagcgtgccaaccccagacagggatcccgatcccacacctcccccaggaaagaaaaagaagaagtggaagctgtggtga

SEQ ID NO: 13501 - RNA, 981 nt, synthetic construct
  source 1..981: mol_type = other RNA
aagaaaacaggcggaatccgtaagatcagcgccccaatgccacgcctaaaaaggctgcaggagtggattctctcaaacatcttggaaaaggtgccgctccaggatgctgctcatggcttcaggcgggggaggtccatagtgaccaatgccgccccccatgtcggacaggacgtcgttctcaacatggacctggaaaacttcttccccacaattgattttccacggatccggggcgtgttccggaaactggggtactcgggacaaatcagcaccgttttcgccctgatttgcagtgagccagagattgaggaagtgcagcttgacgggcaggcatatttcgtggccaccacagacaggagacttccgcagggtgctcccacttctcctgccataaccaatatcatttgtcgagggctcgacgcacgcttaacaggcgtggctcagcggttcggatttacttataccagatacgccgatgacattacgttcagtgggagtggcggtgcgctgcaacagatcggtaagattctccgccagtgcaaatatatcatcgaacaggaggactttaaggtacaccctcagaagtcccgagtgtttagaaagtcatccagacaggaggtaacgggcctgagcgtcaacgaaaggctaggcatcaatcgccaacttctgagacgtttccgcgcattgttatttcagatagatagagatggaccttccggtaagcattggggacactcaactgacgtgatgacctctatagaaggcttcgcgaattttatcgctatggtgaatccagaccaggggcagatttttcagcaacgggtccgccaactgcacgagaagcacggccgagggcaaagaatgtacaaccagaggaataggtggaacgatcaggaggttgtcactcacttgcctgattctagcgaaaaacctgagctgcccgcagagatgaaaaagaaaccctggtggaaattttggtga

SEQ ID NO: 13502 - RNA, 1557 nt, synthetic construct
  source 1..1557: mol_type = other RNA
atgcctactcgccaggagctgtacgacaggattcgagagtcctcgaggcaggaggtcatcctggaggaaatgatccagctgggcttctggccatctggttcacaggttccctacgaccctaaggaagacctgcgccgggaacgtgagctccaacaggagctccagcagctggcaaccaaggacaggaatcttcaaaacattgactatgtccgcgcccaggctaggaaacagagacttgcagaatccagacagaaacagaaggaaacaaaggagcggcgactgcgggagaagcaagaacgggcaagtgcctggcaggcaaggaaagtttctgagattttgtatctgggagaaggagtctctaatagcctcaaccagagagagtccaaccacgagaaacttagctctgccggtttgccaagatttgatggagtggaggacctggcacagctgatgggggtcacagtcggagagctgagattcctcgcctacgaccgcgctgcatcgcaggtcacgcattaccgacgctttggcctcaaaaagaagaccgggggcattcgggagatttctgcgccaatgccgagactgaagcgcgctcaggagtggatcctgaagcaaatcctcgaaaaggtcgaagtgcacgactcagcgcatggattcaggccggggcgctccattctgaccaatgccaggccccacgtaggccaagacgtggttatcaacttggacctcgagaacttctttccaactgtgacattccctaggatccgaggtgtgtttaggtcactggggtacagtggacaactcgctacacttctcgctctcatatgctccgaacctgagaaatcagaggtgatcctggatgggcaacactatcacgtggccagatccgagagacggttacctcagggcgcaccaagtagccccgccttaactaatataatatgtaggggccttgatgccagattggctgccttggccagtcgactagagatgacctacacgcgctacgccgacgatatcactttcagcggctctggcgaagccacccagactatcggtaaagtgctaagacaggctcgttatatcattgcctctgaggatttccgtattcatccgagcaagacccgcatattaaggaagggctcacgccaggaggtaacgggcctgatagttaatgagcagttaggcgtaaaccgggaactattgaggcgttttcgggctcttctgtaccagattgaagtgagcggtcccgcagggaagcattggggagggaagcacgatgttatgacaagtatcacaggcttcgccaattttgtacagatggtggatcctgataaaggccggcccctgcaggaaaaagtggcgtccctgcaaaagaaacatgggatcggacagagacggtatgctagccgtactccttggaacccaagcaccgtggcgcctgatcaacctagcaagcccggaggggaagaagtggcttatccagactccggtccacgggatagattccgaaatgggacccccgaacccaaaaaaccctggtggaagttttggtga

SEQ ID NO: 13503 - RNA, 1575 nt, synthetic construct
  source 1..1575: mol_type = other RNA
atgaccaccagacaggagatttatgacaggatcagggaatctagtcgggacgaggtgatcttagaggagatgattcggttagggttttggagtcgcgacactgacaaaccggaggatcctgctgaagatatccgaaggcaaggggagttggagcgggagcaacggcggttaactcaagaggcggctcgcttgcgcaatatagaggccctccacgaggaagctaggaggaagagaatggaggaatttaggagaagacggcaggagacaaaggaaagacgagaacaggaaagggtccagcgcgccgcagcttggcaagagtccaagcagaaggagattgtctacttgggcgactcagtatcaacgaccctcaaccagcagacgactgatgaagaccgtttgcggtccaatgccctgcctaatcttcaatctatagttgaagtggccgaagcaatggagatttccgtcggggagctgaggtggctggcatttcacaggcgcaccgccgaaataactcattatcggaaattcgctgttccaaagaagacaggcggagtgcgagagatatccgcgcctaaaccccgactgaaacgcattcagcattggattctgcatcacatcctggaccaggtcgaggtacacgatgcggcccatgggtttcgtagagacaggtcaatcgtgactaacgcacagcagcacaccagcagcggagtggtggttaacgtggatatccaggacttttttccaaccgtcactttcagacgtattagaggcgtgttcaagagtctgggatattctgggcagatctccaccgtttttgccctcctttgctcagaacccgaacgtcgggaggttgcacttgatggccgcacgttccacgtagcccgaaccgagaggagacttccccagggtgctccaacatcgccagctctaacaaatgtgatttgtaggggcctcgacgcacgcctgcacactctgagccagaaaaacggtttcacctacacacggtacgctgacgatatgacattctccgcctcgggggaagcaacacagaatgtaggccgcgtgctgcgacaggtgaagcatgccgtcagtcaggaatcatttcaactgcatcctgacaagaccaggatccagcgcgcctctcggagacaggaagtgacgggcctcactgtcaacagcggagtgagcgtgccccgggaaacactgcggaggttcagagccgtactcttccagatcgatagagatggtccaggaggcaaacggtggggggctagccagaacgtgatggtgtctatcgagggcttcgccaatttcgtcgccatggttgatcccgagcgcggagcgaagctgcagcaaaccgttgctgagctccaggaccgccacggcagaggtagaggtacagtcactgtgaggcagcgttggaccttccagcgaccagaacccgtcagctctccgcctggaccaagcgagacagccgtgtccaaccctctacaagccgcagcatccccccctggagcggatcaaagtgctcctaaaccccgaaagccgtggtggatgtggtggaaattttggtga

SEQ ID NO: 13504 - RNA, 1599 nt, synthetic construct
  source 1..1599: mol_type = other RNA
atgagaagcaggcaagaaattctggatcagatccgggaaactagtagggacgagtttatcctggacgagatgatacgccggggattctggccgaaggaaggcgagcttcccgaagatcccgcggacgaaattagacagagggaggagctgcggcggaaattacactcgcttactacggaggatcggaagctgtctgatgtggagaaactcaaacgcgaggccagacgacagcgactggccgaaagccgtctgaaaagacaggaaacaaaggaacggaggctgcgagagcgtgccgagaaagccgaggcttggagagagcagtatactagggatatcgtttatctcggctccgacgtaagcggtggcttgaaccagcagaagatcgaaatcgaggaactccagaagagaggtctgcccgagctacattccgtcgaggagctcgccgaggctatggaaaccacagtggccgaactcagattcttagctttcgaccgtagaacatccacgactactcactaccagcgatttgctatccccaagaagacaggaggcattaggaatataagtgccccgatgcctcggttgaagcgggctcaggagtggattctgtggaacattctcgacaaaattgaactgcatccagccgcacatggattccggaccggcagaagcatcgtgaccaacgcagaaccccacgtcaaggccgaagtggttatcaacgtggacctcgagaatttcttccccacagtgacctggcggagagttcgcgggcttttcaggaaatttggttacagtgaacaattggccacagtgttggcgctgatctgtagcgagcctgaggtaaccgaggtgcagttagaccagaaaacttattacgtacagcaatcagaacgcaggctcccccagggcgctccttcttcacctgcaataaccaatatcctttgccgcggccttgacgcccgtttaacagggctagccgagaagctgggattcacgtacacccgctacgccgacgatctgacattcagccatgcaggacagggttcagcggctgtgggtcggatgctgaggcaagtgagttatgttgtggagcaggagggatttcagctgcaccctgagaagactaggatcttccgcaaaggatctcgccaagaggtcactgggctggtcgtgaacgagcgtgtgaatataccacgcaagaagctacgccagtttcgggcaaccctgtatcagattgagaaagatggcccagaaggcaaacactggggcaatagcccaaatgttctggaagctattgaagggtacgcaaattttgtggctatggttgacccggagaaggggagagaatttcaacttcaggtcaggaccatcatcgagaaggaggggaggacacaacgaaatgatgtccaacgcgatagatggaaccctaacttggcatctgaggagatttccgaaattccagcgaccggggcagtgcctccttccgtatcctcattgctcacgacccaggaaatagaaccagtcgctcccgccgcaggagaggtctttgaatctaagagtaaaccatggtggatgttttgggcccgatggttcaactga

SEQ ID NO: 13505 - RNA, 1566 nt, synthetic construct
  source 1..1566: mol_type = other RNA
atggattcccagccaacatcaagacaggagctgtatgaccgaattcgggagagcagcaaagatgaagtgatattggaggaaatgatccggctggggttttggcgcgacgctgaagctgtagagggagatccagcagacgagattaggcggaagggtgaacttgagcggcaactgaaggccctgagtacagagagggccaggctccagaacgtcgaagcccttaagcgagcactcagaaaacaaaggctggaagatagcagatctaatcgcaaggaaactaaagagaggcgcttgcgtgagaggcaagagcgcgccagagcctggcagcagagaaagaccagggaaatcgtgtacctcggtgatggcgtttcagccggcctggcagagcatgagctccaacgggagaaacttcaggctgcaggactgccagttgtggctaccccggacgaactagcccatgccatgggagtgtccctgggagaactgcgcttcctggcgtttagtagacgcaccagcactactacacactataagaggttctttgtccccaagaaaacaggcgggcagcggctgatttctgcacccatgccaagacttaaaaggtcgcaggagtggattttgcagaacatcctcgagaaggtacccctgcacgatgcagcccatggcttcagacgcggccgttcaatcgtgtccaacgcccgccctcatgtggagtccgacgtcgtggtgaatctcgacctgaaggacttctttcccacagtgacgtatcggagaatcaagggcatgtttcggaatcttggctattcagaggcgattgccgtggttttagctctcatctgtagcgagccagacgtggatgaagtggagctggacggccggacctactacgtggctagacagcagcgtttactccctcaaggagcacctaccagccctgccatcacgaatattatatgccggggtctagatggtagattggctagaaccgcagagatgctggggttctgctacacaaggtatgcggacgatatcacgttttctggctctggagacgccgccgctaatgttggaagggccctgaggcggattgggtacgctgtagagaaagagggcttcgaggttcacccagataagactcgcgtcttacgccgagggcggaggcaagaagtcactgggctggtagtgaacgacagacttaatgttagtaggaaactgctacgccggttccgagcgaccctctttcagatccaccgagatggtcctgcagggaagcgatggggcaacagcaacgatgtcatagctagtatagaggggttcgccaacttcgtcgccatggtggaccctgaaaagggcgcagggtttcagcgaaaagtccgcgaaatcattaaatcccacggacgtggcggaggtcgtgcttacccccagagatcccgttgggtgcccaagacacctccagccgaggggttggcgatggaagaagaacccttgaccgctgaaactgtgcagggaagggtttctcgagtccagaagccccgggagaagaaaccgtggtggaaattctggtga

SEQ ID NO: 13506 - RNA, 1530 nt, synthetic construct
  source 1..1530: mol_type = other RNA
atggcatcccaaccaactacccgccaggagctttacgacagaatccgagaaagttctaagaacgaagtgatactggaggagatgattaggctcggcttctggccacgcggagacacaatacctgaagaccccgctgatgaaattagacggcgcggcgaactggagagacaacttcgatcactcgtgaccgagcgcgctaggctgggaaacgtggaggccctgaagaaggcgctccggaaacagcggctggaccaaagcaggcagaagcagaaggagactaaggaaaggcgccttcgtgaacgggccgagagagcagaggcttggaaaaagagaaaagcccacgagatcggttatctcggcgaaggggtaagcgccgggttagataaccaccaaggagatcatgaaaagctgaccgccgctgggttgccggtcttcgatacccccgagcagttagctcgagctatgggaattggcgtaggagaattgaggtttctggctttcaacaggcgcacgtctaccacatctcactatcgccggttcttgttgcctaaaaaaactgggggacatcgaaagatcagtgcccctatgccaaggctcaagagagcacaggaatgggtcctcgctactatcctggagaaggtggctctacatgatgccgcgcacggatttaggagaggccgcagcattgttacaaatgcccggccccacgttggtgccgatgtggttatgaatctggatctgaaagacttttttcccactgtagtctacagacgcatcaaaggggtctttcggaatttaggttactcagagtcagtggcaaccgtactggggctgctctgcagcgagcctgaagtggacgaggtgcgtctcgacgggagaacatactatacagcacgctcgaaacgttttctgccacagggcgcaccaacgtctcctgcactgaccaatataatctgcaggggattcgatgcccgcctttccagaaccgccgcggacctaggctttgcctatacccggtacgctgacgatgtcaccttctccggccccggtttgccggctgagaacattgggcgtgcccttcgccggattgaacatatcgcaggggcggaaggcttcgaggttcacccaggtaaaactcgtgtactgaggtcctgttctagacaggaggtgacaggcctagtggtgaatcagcgggttaatgtgagccgaaaaatgctgcgaaggtttagggccactctgttccagatcgagcgggatggcccggcaggcaaacattggggccacacggacgatgtgatcgctgccatagaaggtttcgctaactttgtcgccatggtggacgcagagaaagggaagggattcaagcggcaggtggaacgaatcattcaaaagcacggaaggggcggaggtagggtcagagttcagcggtccagatgggtcagttcacctcctccagtggccgccgtcgtggacacagttgagagccctcccgagcccgagaaaaagaagccctggtggaagttctggtga

SEQ ID NO: 13507 - RNA, 1530 nt, synthetic construct
  source 1..1530: mol_type = other RNA
atgacagatcccccaaggacgcgacaagagttgtatgacctgattagggagacaagtagagaagagttcatcctggaggaaatgatcagactgggcttctggagtgagtcgaccgcgcccgaaaaccctgcaaacgagatcagacgtcaggccgaactgcagcgggaacttcagtctctgctcaccgagaatcgccgattggtagatctggacaaagctaagaaggccctccggagagaacgaatggccgagagcagaagacgccagaaagagacaaaggagcgccgtgaagccgagagacaagctcgtgcggccgcttggcaagccgagcaagaacgctctctggcctacttgggtgagggggtgtcagctggcttaatgcgttacgaagtagacgatcggcgccttgctcgcaatggactcgccggaaaccctttggcaacgccactcgcgctggcacaagctatgcagatctccctgggtgagttaaggtttcttgccttcagccgccggacctcccagactactcattatcagcggtttcagatacctaagaagacgggcggcctcaggtccattagtgctcccatgccacgactgaaacgggcccaggaatggattttgcgtaatgtgctcgagaatgtcccgatgcaccccgcggcccatggttttaggacaggcaggtcgatcataactaacgcacagccccacgtcggcgcagcaattgtcgcaaacgtggacctgcaggatttcttcccctcagtgggctaccctaggattaaggggctcttcaggaccctggggctaagcgaggcgactagcaccgtcctcgccctactgtgtagcgaacctgagatcgacgaagtggtcctggatggacagacatattacaccgcccgctccgagaggcgactaccacaaggagctccaacaagcccagctatcaccaacttactgtgccgaggccttgacgcccggctgcaatccaacgcagagaagttgggttttgtgtatacccgctacgccgacgatatcaccttctcctctcagaatgcccaggctgacgttgggcgggctctgagaagaatccgccacgtcgtggccagcgagggatttaccgttcatcctgataaaactcggatacttcggcgggggtccagacaggaggtaactggacttacagtgaatgatagactgggtgtgagccgggaactgctcagacgcttcagagccgttgttcactcagtggaaaaaaccggccctgccgggaaacgatggggggaatctcctcacctgatgagttctctagccggatttgcaaactttatagcgatggtggacccggaaaaaggaaaaccatggcaggctagggtggccgctctcattgagcagcatgggcgcggcccggacttaaggtcacagaggaagcggtgggtcagtccagttcccgcagctgcagcagctccctcaacagaaactgccagcaagccctctgagtcttccaataggccttggtggaagatttggtga

SEQ ID NO: 13508 - RNA, 1518 nt, synthetic construct
  source 1..1518: mol_type = other RNA
atgtctaggcggccctctactagacaggagctgtacgatcgaatccggcagagtagtaaggatgaggtgattattgaagaaatgatccgctatggcttttggccaaaacaaagcaatctgcccaatgacccagccgaagagctccggcgaattggcgagctggaacgcaggatcagtgccctcgcaaccgaggcctccaggctgaacaacgtggacgccatgcggcgtgaagcgcggaaacgacgcatggctgaggcaagggcacgccgagaagagacaaagcggaggcatgaagcccagcgtagagctagggctgaagcgtgggccgctaaaaaacgggaggagatcgtgtacctgggagagggatttagcggcggtttgggccaacgagagggccagtctctccctgggctccctgatttacaaggggccggtgcccttgctagggcaatggaaatcgaagtgggacagctgcggtggttagctttccaccgccgcgtgagtgctaccacccactacgttcgttttcagataccgaagaagactggcggcgtgaggaacatttccgcccctatgccaaggttgaaacgggctcagagatggataaaggagcagattctggacaagatcgaactacacgaggctgcgcatggttttgtccccgggcggtccatagtgacaaatgcatccgcacacgtcggtcgtagggtggtcatcaatctggatctccaggacttcttccccaccctaagcttcagtcggatttatggcgtcttcaggtcttttggctatagccccgaagcttctacgttactcgctttgctgtgcaccgagcccgaggtagcagaggtcgaacttgacgggagaacctggtatgtgcacacaagcgaaagacgcctaccgcagggagcaccatccagtcccgcgttaacgaacatcgtggcacgccggcttgacaggagactcgctggcctggcggcccatctgagcttcacttacacccgctacgcagacgacctcactttctccagcgacgcggcagatgcctccatccatcgccttattcgcgccgtggaaggcatagtttccggagaaggattcgtggtgcaccctggcaagactagagtgatgcgtagagcctcgcgacaggaggtgaccgggcttgtcgtaaacgataggttgggggtacctagacggctggttagacgatggcgcgccacactgttccaagtcagaagagacgggcccggggggaaacgattcggattgggatcagatgtctttgcctcactgtcaggttttgcagcctttgttcacatggtggatgaagccaggggcgccagaatgctgtcggaggttgccgaggttgccgctgctcatggatgggctccgcctccaagaaggtctacagagacgcgggctacagaggccagctcagaggcctcttcagaggccccaggcgtaccagcatcacctagcgccggatggggtgggcctacttgggagtggcccctgtga

SEQ ID NO: 13509 - RNA, 1665 nt, synthetic construct
  source 1..1665: mol_type = other RNA
atgtccgaacgcccgcaggatcggcaggaactctacgatcgtataagagagagctcaaaggacgaagtcatcctcgaggagatgattcgatacgggttttggacccaggaaggcaggcccgatgatcctgccgaagagatccagcgcaagggcgagctagaacggaccgtggctgcactggccacagaggcttcaagactcagagatgtcgacgccatgaagcgggccgctcggaaacagcggatgcaggaggcgaaagcgcgcaggatcgaaacaaaagaaaggcgggaggcacaacggcaggccaaggctaaggcatgggccgagagaaagaccagagagttgctgtatctgggcgccggcgtatctaatgggctcggccaacaggcagagcagatccagcccggactaccatccgtgccctcagctccggacttagccagtgcaatgggtatatctctgggggagctgaggtggttggcattccacagaaaggtgagtacaacctctcactatgctcggtttcagattcccaagaaaaccggaggaacacggctcattagcgcgcctatgccgcgtctgaagaaggcccagcattggattcgggccgagattttggaaagggttgaagtccatgaggcggcccatggcttcgttcgcgggagatcgatcgtgtccaacgctgccgcccacgtaggacagagggtcgtgatcaatcttgaccttcgagatttctttcccagcgtgcactacccccgagtgttcggcctgtttcgctcactaggattcagcccggagacgtctacagtgctgagcctgctgtgcacagaggccgaggtggaggaagttcagctggatggaaggagatggttcgtccacgccagtgagcggcgccttccacaagggtcaccttgttccccagcactgaccaacctcgtgtgcaggaggttagaccgacgcctcactgggcttgcaactcaactcgggttcacctacacgcgatatgcagacgacctgactttttccagtactcgtgacaatgcccaggtaaacagattgatcagagccgtcgaacacattgttgatgacgagtctttcactgtacatccggacaaaacgcgcattatgagaaggggacgacggcaagaagttaccggcctggttgtgaatgataggctgggtgtcccacgtcgtctgttgaaacagtggagggctactgttcatcaaatccggcgagatgggcccgccggaaaaagattcggtcttggtccagacgtgatggcaggcctcacaggctttgctgctttcgtgaacatggtcgacgccgcgaaaggtcaggcaatgttgcagcagatggctgagcttgctgtgtccagaccagcccctccagcgccacaacctcgtccaacacccccagcagctgctcctttgcctccacccatgccagtggcagaacccgcccctacggatgagcccgtccgattaactgagtccagcgcccccgttttaaggcgcacacgcaccctggacgaacctgagccccctctgacccaccaggaaactgctaaaaccctgatagacgagagtcgctctgaagtgcctgaagtggtgaggcctcgcaggagatggtggcaattttggaagtggtttagcagacggggctga

SEQ ID NO: 13510 - RNA, 1641 nt, synthetic construct
  source 1..1641: mol_type = other RNA
atgactcagcccagaaccagacaggagctgtacgacatcatatcccagacatcgaaagctgagttcatcctggaggagatggtccggctggggttttggggagataggcccgtggatccagggggtgcccataagcgcaggggcgaaattctaaaacgactgagcgcccttcagtcagaggcagcccgtactcagaatcgggaggctgtgctaaaagctattagacgggagcgaatggcagagtctcgccggaagcgcgaggaaaataagcaggcaaggatcgaagccaaacgagccagagccgaagcttggagacagcgcaaagccaaagaaatcctgtatcttggcgagggagtcagctttgacctgagtaagaccgctaacaatatggacgcctggcttggagctgagcctgagcctgaggattaccgcgagcgcctggaaggcctcagtgcatccgccctcccgcaacttaagtccccccctgacttggcgagagccttggggatttccctcggggagttacgcttcctcgcttttcaacgggtggtgtcttcccagtctcactacaggcagtttcgcatcgctaaaaagactggcgggctccggacaatctcagcacctatgccgagactgaagagagtacagcggtggatcctcgacgagatcatcaacaagatagatgatatcgggttacacgacgctgcacacggtttccgagctggcaggggtattctgtcaaacgcggctccccatgtgggtcaagccgtagttataaacatggatcttgccgacttctttcctactataacctttagtcggacgagaggccttttcgccagcatgggctacagcccttctgtcgccgtcattctcgcattactgacgaccgaggccgatatcgaagcggtggaactggatggaaggacttggtatgtgcgtggcggcgaacggagactgccacaaggggctccctcgtctcccggaatcacaaatctgatttgtaggcgcctcgatgcgcgtctgagcggctatgcagcccagcacgggtggacctacaccagatatgccgacgatttgacgttcagcggagaggggcaagacttgaaccagttgttatgggtggcacggcggattatagaggatgagggtctgcgtattaatgaagacaaaacacggattctgcgcaggggaaggaggcaggaggtcacaggcttgatcgtaaacgatcagttaggtgtgcctcgacgagccctgagacggtttagggcactgttgcatcaagttcgtctcgacggcccaaaagggaagcgatggggacagggcgaggacctgttcgccagtatgatgggatttgcggacttcgtgtacatggttgacccggctaagggagcacccctacgcgctgaggttagggctcttcaggcgagatatccgtggagggccgctctcgatgaagcacccctctctctgtcaaagccaagcgcaccactgatcgccgcaacccctgaggacgcacctacaccagaagatgctccaactccccccgaagccgcccaggaaattgaagaggtggaagaagcctcccccacccaggaagcccaacctgacccaaatagaccatggtggcgcctgttctga

SEQ ID NO: 13511 - RNA, 1527 nt, synthetic construct
  source 1..1527: mol_type = other RNA
atgaccaggcccagccgcgaagagctctaccggaggatcagggagtctagcaaagactccgtgattcttgatgagatgttgagattaggcttctgggacagcgaagagggtgcgaatgacgtgccagaggagctgatcaggcgagaggctgagctgcgccaggaattgcgcaagctcaccgctcaacagaggagatacgagaaccgagacgctgcacttaaagccatgcggaaagagagactgcgggagtctagagagaaaagagcagctaataaacagcggaggaaggaggaacgcctggcgagagcaatggcctgggacgagactcagaaaactcatattgtttatctgggggaggacgtgagcactcacctggaaaagcttgattacgatgccgagaagttagccaagcacgcccttccagactttcctgatcacgttgctctggcagacgccctcggcgtgtctatggccgagttgcgcttcttagcttatcatagggaggtgtcaaccgtaacacactatcggcgatttcagatgccaaagaaacgagggggtttccgcaatatctctgcacctatgccccggctcaaaagagcccaaacttggatactcgagaacattctggatcatgtgcctctgagggatgaagcccacggatttcggccttcgcgaagtattgtatcaaatgctcgtccccacgtgggacaggacgttgtgatcaacatggatgtcaaggactttttccctaccgtcacactgtggcgcgtgttcggtgtctttgaaagtttgggctatagcccatccgtggccacgattctggccctcctatgtactgaactcccagttgaagaattggaactcgacggcaagacatggtacgtggccacgggggaaaggtgcctacctcagggcggaccgacatcacccgcaatcaccaacatcctttgccggcgtatggatgcaagactcgcaggaatagccgataagcatgggtttgtatacacacgatacgccgacgatcttacattcagtgcctccggggaagcagctgaagccgtcaccaagctgctgtggcatgttaaaaccgtcgtgcaggaggagggattcgagctgcaccccgacaagcaacggatcatgcgcagcggaagacgtcaggaggtcactggcttggtggtgaacgacaggctatctgtgcccagagacgatgtccgggctttccgggctttactgcacagggtcaagaccgccgggctggagagagctcattggaagggtgagagtgataatctgctggatcgtatacacggcttcgcgtcattcgtccacatggtggacgccgaacgctatgccgaactgcgcgccgaagccaaagaggtactcgatgcacatgggtacgcgccgcagcctgttccacccaaacccaaatccgaaaggcaagatgcatccgcggaaggcgacggtgctgctaagccaaaaaagggcctgtgggcgaagattaagggcttttttgcaggagctgactga

SEQ ID NO: 13512 - RNA, 1257 nt, synthetic construct
  source 1..1257: mol_type = other RNA
atgggggaaagggagaaacctggagctagacagggtgctgggaccccttccttggaagaccgggagcaggagtgcagggcgatagaacaagccgcgctggccgcacttgacagggatctagccgaaaaacgtctggacgagggactcaagcgagaacactggtatgagcacctcattgctgctcggcctcgtcggggaaagaggaggtttccctggaaacgaaaccggaagccaaggcccgttttttccgccgaagagcaccgcgttaagttcgattgcccaccactccctagactcgaggacgtggctcatctgctcgacatccccctggccgagttacagttcctggcctttggtgatcgaagactggaaatcagccattaccggcgctttgccatcagcaaaaagagtgggggccaaaggcagatcgctgccccgatgccacgcttgaagcgagtccagcgaatgttgtacgagcagctctttcagcagattcccttacaccctgtttgtatgggattccgccctgggcggtctattgtggataatgcaaggccacacgtgggtgccgacgtcgtggtaaacttggatcttcagaatttcttcccgggcattccttatgctcgcgtcaggggattcctgagagcaatggggtacaacgccgctgttgcaacatgcctggctagactggtcacagagcccagcgtttcgcgtctgcagtggcgtgggcggtcttttacggtggagactggtccgagacgcctaccccaaggtgcaccaacctcccctgccgtggctaatgcgattgcgtatcgtctcgactgtcggcttatgggcctggccaaagccatgggttggcggtactcaagatatgccgatgacttatctttctcagcagtaggcgaacccgccttcgtggtcggcgaccttctagcaagagtgagaagcatcatcggcgaggagggctttactgtgcatcccgataaaaccagaatacagcgcaagggacggcgccaagaagtcactggcctcgtggtgaaccgcgtagtctccgtgccaagggacgagctgcggaggtttcgcgcccttctgcaccagatcgaaaggagtggattcgaaggcaagcaatggggcagagggggggatctgcatgcagcaatcgagggatatttgaattacctggctatggtggatgaaataagagcggagccctacaagaagcagtggcgacggattaaaggcgcagccacagactga

SEQ ID NO: 13513 - RNA, 1179 nt, synthetic construct
  source 1..1179: mol_type = other RNA
atggccgactcatcctataccaagcgccaagccctgtatgagaggatacgtcagagctctaaagatgaggtcattcttgaagagatgatacgcctcggcttttggaaggagaaaacccttcccggacagccgacgactgacctggaaagactccgggacctgcgagctgaactgagtactgttagccagaaactggcccgaactgctaacctagccgcacttcgccaggaggtccacgcaaggagattgcgtgaaagcagagagcgccagcagcaaaacaaggagcgccgtgagcgagagcggagggagaagacagaacgatggagagaacggtcaagacgcgagctactgtaccttggcgccggcgtgagtggcggattagggtcacccacaggcgacgaggcaaggttgagggaacgggggttgcccatctttacggatgccgctgatatggctagacagatgggcttgacactgggggaattgcgctttttagcattccaccggcaggtgtccaccgttcaccattacgtccggttcgccctccctaagaaggcaggaggtgagaggatgatcagcgcccctcgcccccgactgaaaaaagcgcaacactgggtgctcactgaactccttgacagagttccggtgcatgatgccgctcacgggttcagggctggtcgaagtatcgtctccaacgcggagcctcatctcaggtctgccgtggtaattaatctggatctgcaggacttttttccatcaatccactaccggaggatcagaggcctattcagatccctgggctatggcgaagctttcgctaccgtgctggctctcctgtgttctgaagccgacgtggacgcactggacctggacggtactacctattacgtggccaggggacccagacggttgccacaaggagccccaactagcccagccctcacaaatattctgtgctctcggctggatcggcgtcttacagccgtggcccatagatcggggtttaggtacacccgctacgccgacgatctcaccttctctgccccctccttaacaaccaatgcagtcgcggcggctcctgtggttggtgcagctgtggcaagcgctcctgctgctggagcagcagtagcgagtgcccctgtaacagccgccgcagatgcaacgccagatgtcgggtga

SEQ ID NO: 13514 - RNA, 1017 nt, synthetic construct
  source 1..1017: mol_type = other RNA
atggcttcaaactcggatcagaataggcgcgaaaatattcggagggagatcgcccagacaagcaaagacgaattcattcttaaggagatgaagcggttggggttttggcccaacgaggaaggtaagccccgtgttgaggaaaacttgataaagcgacagggagagctcagtagagagatcgccgacctgtctaagaaggcacggatatatcaggatcgtgaggcactgctgaataaacacaggaaagagcgcatgcacaaaagccgagaaaaacaaaaggccaacaaagaaaagagggaagccgagcgcctgactaaaaaggaagcttggaaggagaaacaagccaaggatattatctatctgggggataagtacagtgccggccttaagaataagaccaacgatctggcattactcaaaaagcatcagttgccacagatccagaatgtcctagagcttgctaagtgtctcaaaacaaacgtttccgagctgagatacctcagctattaccgccccgtcactaaggtgtcccattatatcagatacgcgttgcctaaaaaaaacggtggcaatcgccaaatctccgcaccgatgcccagactgaaaaccgtacagagagccatcctggacgagctactggttaaggtgccaatttcacagtacgccaatggcttcgccccgggacggagcattgtgactaacgcttcccctcacgtgaacgccgatctgattgtgaatatggacctcaaggacttttttcccaccattagttacaaacgagtgtggggaatgtttaagaagctggggttctctgaccaaaacgcaacggtacttgctttaatttgcaccgaaccagtcgaggagaaggtggaagtggacggagaaatctattacatctcagagggcgaaagggtcttaccacagggggcgcctacatctcctgcaataaccaatatcatatgcagaaggatggaccagcggatggctggcatcgctaaaaaactcgatttcacatga

SEQ ID NO: 13515 - RNA, 1773 nt, synthetic construct
  source 1..1773: mol_type = other RNA
atgagaagtaataggcgacaggaactgtatgaccggatccgggagtcctctatggatgaggtgacacttcaggagatgattagacatggattctgggctgaagacgatgccatgccctcgctccctgccgagatgattaagagacggggagaactgcggcgagagatttcagagctcgcccaggacgccagactgtaccggtcccaagagcaggctctgcgggccatcatgaagcagaagatgcgggaagccaaagaccgccgcattgaaacaaaaaaaagacagatccaggctcggaatgaccgtgccgcagcctggcacaggaaaaagacagaaggcatagtgcacctgggggacactgtttctggagctctgcagaaccgcgattccaacgcagaaaggttaatcagccagggcttgcccgacttcccagatctgggagatattgccgacgctatgggcatcaccctcggagagctgcgctttctggcatacgaccgggccgtcagtaaggttagccactatcatcgctttcagatccctaaaaaatccgggggaaccaggatattgtcagcccccatgccgcgactaaaacgcgcccagtattggctgctggataacatagtgaatcagatagaacctcatgacgcagcccacgggtttagagcagggcgctctattcttaccaatgcaaagccccacatgagacaggctgtggtcgtcaactacgacctgaaggactttttccccagcatcggctatcgtagggttaaggggttattcgccgccctcgggtatgctgaggctcaagcggctatatttgcgctgctcgcaaccgaagcagatagaactgaggtcgttctagacggtcaaacttggcacgtagcgggaggagagcgcgtattaccacagggcgcgcccactagcccagctattacaaatttgctgtgccgacagttggaccgtcgactgactgggaccgccaggaagctgggagctacctatactaggtacgccgatgatttgactttctccttcgcgacggacgatactaccgccctccgtagcttggactgggccgtaggcgagatcgtgctggatgaaggcttcaatctcaacgatgctaagacccgtactatgcgcaggcacacacggcaggaagtgacagggatcacagtgaatgatgggcttaccatcagtaggaaggagagaagacggttcagggcatacctgcataacgtcgagcagggccgcgacatggggtcatttggctccggtcacccaaagaactccgcattaggctacgcgcaattcctgacgatggttcatggggacggcgtgagcgatcttgtcgcccatgcccgcaccctgtttggtgaccagacgagtgtcccaccagaagatccgaatcacttcaggcaaatgagcgctcggggcgaagctccaaaggcggattggtggcagccagcagagcctgcccaacctgtgcctgaggctcttcctcagcctcccggtacggccgagggtagatctaccaacattccaacagtgggcaaacgccgagcaagagattggggtgcagcccgagctcagccctcgcaatctggacccgctagaccgaggcagggtaaaaaaggcctcgtgggctggtctggctttcaaaagacagcaattaccgtgctcgcccttatcgccctaatcccttttcctttctcacccgtgctcatgggagcaacaatttacttcatctggtttcataggtaccggaaatga

SEQ ID NO: 13516 - RNA, 1929 nt, synthetic construct
  source 1..1929: mol_type = other RNA
atgagctcggtgtccaaccttcgttcccggatttcagatagtagtttagatcaggtcgttttagaggaaatgatcaggcatggtttttgggggcgtgatgcagaggtaggcgagatgcccgcagagtttttcgagcgacgggcggctctgcaggctgagatagcagacatcctggccagggacaggagattgagcgaccctgacaaggcccttcaggctgtaatgaaggagagaatgaggcgcgcccgtctgaaacgggtagaaaccaaaaggaaagccatagaggcacgcaatgccagagcggctgcgtttgatgcgcggaaacgcgcagaagtcatcagtctgggcgatgtttccagcgcgccattgcagtcccgggaggctaacaatgatcggttgaccgctcaggggctgccagtgattgagggagccatagccctgtctgaggcaatgggaatcggcctgcctgagctgaagtttctggcccatgacagaaaggtcgcccgcgtcacacattaccagagtttcgagatccctaaaaagaccggtggggtcagggtgataagcgccccaaagccacgcatgaaacgcgctcagtactgggttctcgacaacatcctggcctgcatcgaaccccacgatgcagcccacggcttccgcacaggaagaagcattctcaccaatgcagcccctcatgtgggccaagaactagtcatcaacatggacctgcaagacttcttccccacaattacttacgggagagtgaaaggattgtttgccgcaatgggctacgctgaagcagatgccgctgtgcttgccctcattgcaaccgaggcccccagagatacgatcaacgtggatggcactgtgtggcacgttgctacgggacccagagccactcctcagggtgctcctacatcccctgcaattgctaatctcgttgcaaggaaacttgacagacgcctgctcggactagcccggagatttggctttagctatacgaggtatgctgacgacatgaccttctcagggccattcccgggtgaccaggggctgaaaatctttcacgctgccgtgcgagctataactaccgaggaagggttcacattgcacagggataaaacaagattcatgcgtaggggcggccgacaggaagtcactggcctcacagtgaacgacaaggtgagcgtgccgagagcggaacgccgaaagttccgggcatggctccaccaggcagaacagtctggaacgccccagaggccatttaggactggcaatccggtgaccaccggccagggttatgcgtccttcctgtacatggtgggcggaaccgaagggctagctctcgccgaaagagcttggctgctgttaggacggcagacaggggcctcgtcagaaaacattgagcaagcccaggcgttcaggacagctagcgcagagggccgattgcccacacccgactggtggcaaccagccgaaccgccaccatttgaacccatccccctgcccgcctatgatcggaaggatcaggagactcgagacgtacaaacttctattcctaaggccggagagcggcaacttcggagagcccagattgagcgcccaggtgctgacgcacgatctagggctgccctgtcacgttctaatcgcgcctggggtggacaggcttctggcacttccccttctgggcaatcctcatgggccaagtggatcatgagtttctttgccttttttctgcaagtgctcccctacattggggtccctcttgctgtcttcgcattctatcatatctggaagcctcaggccggatacttaggggctaccaccgtttggcacaagttgctcgtggcagccaagttcttgttcgttcttctcggcattgattttgcgctggtgatgatcctggccgtatttagcggtatcgggtga

SEQ ID NO: 13517 - RNA, 1512 nt, synthetic construct
  source 1..1512: mol_type = other RNA
atgtccgctaagaagtggaccagcatccccgacgactttgacattgtccgcgcttcacgcgaagaggtacgtaaattgcgctggagcccggtgtggcaggacttcctattgcgcgaggtggtgcggatgggtttttacgaaccggaggatgacacagaacagagctattacattaataggtcaaaggagctgagggcagagctccagaaactgaatattgagattgaagaactcaaggaagaagagtccagcttagtcgatcagcggaaggctatcgctaaagcaacacaacgccagaaggaagctcatagggttcgactggacgagtcgagagcccagcgccaggttagaaagcaacaacgaattgagcagagaaaagcaaagaaggagctctggagcataagaaagcaacaggagctgttgtatattggggccggcgtgtccaggatactcaaagaacgaaattcggacacagccaagctgaagtccctagggtgccctgtggtgctcacagatctggagttactgagcctgctccagcaacctgcgtctgaagacgattccatcgagctgtctatggcacacttgaggaggtttgccttcagaagacggatttcacagcacaccaactatacacaattcactatccctaagaagaccggaggagagcgcttaattactgctcccaccatggccctgaaaaccgtccagcggaggattgtcaaacacattctgagtacaatccctacgcacagcgcagcgcacggattcgtggaagggcggtccattcgaagtaacgcggagccacatacgcagagcgccatcgttgtaaacatggatctgaaagatttctttcccaccatcaccggccatcgagtccggggtcttttccagtcttttggctactcaccagctatctccgccatccttgccttcatatgtacgcgtcccgatgtgtccgtgtttgaattggatggccagaattggtacttttatgagggtaaagacgtgctcccccaaggcagcccagcatctccaatgataagtaacctgatctgccggaaactggacaggaggttggagggcctcgctcagagtacagggtttacttataccaggtacgccgatgatcttactttcagttcatctgaccccgatgctagcgtcggggcattacttcacgccactcgggccatcgtcgcggacgaacagtttgaggtgcacccttccaagactagaatcatgcgcaatgggtcttgtaaagaagttaccggagttgtggtgaacgagtacccaaacatctctagagccagactccggcgtttccgtgccctgcttcatcagctgaaaaccaaaggccttgagaatgcccattgggaggaaaccacaggccctgccctgctcaataaggctctgggattcgcagcccacattaagtcagtaagtcagccaaaaggagcagagatattcgaagagactctggaaatcatcaacgacctaaagggccagtga

SEQ ID NO: 13518 - RNA, 1389 nt, synthetic construct
  source 1..1389: mol_type = other RNA
atggcagatactaaccaaacgaccaactggaggcaggaactgaagcaagtgggcaagcagtactttgagatccaggaaatgattaggatggggtttcttaaaatgcctcccgaagagctagaactgctgaagcagaagtatacagaactgaataaagttaacgcccagctgcggaaactgtcaaaggagctagaaggcttccaggacattacgcccttaattaaggagattcgaaaaaaccgcattgaacgtgttcgtgcggcccgggcaattaaaaaggccgagaaggctcagaaggagaaggcccgcaaggctgaaattgcacagcggaaaaaggatactccttattatctgggcgaaggggtgtcagctggcctcaagtttgagggaactgaggaggccaagctgcaagaggcaggacttccaattgtgcataacgtgaaggacctcgctgagcagatgaacatgcctcagagtgatatcctgtggctgagttaccatcgcaaggctgcatctatcgaccactacagccgctttcaaattcccaaaaggaagggtgggttcaggaccatcgcttcaccaaaacccaagatgcgcgttgcacagcaatggatccttgacaatgtcctgagcaaagtgccaacacatgaagccgcaatggcctttcaggcgggcaagtctattgcagacaacgccaacctccacctaaatgctgagatcctgatacgcatagatcttaaggatttcttcccgtccatcaaattcggcagggtaaaggggctctttaagtccttcggctacaatgagggaatcgccactgtgttaggcctcatttgtacagacgccttgagactcagcgcgaaattggagaataaacagtacttcgtcgcactgggagatcggtacctccctcagggggcctgcaccagtccaaccataactaatctgatctgccgaaaaatggacaatagattgtctaagctttctgataccctgtcctggaaatataccagatatgctgacgatatggtcttttcgaccccgcagaaagaggctgagttgaagcacgtgcttggcctgtccaaaaagatcataggcgaggaaaacttcgaaatccaccctgacaagacaatggtgatgcggggtcaccaaagacaaacagtaacaggagtcgtggttaataacgacgagatcagaatcagccgtcgggatatccgaaacttcagggcctttctgcatcagtacgaacagaatggggcggaagctatgaccaaaaaattggggaaagacgccactgcctatggaagaggatacctcgccttcgtccacatgataaatcccggtcaggccgctaagtttgtggagaaatatggttggttaaagaaatga

SEQ ID NO: 13519 - RNA, 1389 nt, synthetic construct
  source 1..1389: mol_type = other RNA
atggccaatcagaccaccaccaattggagagcggagctgcggtcagtgggtaaacagtacttcgaaattcaggagatgattaggatggggtttctgaagctcgacccggcagagctggatatgctgaagcaacgatacacggagctgaataaagtgaacaaggagcttaacaaactctctaaggaactggaagggctggaagacatcacccccctgattaaggagatccggaaaaatagaatcgaaagagtcaaagcagcccgtgccatccgaaaggttgagaaggcacagaaggagaaagagagaaaggctgagattgcccagcgcaaaaaagacacaccatattatctcggcgatggcgtgtcagcaggcttgaagtttgagggtggcaatgaagcccagttgaaagaagccggattgcctgtggtcaacaatgtcagggatttaagcgaactgatggctatgcctcagagcgacatattgtggctgtcgtaccatcgcaaggcagcaagtatggaccactacagtcggttccaaattccaaagcgcaagggcggctttagatcaatagccagccccaaacccaaaacacggaaggcccagcagtggatcctagagaacatcctttccaaaatcgactgtcacgaggcggccatggctttccggcctggaaaaagcatcgctgataacgctcacttccacctgcaggctgaggtgctcattaggattgatcttaaagacttctttccatctctgaagtttggtagggtgaaaggcctgttcaagtcttttggttataatgaaggcgtggcaagcgttctggcattgatgtgcactgacgcgctgagactctccgccaaactggaagggaagcagtatttcgttgccctcggagagcgctatcttccccagggcgcgtgtacctccccagctataactaaccttatatgccgtaagctggataataggctaagtaagctcggagataaacttgactggaagtacactcgatacgcggacgacatggttttttctagctcaaataaggagacagatttgaaacatatcctcgggctgagtaagaaaattatcggggaggaaaacttcgtcattcaccctgataagactatggtgatgcgtgggcaccaacggcagacagtgacgggggtagtggtcaacaacgatgaaatccgcatatccagacgcgatatgaggaacttcagggcctttctccatcagtacgaacagaaaggcgcagctgagatgacaaagcagttaggaaaggacgctaccgcttacggaaagggttatctagccttcgtacaaatgatcaacccggcccaagctgagaagtttaaggccaaacatggatggttatcccaagcctga

SEQ ID NO: 13520 - RNA, 1386 nt, synthetic construct
  source 1..1386: mol_type = other RNA
atggcaaattatgataagatccaagagctgcgccaggagatccagaccctgggaaaagaatactacatcatgcaggaaatgcttaggactgggtttctgaagatgtctgaggtcgacctggttagaatgaaagccaatttgaacgagttgtcaaaaattaaccaggaactgtctgtgcttagcaaggagcttaaagacatacccgatatcactcccataatcgccgagattcgaaagaatcgtatagaaaaggttaagtccgaaaggttgattagacggattgagaaggagaaactgatcatccaacgcaaggagaagctcaaggagaaaaaaaagaataccccgcattacttgggcgaaattgcacggggcctggaatttaaagcgagcgatgaggaaaagttaaagcagaaaaatatcccatctctgcccgacttgcaagccctcgcagacctctctggactcaccagggagcagctgctgtggctgtcataccataggaagaccgccaaaatagatcattatacgcgcttccagatccctaaacggagtgggggaatgaggactatcgcatccccaaaatcaaaactgcgggtgattcagcactggattcttgaaaacattctgcagaagctatccattcacgaggctgccaaggctttcgctcagggcgcaagtgtggtgaaaaacgccgtaccacacttgaacgcctatgtggtgattaaagtggatgtcaaggacttctttcctagcattaagtttaatcgcgtagtgggttttttcaagtcgttaggctattccagagggatgagctctgttctgggactcctgtgtaccgacgcgatgcgactgaatgctgaatttgagggtgaaaagttcttcgtggctatcggagaaagatacctcccccagggggctagcacttcacctatgctcacaaaccttatctgcaaaaagctggatgctcggctgagcaagttagccgagaaatacggctttcaatacacacgctacgcagatgacatgacgttttcccaccctgagaaagaagctaacgttaaagctatcctaggctggactaagaagatcctagcagaggagagcttcgagctcaaaaaggagaaaacctctgtaatgaagaaacaccagaggcagactgtcaccggggtcctcgtcaaccatcaggaaacaaaaatttcgagaaccgacatccgtaagttccgagccttcctccaccagtacacattaataggtgcggaaaagatgagtgagaagctgggaaaagacgccacatcctacggcaaaggttatttctcctatcttaagatggtgaatgagacacaagccgagaagtttaagaaggaatatgcctggctggccagttga

SEQ ID NO: 13521 - RNA, 1383 nt, synthetic construct
  source 1..1383: mol_type = other RNA
atgaccaattacgataagatgcaagaaatccgtcaagaggtggcgatgctggggaaggagtattatatcatgcgggaaatgctgcggaccggctttttgaagatgtcagaagcggatctggccaccatgaaggcaaaccttggtgagctcacaaagatcaaccaggagctcaatgaactgagcaaagagctgaaggacatccctgacattactccgattatcgccgaaattagaaagaatcgcatcgagaaggtcaagaccgagcgactaatcaaaagggtcgagaaggagaaattactagcccagcggaaggaaaggttggctcagaaaaagaagaatactccccagtacttaggggacatagcaaaaggactcaaattccagaaccagaatgaagaaaagctgaaagagaagaacctccctctgctcaaggatttgcaggatctcagcactctttctcagctcacacgagagcagctacagtggttgtcctatcaccggaaaacagcaaaaattgatcattatacccgtttccagattcccaaacgcactggcgggctgaggactatcgccagccctaagcccaagctccgagtagcacagcagtggatactggagaatatccttgctaagttgtcaattcatgaagccgccatggccttcaacgtgggagcgtcagtggttaagaacgctactccacatctgaacagcgaggttgttattaagatcgacgtcaaagacttttttccctccattaaattcaaccgcgtagtcggattttttaagtctcttggatattcccaaggcatatcttcaatactcggacttttatgcaccgacagcatgagactgaatgtcagttttgagggtgaaaaatttttcgtggccataggcgagagatatctgccacaaggcgcttgcacaagtccaatgctcaccaatctgatttgtaaaaagttagatgccaggctgtccaaactggccgagaagtacggattcgcgtacacgaggtacgcagacgatatgaccttttcccacaagcagaaagatgctaacatcaaggccgttctggggtggaccaaaaagatcctggcagaggaaaatttcgagctgaagaaagagaaaacatcggtgatgcgcaagtaccaaagacagacggtgacgggcgtgcttgtgaaccacgaagaaactaagatcagcagaaaagacattaagaagttccgggcctttctgcaccagtacacattgatcggggcagaaaaaatgtctgaaaaattgggcaaggacgctacagcttatggcaaaggttacttcagttacctgaaaatggtgaacaaaacccaggctgagaagttcaaacaaacctacagttggcttgggtga

SEQ ID NO: 13522 - RNA, 1395 nt, synthetic construct
  source 1..1395: mol_type = other RNA
atgtccgaggataaaaactggaaggaacgtataaaagaggttggcaaggaagccttcgaaattgaagatatgattcgcctgggatttctccagatggacaaggaaactatggctgaaatcctcgacaaacagaaggcctacaacaagctaagcaaccgattcttcaaaattaatagggaactggatagcgacatcgatattaccccctacatcaaaattattagggagaagagaatcaaggagtcccgcgaaaagagagcgttgagaaagattgaaaaggcaaaaaaggaggcagagcggaaacaaaaaatcgccgaaaagcaggagaagatgccttcttatctcggagatgagataagcgccggcctgaagtacgagggtaccaatgaggaaaggctaacgtcaacttccctgcccgtcatctctgacctgaaggagcttgaggtcaagtcgaatatcacagctaagcactggcagtggcttgcgttctacaagaaagtctctaatatcgaccactataacaggttcacaatccccaaaaagaacggggatgtacgtaagatctcagccccaaagaaaaggctccgcgttgctcaagagtggattcaaaatgagatactgtccaagatcgaattacatgagaaggcatatgcttaccggaagaacatctccattgtcgacaacgctaaactgcaccagaatgccaaagtggtcgttcgaatcgacttaaaggatttcttccctagcataaagtttaatagagtgaagggactgtttaagtcgtttggatattctgaagccttggctacaatatttgccagtgtgtgcaccgactctgtgatggtgaaggcgcagatgagtgagaaagtataccatgtgtcaatggggaacaaattcctgccacagggtgcttgcactagccccgcccttaccaacattatatgtaagaagatggacaagcggatcgagaattttaccaaaaaaaacggcatcaggtataccaggtatgcagatgacttggttttcagtacagaggacgagaatataaacctcaaaagcttcttttcctggatccatcggattattaaagaggaaggcttccaaatcaacaacgagaaaactagagtgatgcgccctaatcagcggcaggcagtgacggggattatcatcaatgaagggggtgacattagaattagccgcaaagatattcgcaaattccgggcttttatccacaattttaagctgaagggcgaggaagaagccagaaaacagattggaaaaaacccgaatcactacctggaaggctaccttagttttatacgaatggtgaacaaagatcagtttgagaagatgaaagcatatgccgagtcaaaattggagatggagatcatctga

SEQ ID NO: 13523 - RNA, 1386 nt, synthetic construct
  source 1..1386: mol_type = other RNA
atggccaatcagaatgactccgaaaattggcgagaggagctgaaacgcctcgggaaggagtattttataattcaggagatgctgcggactggcttcttaaagctcaccccagaagatatcgcgctgtacaagaccaaaataaaggagctgaacgatgtaaatggggaaatctatcgtttatcgcacgaactgaggggcattgaagatatcacaccccttattgaggagattagaaagaacagaatcgctcgcgtgaaagccgagaggatcattaagaaggccgagcgggcaaaaactcttgaggaacataaaaggaccatcagtgagaaacagaaatcaaaacccaactttctgggcgaaaaattcgcttccaagctcaagttcgaaggcggtgatgcaggcaaactgcaggcctccggattgccaaccctcaacgacctgcatgacctgtcccaagctaccggcatctctcgagaaaggttgcagtggctgtgttatcatagacaggccgctacaatcgaccactatactcgctttcaaattcctaaacgcaagggaggaatgagatctataagttccccgaaacctcaaatgcggctggcacagagctgggtcctggataacattctgtctaagttgcccatacacgactcagccgtcgctttcagggagggaaagagcattgtcgataacgctaattttcatgcaggaaatgcactgctagttcggttggacttgaaggatttctttcctagcgttagattccaccgtatcaagggcctgttcacaagttttggctataactacggtatcgccaccgtgttcgccctcctctgtactgatgctgctaggatcggggcaaaattgaatgataagcaatacttcgtcgcgcttggagacaggtaccttcctcagggggcctgcaccagcccaatgctcacgaacctgatctgccgcggtctggataaccggttaactaagctgtgcgcgtctcttggatggcggtatacgcggtatgccgacgacctggtgttctcacacgaggatgaacaggccgaccttaagaagctgctaggcctagtgaagaagataatcaaggaggagacatttgaggtcaacgaggaaaagaccctagtgatgcgcccccaccagagacagacagtgacagggattgtgattaatgacgggaaactccgtttaagccgaagagatgtgaggaactttagagcttttcttcatcagtacacgctgaaaggtgccgaggccatgagtcagcgcttgggcaaggacgcaactcagtacgccaaagggtacctcgcgttcatgcgaatggttaatccagaacaagctgacaaatttgtacaggaatacgcatggctcgcctga

SEQ ID NO: 13524 - RNA, 1386 nt, synthetic construct
  source 1..1386: mol_type = other RNA
atggctcaggaaaaccccgataattggagggaccagctgaaagccttggggaaggagtattataccctccaggaaatgctccgccttggattccttaagatgagcgagcaggatctagccttttaccaggctaaggttgccgatctgaacaaagtcagcacagaactccactcaatgaggaaaagcctggagggcgtaaaggatatcactccccttctcaaggagatcaggaagaataggattgagcgggtgcgcgttgcacggtcattgagaaagattgcaaaagagcaagcgttcgctgaggctaaaactaatcgaagagccagacagatggcaacaccaacctacctgggcaagggggtcagtaagcacctgaagttcgaaggcacacaagccgaacgactggcgttatttgacctgccgcgggtggaaaacatggcagagctagccgaagccatgcagctcacccctgaaaagctccactggctgtgctttcatcgagaggcttcaaagattgaccattatacaaggttccagatccccaagaggaaaggaggcttacggtctatcgcctccccaaaaagaacgttacgtgtagcacaacagtgggtcctagagaatattcttcgcaaaatagcccctcattctgccgcaaccgcctttgagcctagggcttccattgtcgagaacgcaaaaaagcacctgaatcaggccctatttatcaggatagatctgaaggatttcttcccctcgctgaaatttcaccgggtgaagggcttattccagtctctgggatacaatgctggcatggcgactgtgctcggcttgctttgcaccgactccgccagaattggggcgaaacttggtgaagaccagttcttcgtggcgcttggtgatcggtatctgccgcaaggggcttgtacatccccaactctgactaacctgatctgcagaaagctggataagcgtctggcccaattctgtgctaagcagggatggatatacacaagatacgccgatgacctgatgttcagccacgctgagagtcagacggacctgaaaccaatgatggggctggttaaaaagatcgtggcagaagaagggtttgtcatcaatcccgagaaaaccttggtgatgcgacctcaccaacgtcagatggtgactggcctcgtggtgaacgatggagagttgagagttagtaaacaggacctcaaacgctttcgcgcattcctccatcagtttgacttggacggcaaagacaaactctctgaacggttgggtaaggacgccgaggcttttggaaagggttactgggcatttattcgcatgatcaaccctacccaggccgaaaagttcaccgagaagtataagtggctggctcattga

SEQ ID NO: 13525 - RNA, 1404 nt, synthetic construct
  source 1..1404: mol_type = other RNA
atgcaactcaccccctctacaactgagaattggcgggccagactccaacgactagggcgagactattttgtcattgaggagatgatacggctcggtttccttgacctttcgcagcagcagtacaagacattacaggatagctacacacgcttgaacgagattaatggcgaattacagaagttgaacatcgaactcaagggtaccgaggacataacacctctgctgaaggaaattcggaaaaatcgtatcgaaagggttcgggcaaagagggctataagaaaagtcgagaaagcccgggtcagccaggccaagaaggcagaaatcgcgctgcagaagcagaagaccccataccatcttggggagggcgtgagtaaagggctgagattcgatgaaactgataccgagaagttatcacaggcaggcctgcctgtgctgcacaccctagaagacctggcacagttcagcaaactggagatgaaacaatgggtgtggctgtcctaccatagacgtgtcgccggcattgaccattatactcgctttcagatccccaagaaaaaagggggcctgagaaatatcgcttctccaaagaagacgctgcggatcgctcagcagtggattcttgagaacatcctaaacaagaggcccatacatcccaatgccatggccttcctgccgggaaagaacatcaggcacaacgctgagaaacacacgggaaagcacaccgttgtgcgagtggacttaaaagatttttttcccagcgtgaaattccctagggttaagggcctctttaagagttggggctactccgaaggcatcgcaacagtgctggcgcttgtatgcacggacgcgactcgaattggagcatctttggacggaaaagcttatttcgtagccttgggagaacgcttcctgccgcagggggcttgtacttctccagccattacaaacattctgtgcggtgataccgggtacctcgatcatagactcaccagactcggtgaaaaattggattggacttatacccgttacgctgacgacctcgttttctcaaccaacatcacagaagataatctgaagagtctgctggggctcatgaataagatcatcaaggatgagggcttcgagatcaatcaagagaagacttcagtcatgcggcaacaccagcgccagacagtgactggagccgtggtgaatggcaccgaaccaagggtgtccagagaggatattcgcaggtttcgcgcttttttgcaccagatggagaaaaacggatccgccgctatgagccaaaaactgggtaaagacgccgaaaggtacgcacagggatattgggcctttattcacatggtacagcctacacaggccgagaagttccttaaccaatattcctggctgaaaaagaaatga

SEQ ID NO: 13526 - RNA, 1404 nt, synthetic construct
  source 1..1404: mol_type = other RNA
atgcaacttcccgccactccaactgagagctggcagtcccgtctcaagcatctggggcgagaatactttattgtggaggaaatgatacgcttaggctttcttgaaatcaccccggaacaataccagttactggtcgacggatatgctaggctaaatgccataaacggagagctgcagcggttggggcaggagttgaagggtactgaggacattacacctttgctcaaggagatcagaaaaaatcggattgagagagtgcgcgccaagagagccctcaggagggttgagaaggctagggccaggcaatcgaggcgggaggaggtgatccgaagaaaaagacagaccccgttttatctcggcgaaggagtaagcgctggcttgcatttcacgggtaccgacgaagcgaaactggcagcagcagggctgcccgttctccacaccctcgatgacctggcccaggcctctggactagaggcacgccagtggatttggctttcttatcaccggcgggtagcccgaattgaccactacactcgcttcgagatcccaaaaaaaaaagggggcacacgcccaatcgcggctccaaaacgcactctcaggcaggctcagcaatggatcctcgagcacctgctgaacggtaggacaatccaccctaatgctatggccttcctgccggggaagaacatccggcataacgctgaaaagcatactgggaaggcagtcgttgtgcgagtggatctgaaagattttttcccctcagtgaaatacccaaggatcaagggcctgtttagacacttcgggtataatgaaggtatagcgacagtgctggccttagtgtgtaccgatgcactgagagtagccgcacgtttggacggacaagactactttgtggctctgagcgagcgctttctccctcagggagcatgcaccagtcccgcccttacgaacattctgtgtggagacgtcggctatttagatcaccggctgacatgcttggcagataagggaaactggcagtacagccgctacgcagacgatctggttttctccaccacagacccagccgccgatttgaagtctcttctcggccctgtgcggaagatagtggctgatgaaggctttgtcgtcaatcccgagaagacccgggtaatgcgacctcatcagcgtcaggccgtcacgggggtcctagtgaatgaggctcgtcccagagtgggcaggcaggaactgaggagattccgcgccttcctgcatcagatgggtcagattggcgttcctgcgatgtcagttaaactggggaaggacgccagacgatatgctcagggctactgggctttcgtgaaaatggtggaacctgatcaagcgtccagtctgcttggcaagcacccctggcttcgggcccagtga

SEQ ID NO: 13527 - RNA, 1413 nt, synthetic construct
  source 1..1413: mol_type = other RNA
atggagacaacagaacagaacacttcttctagcaaaaacaatgcatggcgagaaaagctgaagaatctgggtaaggagaacttcataatatcagaaatgacccggttagggttcctgtctgttgcccctgaaaacctccaggtcctgcgtgacggtttcgatcgtctggaggtgatccagaaggagttggctgccatccgaaaggagctacagggaacggaagacatcactccactcctgaaggagattaggcagaatcgcattgagagggtacgcgcacagaggacgataaaaaaggctgaaagagccgaagctgcagccgcagcccgtaagaaattcttagcagaaaagcaaaccaaacctttttatctcggcgatggggtaagtaagggcttgaaatttgctgcaagcgacgcctccaaattatcggataatggtttgcccgtgctgcacaccctggacgatgtggctgctgcaagtggattggacgcgtctaaatggcagtggctggcgtatcatagaaaagccgctacccttgaccactacacccgatttcagattcctaaaaaaaaggggggcctacggtccattgcctccccgaaagcgactctgcgcaaggcccaggcttgggttcttgccgaaattttgagtaaaagagccgacgcttcatccagtgatgccagctttgcgttccagaagggcaaatcaatcgttcagaatgctgccaagcatctgaacaaggctgtagtggtgcggatggacttaaaggattttttcccctccattaagtttaggagagtgaagggtcttttcaacaaacttggatataacgaagggttggctaccgtctttgcgctcgtgtgtacagattccgtgcggatcgaggcagcactggacggcaagagatatttcgtcgcactgggagagcggtttgttccccaaggcgcgtgcactagcccagcccttacaaatatgctcgcccgggacctggatatgaggcttatgcgcttcagcgagaaatacctgtggacttacacccgctacgcagacgacctcacgttttcgacagatcatccaacacctgacctcaggcaactcctgggggtggctgccaagatcatacgcgatgaaggattcgagatcaatgctgcaaaaacactggtcatgagaagccaccaacgacaatctgtcaccggcgtggtcgttaacaacgcagaggccaaagtgtcaagaagggatgccaagaggtttcgggccgtgctccaccacattgagactgagggcgaggagactgtcagcaagaagctgggaaaatctgccaccgcctatgccaaggggtacatcgcttacctatccatgatcaatccccagcaggccgaaaagttcaaagctaaacataagtggctggcctga

SEQ ID NO: 13528 - RNA, 1014 nt, synthetic construct
  source 1..1014: mol_type = other RNA
atgagcgacgagttaagtttgaatccacactggcgaaagagggtccaagagatcggacgcatgaacttctcaagggaagagattttgagactggggttcttcagcgatctggacgacgcggagagacaacagttaaagacttttcttgatgaggcttacccccgactcgcagaactgcgcaaggaactgaagaaagtcagcactaccatcgaggaggcagacgatctgcaatccctgctccgtgaggtaagacgcgcccgtatcgagcgcgtccgaagagagagggcacagaggaagaacaaaaaggagaggcaggaagttgagcgccagcaggcctgggccacaaagaaatctaagacaccgccttttctgggcgtgggggtatccggaagacttcagttttctggcgaggacgacaaacgcctgttgtcccaagggctacccgtcccaaaagacgctgaagaactggcttcgctcatgggaatcaaatcttccgaattactctggctttgttatgagcgagccgcggccagcgtggatcactatacccggttcgagatacctaagcagagcggcggtaaacggctcattagctcccccaaacctaaaatgcggtctgctcagagatggatcctggacgaagtgctagccaagctgtccccgagcaatgcagcaacagcctttaggccaggtgcctcaatcattaagaacgccgaacctcatttgaatgctgcgattctcgtgcggatcgactttaaggatttcttcccctcaataaccttcccccgtatcaggggattctttgaggctctcggctacaatccaggcgttagtaccctcctgagtttgatttcaacagatgcgcctcgggtgaaagccgttctggatgaaaagactaactttgtggctatggacgaaagaagtcttccacagggtgcatgcacgtctcccgctctggccaacctgattgcatggaaacttgatgcccggataggcgggctatgcaaggtgtga

SEQ ID NO: 13529 - RNA, 1074 nt, synthetic construct
  source 1..1074: mol_type = other RNA
gccgcatggcttgaaaaaaaaagtaagaatcccccatttcttggcatcggggtcagttctcggctgaggttccaaggtggggacacgaagattctaacagccaacgagctgccgacacctaaggacgccgaggagctcgcattactgctcaatattagcacatcagagttgttttggctctcctatgaaagggctgctacctcccttgatcattacacacggtttgaaattccgaaacggtctggagggaagcgtctcatttcatcacccaagccaaagcttaggacagcccaaagatggatcgcagagaatatcctggataagttatcacccgcagcccaggctaccgcgtttaggagcggtgcgtccatcattaaaaatgcggagcctcacctgaacgctgccatcgttgttcgaattgatttccgcgatttcttccctagcataacctatcctcgcgttaggggatacttcgaaagcctcggtttcaatcccggagtggccactctgctggctctgatcagtaccgatgccccacgtgtgaaagtgtcgtttgacggcaagacccagtacgtagccatgggcggcagatctcttcctcagggagcatgcacgtccccagccttggccaacttgattactcggaagttagacgcccgaatagcaggcctgtgccaggcctccactgaccagtggacctacaccagatatgcagacgatttgactttctccacccaggctagagacgcgaacgtcggacgactactagggagcgtgcagaacatagtatctgacgaaggattccggattaacagagagaaaactgctgtcatgcgcgcccccggcagaaggatagtgacaggcctgatcgtggaggacgagatccgactgtctagacgcgatctccggcggctgagggcttttctgcataggtgtgataaagacgggctggcaagagtcagcgaagagatcgggaaggatgctctcgccgtcgctcacggtcgcttggcatacgtgcaaatggtgatgccagaacacgccggccgcatccgtggcaaatatagttggctgtga

SEQ ID NO: 13530 - RNA, 1410 nt, synthetic construct
  source 1..1410: mol_type = other RNA
atggcctcacaggaccttgccttgaatcccgattggaaagagcgaatagctcagatcggtaaacaaaactttgtgcgggaggaaatgctgcgactagggttcgtgagcaaaaaattaggggaagaggagagagctaggatccaggggttcctggaccaagcctatcctcgtttgaaagagctgcgcaaggacttggccgaaattcgaagccagatagaaggcatcaatgacatagaaagtctgttaaaggaggtccgacgcgagagaattgagcgcgtcaagagggaacgcgaagagaggaaggtgcgcaaggcagaggagcaggaacggaggaggcaggctctagccgaagagatgcgtaagactcccaggttcctgggccacggcgtaagtgcccacctctcctttgccggaggcgacgcagttaatcttgcggccagaggtctaccccagcccgaagacgtggaacagctggctgaactgatgcaattggatccttccgaagtgctgtggctgtcttacgagagagccgccacgaccgtggatcattacacacggtttgagattccgaagaaatctgggggccgcagactcatttcctcgcctaaaccaaaaatgcgggtcgcacaaagttggattgcagagaacgtgcttgatctcctgtctccatctcggcacgccatggcattcagaccaggtacatcaatcgttgataacgcgagcccacacctgaacgcggccattgtggtgaaactggatttaaaagacttctttccaagcatcggcttcaccagggttcgtggctattttgaatacttaggatttaacccgggtattgcaactatactggctctgatctgtaccgacgctcccagggtaaaggttacgctcgacggcgccgcaaagtatgtcgccatgggagagcgtgggttaccacagggtgcttgcaccagccctgcgctcgcaaatttgatcgccacccctcttgactcaagactggccggactctgcactgctctcgagagtacctggacctacactcgctacgcggacgacctgactttctcctgtctggacgagagagctgacgtggggaggctgttgaaggctatcgagaggatcgtgggcgatgagggatttaggattaatgcagcaaagacagctgtaatgcgggcacctggcagacaggtagtgacaggactgcttgtcggcgatcagatcagactcagccggcgggatcttcggtgtcttcgcgccttcctccatcggtgcgataaggagggagtggaagctgtttcccgagccattgggaaggatgccctgtcagtggcacgaggacatctggcctatgtcacaatggtcatgcccgggcacgctgctgatatcaagcgcagatacgcctggctctga

SEQ ID NO: 13531 - RNA, 1704 nt, synthetic construct
  source 1..1704: mol_type = other RNA
atgtccgagtcaggcttgcctgccgattggcggactagactggagcggctcgggcaacggaatttcgagattagggaaatgttgaggctgggctttctcagtgcagccgaccctctccgaccaggtgagacaaacgctgccctactcgccaagatagccgagttagagcagttgcaggctgaactggatgaagtggacgatgtggtcgccagcgcatctaggatcgagacactgctagaggaaattcgcagagagcgcctggcctcatcggcgttaaggaaagccgagcggaggagagcgcgtgaagagcaggctaggcagaagcagctggcctgggccacccaacgttgcgaaaggcccccatatcttggcgcgggggtgtctacccgactccagtatacggggggcgatgacgatgctctggcatctgcgggattgcctgaggtgcacacggtgttagagcttgccgacgatatggacaccaccaccagcgaggtccagtggctgagctaccacaggtctgtgacaacaatagatcactacaaccggtttaccaccccgaaacggtccggaggaaccaggacaatcagtagcccaaaaccccgcatgagacaggcacagacgtacatcaagactcacatccttgaccagctctcccctgcctctccagcaacaggcttccgtacaggtctgtccatcgtgagtaatgccgaacctcatgtcggcgccgctgtcgtcattcgaatggacatcaaggacttctttcccacgattactttcccgcgggttagaggatattacgaatcattagggtacaatcccggaatcgcaaccgtattggccctcctctgtaccgactccccgagaactgcattccggtttgaaggggacaggtattacgccgcttctggcccgcgagctcttcctcagggggcatgtacctctcctagcctcgcaaatctggtggccagagggctagacgagagactcatagcttgggccgccggacgccctgaatcatggacttatacccgctacgctgatgacatggtgttcagtagcaatgatgccaattcggacgtggcatccctgatcgcaactgtccacactattgtgcaggacgaaggattctccgtgaacgagcgaaagaccgcggttatgcgggcccctcatcgacagatggtgacaggacttgttgtgaacgatgtggtccggatttcaaggcgccaaatgcgccgcctgcgcgcatttctgcatcagtgcgaagttcgtggtttgaacgctatgaccgaaagcctaggcacagacgctagatgcgcagcaacaggccacctggcctatgttaacatggtaaaccatgatcaagcacttaagctgctgcaacggcatccctggatccagagagagcccctgtctccacccggcgtgagaagtcgcagcaggccaggtcgtactccatcaagcactcagtcagctgttaccccagtaacagccggggtcactcgcctggagcttgctgacccccctgatggtggtaaattctgggaagtatgggtcgatggcgctaccctgtaccggcgatatggacccctgggagctccaggcacaacgtccgagaaagcctttagtactcccgaagctgcgcaaagcgcggctgagcagctgattcagaataagttgtccgggggctacagacccgcctga

SEQ ID NO: 13532 - RNA, 1413 nt, synthetic construct
  source 1..1413: mol_type = other RNA
atgtccaaagaagtcaaaaagctggatcccaattggagggaccggatcgagaaggtcggaaaatccacctttcaaaggcaggaaatgctaaggctggggttctgggagcccaaggatatccctacggacgaactcgcgtccctgcagaataagctcaatgaaacagttaacctgctgggtgagaaaagaacccagctgggagaggtgaacaagaaaataaaagaggcccaggacgtgaaaaagctactggccgagattcgaaagaggcgaatacagaaaagcctgaaagagagggagatacgcaaagctgagacaaaggagcggaaacaggataaaacaacccaggaccggcaaagacgaaaggttactccaccgtacttaggggagggcgtgagtggccgactaacgttcttagagggcgagcaggaaaaacttaaggaacttgaccttccccttctgaacaatctgacagacttgagcaagttgctcctgattgatgagggcaagatagcttggctcgcttaccacagggttgcgactaactgcgatcactaccatagatttttaatcccaaagcgtaccggagcccctaggcttatcgccagccccaaacctgagttgagagaagcacagggttgggtgaaacgggagatcttgtcaaagcttgaaccagaactggaagcaaaggcattcaagaaggaaactaacattaaggacaacgcacagattcactctgggaagggactcgtaattcgcgtggacctgtccgattttttcttctcaatcacattcccccgggtacggggtttctttatcagcctggggtataaccccggtatttcgaccgtgctggcacttctgtgtactgaatcagatcggactaaggtgacttataagaatgaggactggtttattgcccagggggaccgtaggcttcctcaaggcgcctgcacatcccctgctctcagcaatctcatagctcgccgcttggaccggcgcatcagaaactacctcgcttctatggatgaggagtggtcatacaccagatacgccgatgatttagctatctctcacagcaagagtgatgcagaagtgaaaaaagtcctgaaggccctgcagaaaattgacccggatgaaggctttagtatcaacgaaaagaaaaccgcgattatgagaagtcctcatagacagatgatcaccggactgattttgaatgaccaggagccacgcattccgcgcccctatctgaagaaagtccgtgccatggtgcaccaagccgaccaactctataagaggggagccattccagagaatctgtacgaaatcaaaggcaaattgtccttcatcaagatgatcatgcctcagcatgtcgagaagatcgttaacaagtattcttggctcaatccatcttga

SEQ ID NO: 13533 - RNA, 1422 nt, synthetic construct
  source 1..1422: mol_type = other RNA
atggcaaacaccgatggagtgctggacccacgctggaggaagcggatcgatgaggtagggaagaatgcattcgagattgaagaaatggtcagattaggcttcctggacgctgacgagctcgagaaacgtctcaacgcgaatggacagtccttcaaggcatatcagtccgctctggccgatcttgccgaagcaagcgccgctctctctgcgacctcaagggagattgaggctttgggcactgtggaagcagccctggccgccattaggagcagaagaatcgcccgcgtcaaggaggtgcgagaagaaaggcgggtcaggaaacaggcagaacggcaacagcgtgaggaggcgatcaggagacagcggcgagaagtgcctacatttctgggtagaggcgtctccaatcgccttaactattctggcggcaatgatgatatgataagccagctggggttgccaagactgaactcatttaccgatattgcctcagctctatccttagagccgcagcaacttcaatggctggtttacgaacgcggagatagtagggttgaccactacatcagattcaccattcctaaacggtcaggggggagcagactcattagccgaccccgtccctcattgcagcaagcccagcagtggatgcacgactcgatactgcgacggcagccactgcatcccgctgcaatggcttttcggcccggcgtgtcgattgtagacaatgcacgccttcacgtgggtgcccggatcgtggtacggcttgacctaaaggagttttttccaaccataacattcgcccgggtgcggggcctgtttgaaagtttcggatataacccaggcgttgcgacagtgctagctctgctgtgtacagatagtcctagagtcatggttaggctggatgaaagaagtcatgtggtgcctgttggggagcgagccttaccgcagggtgcttgtacttctcccactctggccaatctcgtctcccgctccttggaccgcagaatacaagggtacgcctccaaggccggctggacctattctcgttacgccgacgacctggtcttctccactaatcaggagacagccagcccccacagccttatcaggggaatctgcgccgtgatcaccgatgaaggttttgtggtcaacggcgagaaaacgcgtgtgatgcgcgctcctaaccgccagacggttactggactcctggtgaaccgcgacgtaggtttgacaaggcgcgaccagcgacggatcagggcattcctgcataaatgtacctgccagggactcgaggtcgtttctgcagagatcggaaaagatgctgagtctgtggcgagggggtacttggcatacgtgcagatgattagtgccgaaactgctcagaagctcaggagcagatgcgcttggctcgaccaaatctga

SEQ ID NO: 13534 - RNA, 1419 nt, synthetic construct
  source 1..1419: mol_type = other RNA
atggccaatcccgatggcgtcctggatccacgatggcggaagcggattaaggaggtgggaaagaacgcgttcgaaatcgaggagatggtgaggctggggttcttggagacagatgatctacagaaatatctgtccagcaatggattgtcatttaagagctaccagagtgctctcgcagagctcacggaggcgactgccgagctgactgcgacttcgctggagatcgagagcctcggtaccgtagaagccgcgcttgctgccattcgatcccggcgaattgctcgcgtgaaggaggagcggaatgagcgccgggccagaaaggaagccgaaaggttggtgcgtgaggaagccattcgccggcagagaagagaagaaccgacctttcttggaagaggcgtttcaaataggcttcactacaatgggggtaatgatgacatgctcaatcaactgggcttgccacagctgcacagtttctctgacatcgctagtgctctctgtcttgaaccccagcagctgcagtggctcgtgtacgagcgtggagactcacatgtagatcactacatccgtttcactatacctaaaagatccggcggctctagactgatctcacgcccccgtccaagcttacaacaggcccagcagtgggtgcagtctacaatactgcataaccagccccttcaccctgctgctatggcctttaggcgaggggtcagtatagtggataacgcaaggctgcactctggtaaaaagattgttgttaggctggacttgaaagactttttcccaagcatcacatttgctcgagtcaggggtctattcgagtcgtttggctataatcccggtgtgtccacagtcctgagcctactttgtacagattcaccgagagttcttctgtccctggacaaccagagccatgtggtccctgtgggggaacgcgcattaccccagggcgcatgcaccagtcctgcactggccaacttggtatctaggtccctcgatcgccgcattcaagggtatgccaacaaagctggatgggtctacacgcgctacgccgacgacctggtgctctccaccatccaggaaacagacagccctcatagactgatcagggggatctctgccgtcaccagagacgagggattcgtagtgaacgaagagaaaaccagggtgatgcgcgcaccaaacagacagaccgtcactggcctgttggttaaccatgatgtggggctcacccggaaagacctacggcgggtgcgagcattcctccacaggtgcagttcccaaggcctggaagttgtgtcagctgaaataggcaaggacgctgagtctgtggcacggggacacctggcctatgtccaaatgatcagcgccgcatcctttgagaagttaattagcaagcacgcctggttacaacattga

SEQ ID NO: 13535 - RNA, 1449 nt, synthetic construct
  source 1..1449: mol_type = other RNA
atgtcagagcaagacgccgaccagagcaacagtttgaataatcagtggaagaagcgccttcaagaaattggtcagggtgcctttgagtttgaagaaatgttaaggctaggctttattgacctagatactatcaagaggttcgataaggagatgaccatagaagagtcaaaagaggttttcgagcagctgaccaaaacgtctgcaatcctgtctgaggttgataaggaaattaattccatcaaccgcatcgaggagttactcgctgagatccggtcaaggaggataaaacgggttaaagaagcggccaaagagaaaaagatcaaaaagcaggaggaaaagataaagcgaagtaaggagataaaggagaggaagataaactctcctacctttttgggacgaggcgtgtccaacagattgtctttcgaaaaggtcaagaaagtggacttcaagtccaataagatcccggagcttaattcattcgtcgatgtagccaacgccctggaagtgacaccgtctaaattacagtggctcatctacgaaagaggcgcatccaatatcgatcactaccttcgttatgaaatccctaaaaaaagtggtgggaaacgcctgatatcatcccccaagaaagatatgaagaaagctcagaagtggattctggagaacatacttatcaaccttgatgtggacaaagcggcaatggccttccagaagggactctccatcattgacaatgcgtcgctgcatgtcaagagcaaaattattgtaaggattgacatcaaggacttcttccccacaatcacatttccccgcgtgcgaggcttttttgaaagcctagggtacaatccaggggtggcaaccgtctttgctctgatctgtactgatagccctaaagtgattttgaagcaggaagctatcgatggagacaagaacaataaggattacccccacttcattgccatcagtgagagaagcctgccccaaggagcctgcaccagcccaagcctggcaaacctgatctgcagaaagatagactctcggctgaacggctactcctccaagtctgggtggaaatattccagatatgctgacgacttgattttcagtaccacctccgaagatagttacccacaccggctgattaagagcatttcttcgatcattagcgaggagggctttaaggtgaatcaatctaagactcgcctgatgcgtgctccaaacagacagactgtaactggtctggtcgtgaataacgaagtgacgctcagccggcgggacctcaaacgcatgagggctttcttccatcagtgttcgtctaaagggctcgattttatgtcagagaagatcggcaaagacgccctctccgttgcaagaggatatattagctatgtcgaaatggtgtcacctacaattgccgagaaatttctgagtacaaacagctggatcaaatga

SEQ ID NO: 13536 - RNA, 1419 nt, synthetic construct
  source 1..1419: mol_type = other RNA
atgagcaaggaagaacggagcatcaatcagaactggcgcaagagactcgatgagattgggcaagccgcttacgagttcgaggagatgtctagattgggattcctgtctaataagaagatcgccaaaatgatcgaagcatccggtatctcactggaggagtacgagcaagctaagtcaaagctctctgacatctccaacttcatccgtgcaactaatgaggaaattgaatcgatcgactccgtcgaggtggcccttgagaagatccgtagtgagaggattaaacgcgttaaacagaaaaatgaggacaggaagcagaaaaaagaatcccagcggaaagaaagatcaaaattggcctacgaacagcgcataaagtctccgacatttctggggcgcgacgtctctaataggctgaactttacaggaggcaacactgaaaaactcgagctaaatggtttgcctgtgataaccacattcgctgaattgtcaagcaccctggagacaacgccgaactctctccagtggttgacctatgaaagagactcccaaaaaattgatcactacacccgatttgagattcccaagaagagtggtgggagccgactgatcagctcccctaagcctgcccttagaaatgcccagaagtggatactagaaagcattttgaataagctagacatccatagcgccgcaacagcttttaggcccggcaagtccattctggataacgcgaaattacacgccaacagcaaggttgtgcttagacttgacctgaaggatttttttcctagtattaccttcatccgcatcagggggctgtttgaatctctgggatacaacccaggcattagtaccgtgttttcactgctctgcaccgacagtccccggatcatcttaaaataccatggcgagacacacttcgtgaaagtaggacctaggaatttaccccagggcgcttgcacttcaccagcactcgccaatctgatagctcataagcttgatcgacgactgcagaagtatactgagaaaataggctggatttatagcaggtatgcggacgatctggttttctcctccaacgcagaggagatgcccgcatatcggctggtaaaggcagctagcaagatcgtggcctctgagggcttccggatcaataagcacaaaactaacattatgcggcatccacatcgccaaactgtcaccggactcgtggtcaacaaagatgtccgtattagccggaacgatctcaggaaatttagagcgttcctgcaccactgtgaaaccaaaggactggagttcgttagtaaggacatcgggaagaatgcgatcgccgtggctagaggttatctctcatacataaacatggtgagtccagaacttgccacgacattatcttccaaacacctgtggatttcgaagtga

SEQ ID NO: 13537 - RNA, 1428 nt, synthetic construct
  source 1..1428: mol_type = other RNA
atgagcgaggaaacaacagagattcccgcggactggagggcgcgcatcaaagagcaaggcaaggaggcatttcagctcgacgaattaagaagattgggcttctggcctccctctgcgggccttcaagagcaggttgccagagctgaagaggaagtgaagcgcttggacagggagatggctccactgcgggcacagttacgcaaaattgagggcgacatctcacgggctgccgacgtacagtctgccctggacgaaatccggaaggcaagaatcggtcgagtgaaagccgctagggaggccaagaagattgccagggccatggagaagatcgaccgggagacgttatggaaagagaagagagctagcgaccctcagttcctgggaaggggtgtcagtgtggggctccagttcgaaggaggggacctggagaagctcaccaagaacgaagtgcctcagctgcagaccactgctgaaatagcccttgccataggcatcgaaacccgggaactgacctggctgtgttaccataggggagcttccacaattgatcactaccatagattccagattccaaagaagcgcggcggcatgcgaaatgtgtcagcaccaaaaactaaactgaggcgggcccagcggtttgttctcgagcaaatattggcaaacctccctgtacacgaggccgccatggccttctgcaccggagtcagcacattggataacgcgagaaaacacgctggtaaacgcatagtagcaaggctagacctgaaggatttctttcccagcattgattttagccgcgtcaagcgcttttttcagtctctgggatataacgaggggtgcgccacaatttttgcactcctgtgtactgaggccccaagggcgcaaatctcactggacggccagcgacgctatgtggcaatcggagaaagacgtctgccccaaggtgcttgtacctccccggcactgtccaatctcctgtgccggcgcttggatgctaggcttagtgggcttgcaggtaaacgggggtttaaatatactcgttacgctgacgatctggtgttctcaagcgatgaagcaaggccagacatcggcgccttgctggtcctatcgcagaagatcgttgaggatgaaaagtttgttgtcaactccgagaaaaccttagtcatgaaaactcagaatcggcaaagtgtgacgggactcgtggtgaatgctcagtctagagccacacctcgggtgagtcgcgatgacttgcgaagattccgtgcgttccttcacgggttcgagactctcggcagagaagccatgaccgaaaagctggggcaggatgcactcttttacgcccgaggatatctggcttacattgccatgtccgatcccctaagggctgggaagctgcgtgtgatgcatccgttccttgcccgagattga

SEQ ID NO: 13538 - RNA, 1464 nt, synthetic construct
  source 1..1464: mol_type = other RNA
atggctaataagaacagcacaccagagcccgagccggaagtagccccaaaagactggagggcaagaatgagggcccaggggaaagaggcgtttcagctggaagagatgcgacggctaggtttctggcctcccgcagagggcgtcgaagcacagattgaagttgccgagcgggaagtggcccggatagatagggagctggctcctctgagagtcgagcttgccgccgttgaaacggaaattactcggcttggcgatgttcagtccgccatcgatgatgtgaggaagaatcgaattgcaagagtaaaaagggagaggggagagcgtcgagctcggcaagaactggaaaaggccaggcgcatcgaggccgctaaggtgagagccaagaacgagttaccctttctcggtcaccgcgtgtcttccgggctcgcaaaaactgaatctgatgtccagaaactcgctctgctagacctccctcttttccacagcgctttggatgtcgccgacgctatgggcatgtcagcccctcacctggcctttctgaccttccaccgtggtgccgccacagtagatcattaccatcgcttccagatccccaaacggaggggcgggatgaggaatgtttccgcacccaagacgaagctgagagctgcacagaatttcgtcctggaacaggtccttacaaaggtgccagtccatgaagccgtagcggcctttgccccagggacctctacagtgcagaacgctgcaaggcatatgggcgctcaggtggtggtgcgcttagatctgaaagactttttcccttccatcgactttgcccgggtccgaaatgctttcagttcgttgggatactctggcgcagtttcaaccgtgttgagtctgttgtgcaccgagtcaccccgtgttcagatgtccctggacggtgaaacacggcatgtggcgatcggagaacgcgttctgccccagggcgcatgcactagtccggctctgagtaactggatatgtagacgactagacgccagattgtccggcttagctaagagattcgggtggacctattcacgctatgcggatgatctcattttcagctcatccgagcttacgcccgacattaagactctcataagctgcgcacgcagcatcatccgggatgagaagcttgtggtgaacgacgagaaaactaggatcatgcggccaaacgcccgccaatgtgtgaccggactggtgattaatgcacaagacgcgaacgcgccacgtcctgcccgtactgaccaacggcgatttcgcgcatttctccacgcttacgaaacccacggaagagacgagatgacccaaaagatgggaagagacgcgctggctcatgccagaggcatgatcagttatctccacatgtctcagccagggaaggctagcgccctcattgagaaacacccttggttggcactggagtctgagacagccagctga

SEQ ID NO: 13539 - RNA, 906 nt, synthetic construct
  source 1..906: mol_type = other RNA
tcctatcataggggtgctagcttcgtggaccactaccataggtttcaaataccgaagaaacggggggggcttcggaatgtgtcagcccctaaaacaaagttgagacgggctcagaactgggtcctcgctaatattctaacccccctacctgtacacgaggccgcggtagcgtttaggccaggcatctccacagcgcaaaacgccgcgcggcatgctggaaaggaggtagttgtgcgcttagacctgaaggatttctttccctcgatctcctttactcgagtgaagcgtcttttccagagttttgggtacaatgaaggctgtgctaccgtcttcgccctgttatgtacagaggcacctagagttgagctggcattggatgggcagaaacgacacgtggccgtgggcgatagagtcctcccccaaggcgcatgcacttctccagcaatcacgaacctcctctgcagacgccttgatgctagactgactggagtggccgccaaggaagggtttacctatagccgttacgctgacgatctgatctttagttcagacactaagcgcgctgacgtgggatggatttttaccttcgcccagcgcatagttaccgatgagaaattcgtcgtgaacgcagaaaagacaatggtcatgaaaccccagaatcgacagagcgtcaccggtctggttgtgaactcccaggatggcctgggcccaagggtgagtagggacgacctgcggaagttccgcgccttcctgcacggatatgagattaagggcagggaagcaatgacggaaaaaattggtcaggacgccttgcactatgcaaaaggatacctcgcctacatcaatatgtctgaccctgccaaggccgccaaactgagagctgcacattctttcctgggtagctga

SEQ ID NO: 13540 - RNA, 1530 nt, synthetic construct
  source 1..1530: mol_type = other RNA
atggccgccgagactccaccatcagtgccagaaaacgaccttttcccgaaggattggcgacagcaggtcaaactctatggcggcagaaagggatttattcgtaaagaactcaaacgcctgggattctggcccccagcacctggtagtaaatacaagcacgtcacagctagcgaagaggctgaattggaacagttgtataatcagctgatcgaattgcgggcacccctcttggagcagctagacgcggtggatgctcggatcagagacgcgaagaagcaactcgggaatattggaaacgaagccatcctggccaaaaaaatagagactctgatagcggagattaggctgaagagaattgagagggttcgccaggagagagccgcacgaaaggcacagcgggccgaagcagctgccgctaaggctcaaaaagacaaagcatggcgcgccgccactcttcctcatttgggcagggcagtcagcgctggtctgtcctacgctggcggggatgaagataaactcggcgctcagggcctgcctaatctgtcctcagcaggggaggttgcagctgccatgggcattacaaccgcccaactggcctggttgacctatcacagaggcgcagcggccctcgaccactaccaacatttcactatcccgaagaaaagtggcgggagacgggccatttcatctcccaaggccaagctgagggaggcacagagttggctcttagagaatgttcttgaaaagatcgccgtacacgaggccgcgatggcctttagacccgcactgaatattgcccataacgccgctcgtcacgctggggctagcgtaattgtgcgtctggatcttaaggattttttcccttctatcaccttcaagagggtaaaaagaatgttccagcgcctcggattcaacgagggggtggccacactgtttgcactcctcgccaccgaagcccctcgagtgcagctaactctggacgggcagcagcatttcgtggcggttacggagagattcttaccacagggagcctgtacctctccagccataaccaacatactatgccgatccttagatgctcggttgagcggcgctgcttgcaaacttgggtttacctacaccaggtacgccgacgacctggtctttagcgctcggggtgacaagctgaagggcatcgcaatgagggagcttgccacaaaaatcatcgcggatgagaagttcgtggtgaacgaggctaagacagcagtcctgcgcccccacagtaggcaaaccgttacggggctggtggtgaatgcccagtccacaggtgagggtactggaactcctcgcgtctcgaggcgggacatccgcaactttcgagcatttcttcaccagtatgagttacggggacgcgaagccatgacagagcaacggggacaggatgcactgagctacgccaggggctacctgtcctttgtgcatatggtgtctcccgctcaagcggctgctctacagcagaaacacccctggctggaacgttatacgctctga

SEQ ID NO: 13541 - RNA, 1419 nt, synthetic construct
  source 1..1419: mol_type = other RNA
atgaacgccgagcagaggacacggtttaaggaactgggtaaatcagcttttattcgcgaggagatgactcggttgggctattggcccccatcatcggaaattgctaaccaatctgcactggctgagagcaagctaaaaccactgtatgaggaactgatccgcgttcggaaggaattcgacactgtctcggctgagatagcggtgtctggcgacattcccaccctgctagccgaggtgaggaagcggcgaatcgaacgggtcagagccgagagggccgtcaaaaaggcagagagagagcaggcccgctccgaagccaaaaccgccgatgccgcttggagacgtaagacgctcccttaccttggcgtcggtgtgtcaggagggctggcttattctgatggggatagcgcgaagatcagcgagagagcccttccatcactgaccacagcggctcaggtggcagctgccatcggcataggggaaaatgagctcgccttcttatgctatgagcgcgccgtgtctggcgtcgatcactacgccaggttcgcaatccctaaaaagaagggtggagttcgagtgctcagtagccccaagcgtcgcttgcgtgtagcccagtcctggctgctaaaaaatgttcttgaacctcttccagtgcacagcgccgccatggccttcagacctggcaaaagtgtcgttgacaacgccgccccccatgcaggccaagctatagtagtgaaaacagacctcaaggattttttcccaagtcttggcctccgtcggattaaaggattgttcgagggtctggggtacaatgaaggcgtagcaaccctcttcgctttattggctactgagacaccgcgcattgccgttatgttcgacggaaagaggcgctttgtggcagtatctaaacagagagggctccctcaaggagcatgtacctctccggccttgaccaatctgttatgccgaaatttcgatgcgagattagctggggctgcagcagcatttggcttcagatacactcggtatgccgatgacctgacctttagtcatgcttccgacaaggcccctgtgggtgtgctgctggcccttataaggaaaattgtcgcagatgagaacctcacagtgaatgaagaaaagacgcaggtcctgaggctgtccgatagacagtccatcaccggcctggtggtgaacgggagcgaaactcccagggttagccgagaggacctgcgaaggtttcgggctatcctgcaccagtgtgagagagacggttttgaagcggtgacagcgaggctcggaaaagacgcgcaagcttacgcaggagggtacttgtcctttgtgcacatggcacggcccgacatcgcaggaaagattgccgctgctcatccatggctggccaagtggcgccaggccaacatctga

SEQ ID NO: 13542 - RNA, 1356 nt, synthetic construct
  source 1..1356: mol_type = other RNA
atgactgccgccgagagacagcgtttgaaagagattggcaaagatgcattcatcagggaggaaatggtccggctaggtttttggccccccagtcctgaaatagcggagcagtctgcagaggccgagcggaaacttagaccattatacgatgaactggttggagttcgccgtgaactggacggagtggagaaggctataagggaatcaggcgacgtgcctgccctattggcagagattcggagaaagaggattgagagggtacgcgcggcacgcgtggtgaaaaaagtggaacgggaggcggctcgggttaagaagcaggagcaggatgccctgtggagacgaactgctttgccccaccttggacgcggcgtatcaggtgggctcacattcgttgaaggggagatcgagaaactgtgtgcagccatgggactgactgagagggaattagcctggctctgttaccaacgccctgcgtctaagaccggccattactccctgttcaccattccaaagaagcgagggggcaagagagtgttggcctcaccaaaaagcaagcttcgccaagcacagcgctggatcctctctgagatccttgccaatcaggctccccatgccgccgctatggcattttcaccaggggcctccgtggtcaagaatgcggaaccacatacggggaaatctgtggttgtgaaggttgatctccaagacttctttcctagtctaggagtaaagagggtgaagaactatttcgaacacctcggacatagtgaaggggtcgctactgttctcgctctcctctgtacagactgcccgcgggtagccgtcgaatttgacggtgaaaagaagttcgtggccgtaggaccgaggggtgttcctcaaggcgccctgacatcccccgcactgtcgaatctgctcgtcgagaaactggacaaaaggctgacgggcgcagctcagaagcttggctttgtgtacaccagatatgccgacgatctgacctttagccacgctgatggaagcgcccctgtgggtttgttgctgactctggtccgacagatagtggccgacgagaaattaacagtcaacgagaaaaagacacaggtcctgcgctccagcgatcgtcagatcatcaccggcctcgtcgtgaacggtgagcaaggcgtgcggctgagtagagacgacgtgagacgattccgagcaatccttcaccactgcgataccgaagggtttgataaagtgagcgaaagattaggccggtccgcacaggcttattgccaggggtatctggctttcattaaaatggtgaggcccgagcttgccgacaagctggtgaccgctcacagctggctggtccggtga

SEQ ID NO: 13543 - RNA, 1416 nt, synthetic construct
  source 1..1416: mol_type = other RNA
atgaactcagagcagcggaagcaactcgcggccatcggcaaaagcgcgtttgtccgggaggagatggtgcgtctgggattttggccaccctccccagaagtcgccgagcttgctgcaggcgccgaaaaggaactccgtgtctattacgatgagatgattgctctccgcactgaactaaacggcgtcgaggcaaagatcgccgaagccggaaatataccagcactgctggccgaggtgcgaagaaagcgcatagagagagtccgcgcagagaggatagcccgacgtgagcgcagagctcaggagaagattgaaagtcatgctaaagacactgaatggcggaaacgcgcgctcccatatctggggcatggagtctctgacgctctcgtgtacaaaggaggagatcccgaaaaaaccgccaccctaggtttgcctgctctgacgaccgcatctgatgtggccgcggccatcgggatctctgagagcgatctggcctggctcacttatcacagaggcgccgccactattgaccattactccaggtttaccatcccgaagaaaaggggcggagtgcgggtaatcagctctccgaagaggagactgagaacagctcagagctgggtgctggagtccgtgttatcacccgtgccggttcacgacgctgcaatggcctttaggccagcccgctccgtcgcagacaatgctagacgtcatcagggccaggccgtcgttatccggatagatctgaaggatttctttcccagtatcaccctccccagggttcgcactctgttccggtccctagggtataacggcggggtagcaacactgctggccctgcttaccaccgaggcccctagggtggcagcaaccttggatggcgccagacggttcgtagccgtagggggtcggtcacttcctcaaggggcatgcacgagccccgcggttactaaccttttgtgccgcaagctggacgctcgattaacgggcgctgccgaagctatggggttcgtttacacaagatatgccgacgacttagtgttttcgcacgcaaaacctgatgccccagtgggaatgttgctcgatctgacaaggcgcattattgctgacgaaggcctcacagtgaatgaagaaaagacaagcgtgcagagaggccagcatagacagaccgtgacaggtctggtggttaacggtggcgcgcccaggcttagtcgagaaaatcttaggaggttccgggccatgttgcaccaatgtgagcgagacggtctgcctgccgtgtcagagcggttggggcagaatgcacaagcctacgcagctggatacgtcgcattcattcacatggtggaccctgagaaagctcggcagattgttgccgcgcacccttggatcgctcgctggaagcgagctggaggggcttga

SEQ ID NO: 13544 - RNA, 1326 nt, synthetic construct
  source 1..1326: mol_type = other RNA
cctccaagccctgaggtcgcagccaagtccgttgaggccgaggcaatcctgaggcccatgtacgaggagctcgccatccttagaactgagcttacggggattgaaaaagagatcgctctgattggcgacattcctaacttgcttgccgaggtgcgccgaaagaggattgaaagggtgagagctgcaagggtggtcaaaaaagcagcgagagagaaggagcagggtgaacggaaagcatcagacatcgcgtggcgccggagtacactccctttcttgggccatgggatctctgccggccttcgctacgccggaggtgatccagctaagttgacggcaagtggcttgcccgtcctcgtcacagccggtgatctggctgccgggattggtatcgggaccagggacctggcttttctgacgtatcatcgcggagtcgccatgctcgatcactacagccggtttactattcctaaaaagcgcggaggcgtgagagtcatctcctccccaaagcgccggctgcgagttgcacagcagtacgtactcgaaaaagtgctagccctgctaccagtgcacgatgccgccgcagcctttaggccagggctgtcaatagtggataatgctgctaaacatgcagggaaacccgttgtgatcagaatagatttgaaggacttctttccgagcgtgcccttcccaagagtaaagaggctcttcgaatcgtttggctataaccctggcattgccacactctttggattactgtgtaccgaggcgccccgtgctgccgttacattggatgggtcagccaaacggttcgtagcagtgggagagcggtgcctgccgcaaggagcttgcacttcccccaccctgaccaatttactgtgtcggcgtctggacgcccgcctttctggactggctgatgcagcgggctttacttacacacggtacgctgacgacctggtgttcagccatgctgaggccggtgctgcagttggggctctcctacgagccgtgcgccagataatcaccgaaaccggattcgtggtaaatgaagaaaagactgtggtgctcaggccccatcacagacagtctgtgaccggcctggtcactaacaccgaaacacctagggtttctagacaggacctgcgtcgattcagagccttccttcaccaatttgagacaaagggcgcggaggccgtcacccagcaaatagggaaggacgctctggcttatgccggcggctatttaagcttcattcacatggtcagtcccgaacaggcagaaaaaatcgcggccaagcacccatggttgtcccgatggaagaagctgtga

SEQ ID NO: 13545 - RNA, 1416 nt, synthetic construct
  source 1..1416: mol_type = other RNA
atgtcatccatctcaaagcgcgatctggaccaagtggacgaaatgatagctcggggcttttacaccccgagtggtgacgttcggcgcgcacttgacgccctccgtgagaaccaagggcagatagatcggattgagcaggagctggctaggctcagggcagagttagcagacggccccagtctcgcggagttaattaaacaggccagagccaggcgaattgaacgagtccgcgaggaaagggccaggagacgggctctgagagaagcagagcagagcgagagacgcgccgcgtttgctgctcggaaaagacgagccccccttttcctgggcgaaggagttagcgccggccttcgtttcgatggaggggacgcagccaggcttgctgagcgaggtctgccagcgctaactgatgcggctgccttggccacagccatcgggctaccagtaaagcctgcccgggggatgcccacctttactgaaggtgcagatcagctggcctggctatgctaccatcgaagggtagttgaccacgaccactattcaagatttcggattcccaagagaagtggtgggtatcggcagttagccagccctaagcctctgttgagaaaggcacaacagtgggtgttggaccacctcacatcccggcttgagccacatgcacgcattgccacggcctggcgcaagggaaggagtgtggtcgataacgctcgcccacatgtgggaaaggctgtggtgatccgggttgacatccaggatttttttcccagcatctcttggagacgtgtaagaagagtcttcatggacctggggtattccgaaggtgtgggaaccatgttggcgctgctgactaccgataccgacagagtcgcagtgaggctggatggagaactgagattcgttgcacggggaaaacggggcctgcctcaaggcgcatgtaccagcccttccctggccaacttcgtggccctgcgactcgacaaacgcgtcgatggcctttgcagatctctgggcttcgattacactcggtacgctgacgatctcacgtttagccacgcacaaccaagggccaatgtggcagtgctgctgcagcaggtgtatgccattctgagggacgagggcttcgagcccaatgagcggaagacagctgtaatgcgagcgggaggccgacagatggtgacaggtttgatggtgcaggacgctatccgtgtctctaggcgcgatgtccgccgcttccgtgctatagctcatcagtgtaaattacacgggttcgagacaatctcccagcgtctcgaaaaggatgctaggtcttacctcgacggctttttggcctgggttcgcatggccaatgaggagcaagcccagaaactcgaaatgtggctggaatcgcttgggctcccgaggagggatatgtga

SEQ ID NO: 13546 - RNA, 1581 nt, synthetic construct
  source 1..1581: mol_type = other RNA
atgcacctgcggcatgtcagtgctcggaggcacgaccctcgagcactccatccccacagagggggcgaccatgtacacgctgtcgccggtactcggagaagaggtacccgcggtggtacatgtcgagcgggaaggggacctggaatacgggccatgagcggggatatcacgagtctccgagcaagagtggcaaaggtcgggcggggacaagccgtgtatgaggagatgatccgaagtggctggtggaccgtcaggcccgaagatacacagctgctggcagaggcatctaagcgcgtcactgatatcttggtggccctagatccattggtgctcgaaaggcagcgtattgacgaggaactcttaacactagctaacattgacgtcaaggccgtgcttgaagagattcgggccgagcgcatcgcagagagcagagctaggagggctgcggccaaagaggagcgaagacgccgaagagaagctgcagcagcggcccatgcagcccgagttagaaaaactccactgcatttgggccatggcgtttcaagccgtctggctttcaccgaggcacctaacccggaacttgatcgcgccggactgccacgggtttgcaatgcagaggaactggcggccgccataggaatagatgcggggcgcctccaatggctgtgctaccacaggcaggtgtctgctgtggaccactacaatagattcactatccccaagaggtcgggtggctctagacccatcgctgcccccaagaaatcactgcgcgtggcccagcgttgggtgttcgaacacattgttgagaaactggtccctaacatggccgtgacgatggctttccggcctggggtgtccatcgtagataacgcaagactgcatgccgggcgggccgtagtgatgaggatcgacattcggaatttttttccatcagtgacctttcccagagtgagggggctgtttgaaagcattggctactcaccaggcgtggcaacgttgctggggcttgtctgcaccgaagcacctcgcagggtagccgatttgcacggacgccgctatgctgtagctacaggcccccggggtttaccccaaggagcttgcacatccccgggcctggctaattttgcctgtaggaggctggacgcccgcattcgaggctacgccaggaagctcgggttccggtatacccgctacgcggatgacctagtcttctctcacgaggacgcagacgccccggttgacggtatgagaagggctgtctacaggattctcagggcggaaggattcgagccaaatgaagccaaaacatgtgtgatgcggcgtcaccagctgcaggtggtgactggaatagctgtgaataccgtgccccgtgtaagccgagaggccgttcgcagatttcgtgcgatcgcccatcagtgtcgcaccagaggcgttgaggccgtgactgccgacatcggcagagatgctcttgcttatttaaacggctatctgtccttcgttcggatggttaacccagctcaggcagatcggcttgccgcactcgtccctgaatccggctccgagaaggggcctcaggcctga

SEQ ID NO: 13547 - RNA, 1452 nt, synthetic construct
  source 1..1452: mol_type = other RNA
atgtctaactggcaagatgagattaaacggctgggaaaaagggaattcgaactgcgggagatggaacgcttaggcttctggccacctgcgacagttggggatgtacctcagacttttgacgacatgcgagctaagattgcacctataaatcatgagcttcgcgacattgctgagcagacaagacccctgagactacggcagagcgaggtagaacgcgagttggctcagaccggggatatcgaagcccgactcacgctcatcaggcagcagagaattgagcgtgtgaaaattgcacgcgctgaaaggaaggagagacgcgccagagagagggaagaacgcctggcgaccgacaaggtgaggaggcgagagcttcttccgcatttggggcgcggagtgagtagccgtctgcacttctgcatcccttcagatgcagagaaattggcacggtttcagctacctgtttggaacgagccagccgaccttgcaaattcgctgggcataagtcgggaacaattggcttggctatgctaccatagggaggtggcccctatcgaccactatagccacttctctatcccaaaaaggtctggtggaacgcgggcaattagcgccccccgaccatatctcaaagccgcccaggcccagatccttaccggtgtgctgaaccaagtcgaggtacatgaagcagccgctgcctttctcccgggcaggaatatagctaataacgcgcagaagcatgctcactgcgccgaaggtggccccagcgtagtcctgagggtcgacctgaaggacttctttccctcaattacttttgcgagggtggctggagtcttcgcctccctcggctataatgctggcatttcaaccctgctggctttgatctgtaccgagtcccccaggatcgaagccacattcgatggccagaaatccttcgtcgcactgggggatcgttttgttccccaaggggcacctactagccccgctctcacaaatctcctgtgtcgacgtctcgatgccagactcactggactggccaagcactacaactttacatatacacgctacgccgatgatttagtttttagttcgccgcgctcagacgcacgggtgatatccctgcaacgggggatcttcaagatcctggactccgagcagtttaccgttaaccccgataaggtcgccatcatgcggcggggtagccgacagtctgtgactgggctcgtggtgaactctgatctgggcccaagactgtctagaagagacttacggagattcagagctatccttcacgatattgaaaccgacggagccgacaccgtctccgagaagatgggcaagagtgcgcttcactacgccagaggatacttggcattcgtgcacatggtgaatccagagacagccaccaagctgcgcttaaaacatacgtggctgaacactaatggcccagtgtga

SEQ ID NO: 13548 - RNA, 1446 nt, synthetic construct
  source 1..1446: mol_type = other RNA
atgtctaactggagagacgagatcaagaagctggggaaacgggagttcgagagaagagaaatggagaggcttggtttttggccaccagcgtcctccggcgatgaagctcagaccgtggaagcactgcgtgctaagattgcacccctgaatgatgagctgagggagatcactgaaaagacacgtccgctgcgattgcggcagaccgaggtggaaagggaactcgcagccacaggggatatcgaggcccaactcgccgagatacgcaagcaaaggattgagcgggtcaaggctgctcgggttgagcgaaaagagcggcgcgcaagagaaagggaagctagactagccgctgatggcgagaggcggcacgctttgctgccacacctgggacggggagtctcaaggcgtttgcatttcgacgtggcgtctgacaacgagaagctcgccagattccagctgcctgcttggaatgaacctgcggacctggctgcctttctggagatcacccgcgaacagctggcatggttgtgctatcacagagaggttgcccccctggatcactactcacatttttccatcccgaaacgctcgggtggaactagagctattagtgccccgcgcccatatcttaagaccgcacaagctaaaatcctcgaaggcgtcttgaaacaggtagaggtccaccaggcagccgctgcatttctgcccggcttgaatatcggcgacaacgcccataagcatacgcatactgaagccggaggtcctgcggtggtgatgagaatcgatctgaaggactttttccctagcataaacttcaaccgcgtggccggggttttcgtgagcttaggttataatgccggcatctctactctcctggccctcatatgcacagagagtcctcggatcgaagctacattcgatgggcagaagagttttgtcgcactaggcgagaggtttgttccccaaggagctccaaccagccccgcccttaccaatttactttgtcgacgactcgactctcgcctgtccgggatggctaaacattatggcttcacatacactaggtacgcggatgaccttgtcttttctagcccccactcagacgccagggtaatttcacttcagcgaggggtgtttaaaattttggaagcagagcagttcattgtgaatccagacaaagtggccattatgcgtcggggagcacgacagtccgttaccgggctcgtagtcaacaacaatctgggtcctcgcatttcccgccgggatcttaagagatttagagccatcctccacgacatagagactaacggagccgagagcgtgagccagaaaatgggcaagagcgcattacactacgcacggggctacctggcgttcattcacatggtgaatcccgaaaccgccacaaagttcaggacgaaacatacgtggctagccgccagtgaatga

SEQ ID NO: 13549 - RNA, 1470 nt, synthetic construct
  source 1..1470: mol_type = other RNA
atggccgaggaagatattaagcaggaagccgggccccttactagagaggaatggattgctaaggtccgctcgcagggacgggacaacaccataagagaagaaatgatccgtttgggcttttggagcaatgatgagttgagttcagaagagcaaaggcagcaagccacagaagatgaggaataccagcagctgctgaaagagctgaacaagttaaaagccgagtctgccaaacttagtaacctcaacgagcttctgaagattgcgcgcaagaaaagaatcgaggagagcaagaggaagcgagcagagagaaaagctcgccgcgagagagagcaagcagaagccgcccagcgatggcaagcccacaaacaaactcatgtgatccacgctggaaggggggtaagcggtggcctgcaatccacagtgtacgacgaagctaagcttatagagaataatttgccgctcattcggtcaagcctagagttggccgaagccatggagattcctgtagggcggctcaaatggctgacataccataggaagacggcaactctgaatcactatcagcggtttactattccaaaaaagagtgggggcaggagagagatctccgccccgaaaaagtctctccgagccgctcagcagtgggtgaaaacacacatcctcgacgccctgaccgtgcatcctgcagcaaggggctttgtttccgggaagtccacactggaccatgcagagccacacctccagcaggctgctgttgtgaagatggatcttaaagactttttccccaccatccggttccgccgcgtgaaagggttcttccattacttaggatactcagaagccgtcagcaccatcttcgccctgctgtgcaccgaacctcctagaaaagagatccagttcaatggaaccaggtactatgttgcgatggacgagcgccagcttcctcagggtgcgtgcacttctccagcactgagcaatctgatctgtcgacggctagaccaacgattacgcggtctggcagaaaagcacggctttcactacacaagatatgctgatgacctagcattctcctgcggtgaggatggcctcaacgaaatcggcgctattataaacacgagtcgtgacattataagattcgaaggctttgcggtcaatgaggaaaagaccaggatcctgcgtgcgtcaaacaggcagaacatcaccggcattgtcgtgaatcagaaaccaaacatacgacggaaggatctgcgggcttttagggccctgctctattctgtggagaaaaacggattggagcaggagaaccgccataatcacccacatttctgggattatatcaaggggtacgcctcttatatccggatggtgcggcccgacctcgaagagaagctggctccccgtttattgagaatttcccagaagcacggactgcacgcacccgattggtgtaagcaggtcgccgctaagtga

SEQ ID NO: 13550 - RNA, 1467 nt, synthetic construct
  source 1..1467: mol_type = other RNA
atggcagaagaggaaaccaggccattgacgagggaggagtggcgaaagagggtccagagtgaaggtcgaatggagactatacgcaaagagatgattcggctggggttttggaacgacgcacagctgtcccccgaggagaagcaacaacaggccctggaagacgaagagtacgaaaggctgcagaaggaactgaacaagctgaagatggaatccgccaaactctctaacctgaagcagctcctgaaagaagcacggaagaaacgaattgaggaatcaaaacgtaagagggctgagcgcaaagcccagagagaaaaggagaaagcagaagccaaaaaacggtggcaggaatacaaggaaacccacgttattcacgccggagagggggtcagtggcggcttacaaaatactgagtacgaggaggcgaagctacgcaagaatgggcttccagtgatcggcagcgccctccagttggccgaggagatgaatattcccctacaaagacttaaatggcttacctatcaccgcaatacggccaccctctgccactatcaccggttcactattccaaagcgatcggggggtaaacgggaaatcagcgctccaaagcgcagcctgagacaggctcaggaatgggttaaacaccagctgttggatagactccctatccatcccgcagcctgtggcttcgtccctggtaagtccaccttagtaaacgctagacaacatctgggccaatcagtggtggtaaaaatggatctgaaggacttctttccctcaattacatttaggcgggttaagggcctgttccagtcttcatttgggtatagcgagagcgtgtccacactgttggccctgctctgtacagagcctcctcggaaagaagtggagttcgatgggacttactattacgtcgccatgggagacagacagctgccgcagggtgcatgcacctctccgacgctcaccaacatcttatgtcgacggcttgacagacgtctccagggactggcgtccaaattcggatttcagtacagcagatatgctgacgatcttactttctcttgctctaagcatgacgcagagaaactcggcgggttgatcaatggtgcgcgaagcattatccagtccgaaggattcaagacaaacgagaagaagactaggattttacgggatacaaatcgtcagaccgttacaggaatagtggtgaatcaaaagccaaacatcaggcgtaaggagctgcgcaggtttcgggccctcctgcatagagtggagataaacgggctgaacgaagagaatagagataatcaccctaacttttgggaatacatctcgggcacagccggctacatacgcatggtgaggcccgacttggaggctcgccttgctagtagtctaatcggcatcggagagaaatataacctacatatccccccttggtgcaaacaggctaccgtcgctgatcgctga

SEQ ID NO: 13551 - RNA, 1461 nt, synthetic construct
  source 1..1461: mol_type = other RNA
atggccgaaggcgagaacagacccctcactcgcgaggaatggatcgcccgcgtgagggaggaaggacgagaggagacgatccgctccgaaatgataagacttggtttctggtcgaatgacagcctgcccgaggaagagagacggcagcaggccctggaagacgaggagtacagacggcttcgccagaaactggcagagctacagcgggaatctgcgaagttggaaaacatcgaccagctgttaaaggaggctcgcaggaaaaggatcgaagaaagcaagaaaaagagggctgagagaaaagagcgacgtgaacgggagagggctgaggccaagaaacgatgggagagttatagacaacatcatattgtgcatgccggggtgggcgtttctggaggcctgcaagagactgagtgggacgaggaaaagctgcgacagcaccagctcccactgatcagaactgccgaggaactcgcggaggcaatgggaattaccctgtcacgcctcaaatggctgacataccatcggcaaaccgccactgtgtgccactattacagatttacaatccccaagaagagcgggggcaggagggagatttctagtcccaagaaagcactccgtgaggctcagtcatggataaaggagcagatcttggatcgcattcctccgcacccggcagcttgcggattcgtgcctggcaaatctaccctggatcacgccaggcagcatctccggcagcacgtggtagtcaagatggacctaaaggacttctttccatctatcaccttttacagggtgaaaggccttttccagtccttcggttactccgagttaatttcaacattacttgctttgctgtgtacggagcctcccagaaaagaggtgaccttcgatggcaaggtctatcacgtggcaatcggagaacgtcaactgccacagggggcttgtacctccccagccataacaaatctgatctgtagaagtctggataggagattggaggggctggcaaaagccaaaggttttaggtatagcaggtatgcagacgacctggcattctcaggtggaattgatggggagcaacagatcggatccttgctgaatatggcccggcggattattcgggatgagcggttcgaggtgcaggaagaaaagacacgagtcatgaggagcagtaaccgtcagaagatcactggcattgtagttaatgaaaagcttaacctccgacgccgtgaattacgggcgtttcgggctctgttgcacagcgtcgaaaagaatggcctcgctcaggaaaaccgccaccaccatcctgacttttggggctacatcaagggtatggccaactacattcgcatggtccgcccagattgggaagcccgactagccaagcagcttgttagaatagggaaaaaacatgaactccccgtacctaaatggtgccaacaagctgttgttaaggggtga

SEQ ID NO: 13552 - RNA, 1464 nt, synthetic construct
  source 1..1464: mol_type = other RNA
atgggaggcgaagcaatggccgaggagcaaaatcaccctttaacaagggaagagtggctggaacggctccagcaggagggaagaaccgaggtcatcaagaaagagatgatccgtctcggcttctggagcgaagaacccctgactccagaagaggaggaacagctagctatagagaaccgcgagcgtcagcaactcgaaaaggaactccagagattgaaagaggaatccgagaaactaccaaacattcaggagaagattaacgaggtgcgcaagaagagaattgaggagtcaaagcgaaaaagggccgaacggaaggcccaacgcgaattagcccgccaggaggctaaaaagcgttgggaagaacaccaggccacccacattgtgcatgttggagagggctactccgcaggcctgaccagtatccactacgacgaagagaagctgataacgcaccagttgcccttgattcggtctgccatggagcttgcggaggcaatggagatgccactgtcccgcctcaaatggctgacctatcaccgggataccgctacactatgccactacgcacgcttcactatccccaagaaaagcggtggggtacgggagataagtgcacctaagaaggagcttagacaagctcaggcctgggtgaaagaacatctgctggacccaatccctgttcattccgctgcatacggctttgtgcagggtagaagtacggttgataacgctaaacaacatctgcagcaggcggtcgtaatcaaaatggatctgaaggacttcttccctactattgacttctatagggtcagaggagtctttcagtcattcgggtattctgaagctatttcaactctgtttgggctgctgtgtactgagccgcctcggagtgaagtggaattcgatggacgctattattacgtggcgatgggcaagaggcagcttccgcaaggtgcctgtaccagccccgcgttaacaaatatcatctgcaggagattggaccaacgactgtcgcgccttgccgacacccatgggttttactatacaaggtatgccgatgacctgacattttcttgcaaagaggctagcatgtcccggattggtctgctgctcaaaaagattagagacatcgtgtcttccgagggcttcatgatcaatgaagctaagactcgtatcctcagagcctctcgaaggcagcgggtcacaggcatcgtggtcaatgagaagcccaacctttcaaggaaagagttaaaagcctttagagcattgctgcacaacgtagaaaagaatgggctcgaaaaggaaaatcggagcaaccatccccacttttgggagtacatcaagggctacgttaactacataaggatggtgcgaccagatctgggggagaagttcacccagcagctcgtgaggattgccggaaaataccgactgaatttgagccttcctgtgaataacctctga

SEQ ID NO: 13553 - RNA, 1446 nt, synthetic construct
  source 1..1446: mol_type = other RNA
atgtccgaagagcagttccagcccatgacgcgcgaggagtggattgaacgaataaagaaggaggggcgagaggaagtgattaagaaagaaatgattcggctcggcttctggaaagaagagccagtcgacccagccactgctgaacagattgcaaaggaacaagaggaaagaaagcagctggttgaggagctgaatcaacttaagaaagagtccgaaaagctgccgaatatcaaagagaaactcaaggaagcaagggagaaaaggattgaagagtccaaacgcaagcgggccgagagaaaagccgagcgggagaaggagcgtcaagaagcgaagaaacggtgggaagaatataaagcgacgcatgtaatacacgtcggcgatagcttcagcgccggcctgcagaactttgatcatgatgaggagaagctgattaggttgggcttacccttgatcagatcagcgatggagatggccgaagtaatgcacctgcctctgagtcgcctgaaatggttaacctaccaccgtaacaccgctactctttgtcattatgcccggtttacaatacccaaaaagaacggtggagtgagagaaatcagcgccccaaagaaggaattacgacaagcccaggcatgggtgaaagagcggatcctggataggatacctgttcaccaggctgcctacggctttgtgcctggtagatctaccgtcgaccatgctaagcagcacctgaaacaggctgcagtgattaagatggatctgaaagacttcttccccacaattaatttttggcgcgtcaaaggagttttccggtcattcgggtactccgaggcaatctcgaccctgtttgccctcctctgcaccgaacctccgcggacagaggtggagttcgatggcaagtactattatatcgcaatgggagagcgccagctaccccaaggagcttgcactagtcctgccctaaccaacatcatttgtcgaaggctggaccacagactgtctcggcttgcagagactctcggtttcacttatacaagatacgccgacgaccttgcgttttcttgtgacgagagtgccttgtgcagaatcggggcactaatgacaaaggccagggacatcatcgactctgaggggtttatggtgaacgaggaaaaaacaagggtcttgagatcctcacaacgccagaaggtgaccgggatagtagtcaacgaaaagccaaatatcagccgtaaagagctgaagaagtttcgcgctctcctgcacaatgttgaacgtaacggtcttgagaaggaaaatagacagaatcatcccaggttctgggagtatatccagggatacgtgagctacattaggatggtgaggcctgatctcggcgaaaagttttcagaacagttggtgcgaatcgctcgcaagtaccagctccgcctgagtgctccagtgagcaaatga

SEQ ID NO: 13554 - RNA, 1422 nt, synthetic construct
  source 1..1422: mol_type = other RNA
atgtctgaggaaacacaacccctgactaaggaagagtggagagaaaggatccagcgggagggcaaagaagagacaatcaagcaggagatgattagattgggattctggaccgataaaccactgacccccgaggaaatggcaagcgttgaggctgatgatcaggctgaagccgcacttaagagcgagctgaataagttgcggtctgagtcccgaaaatggtctgatacggaccagctgatcaaaaaagcccgtcagaagcgcatcgaggaatctaaacagcggagagcggaacgcaagaaggcgcgtgcaatcgagcgcaagcagcaagaggagaggtgggccgagtacagacaaaaccacctcgtgcatttgggtaacggtgtctccggtggactggaacagtccacaaccaatcaggaacggctcaagcaactggaccttcctctcatagaaacaccacagcagctcgcatccgaaatgggcatcaccctagggaggctgaaatggttgacctaccaccgcgatctggccaccctcagtcactactatccttttactatccccaaaaaaaacggagggatcagagagataagtgctcccaagaaagagttacgagccgcccaggcctgggtgaagcagtcactcctggaccagctttccacacatccagccgcatacgggtttgtgcagggaaggaatactgtggatcacgcaaagcagcatctgaatcaggccatcgtcgtgaagatggacttagcagacttcttcccgacaataaccttttatcgcgtacgcgggctgttcgcaagttttggctactcacaacaaatgagcactgtcttcgcccttctgtgtacggaacctccgaggaagagggttcgatttgacggaacatattattatgtagccatgggcgaacggcagctgccccaaggagcttccaccagcccagccattacgaatctaatatgccagaggttagatcagcgactgtcgggccttgccgaaaaagagaactttatttactcacgctatgctgatgatctcactttctctacatcagaccagcaagataggagagtgggggcactacttcagactgtgagacagattattcacttcgagggcttccagcctaatgaggctaagactagaattctgcgaaaaagtcggcggcagcgtgttaccgggatcgtcgtgaatgagaaggctaacttgagccggcaagatcagaggcggttcagggctattctgcacaatgtgggtaagaacggctttgacatcgagaaccgtgaccaccacgacgattttctcgcgtatctccagggctacattagctacgcccatatggtccgccctgacctggccgaaacctggcagaaccaattggacagagctattgctgcgcatctgaaagactga

SEQ ID NO: 13555 - RNA, 1464 nt, synthetic construct
  source 1..1464: mol_type = other RNA
atgtccgaggagcaaagtcaggagacgcagcagctcactagagaggaatggatacagagaatccgggaagagactaagggggaagtcatcaagaaggagatgatcaggctggggttctggagcgaagaacctcttcccccggaggagaaggagcagcaagaacaggaagatcgcgaattcgccaggcttcagaaggaactccaggctctgcaacaggagagcgagaaactggaggataccgacaccctcatccgggaggctcgcaaaaaaagaatcgaggaaagtaaacgaaagagagccgagcggaaggctgaacgcgagcagcgtctagccgaggccaagaaacgttgggaagagtaccaggcgaaccacgtggtccacgctggaatcggcgtcagcgcaggcttgcagaaccacactatgaacggatatcagcttgaacaacttggtctgccaattttgacctcccccgctattatggctgcagagatgggtatagagctgtcacgccttaagtggctgacataccatagagacacagcggccctgtcacactatcacaggtttaccatacccaagaaaagcggcgggaggagaataatttctgcacccaaacccgaactgcggcatgctcaagagtgggtgaagacctacattgtggatcgagttccggtccatgaagccgcctacggctttatccccaaacgatcgaccgtggacaatgcacagcaccatctacagcgcgctgccgtgatcaagatggatcttaaagacttcttcccttccattacattccagcgcgtgaagggcttgtttcagtcctttggttattctgaggctgtctctactctgctagccttactgaccacagagccacctcgtgaaaaagtcagctttgacgggaagttctactacgttgcagtgggtaagcgccaactgccacagggggcatgtacaagtcctggaatcacgaatctcatttgcagacggctggacgccagactcacagagctggctgagaagatgggctttacctacactcggtatgcggacgatttaaccttctcatgcgaccaagacgggctcgaacagttgggagtgctgttacgaggagtaagggatattgtgcggttcgaaggactgcaagtaaacgagaagaagacacgtgtcctgagggcctctcgaagacagcgggtgacgggaatcgtggtaaacgataaaccttccttgccaaggcaggagctccgcacttttcgggccctcctccacaacgttgaaaaaaatggcctggaggccgagaatagagaaaataggccacatttctgggagtatattcagggctatgtgtcatacgttaggatggttcggcctgatctgggggaacaatttggcgaacagttacagcgcatcgccgcaaagtatggcttgaaactgaatgccgcgagggaacgagaggcaaaatga

SEQ ID NO: 13556 - RNA, 1443 nt, synthetic construct
  source 1..1443: mol_type = other RNA
atggcagaagaggagaagcagccactaacgcgcgaagagtggattcagcgaatccaggaagagtcccgggatgaagttattaagaaggagatgatcaggctcggcttctggatcgagaagccactcgaccccgaggacgagaagcaacaggctcaggagaatgaagagtatgcccgccttcagaaagagcttaatcaactgaagcaagagtcagcaaagctctctaatgtggatgctctgattagagaagccagaaagaaaaggatcgaggagtctaaaaggaagcgcgccgagaggaaggcccagagagagagggaaagatcggaagccaagaaacgatgggagacttacagatcccagaatatcattcacgctggcataggggtttctggggggctgcagtaccacgaaagtgacgaagagaaacttaaatcactgcaattacctcttctcagttcccccgccgtcctggcagatgaaatgggaatggatctgtcccggctcagatggctcacttatcatagagacaacgcaaccttgtgtcactatcatcgctttacaatcccaaagaaggggggtggcgagcgacttatcagcgctcctaagcaggagttacggaaagcccaaaactgggtcaaagaacatatactggaccgaatccccttgcacgatgctgcatatgggttcgtgcccggacgatccaccgtggacaatgctagctgccatcttggccaggaagccgtcataaaaatggatctccaggatttcttccctagtattacattcaggcgtgtgaagggggtatttggatcctttggctacagtgaggcaatttctaccctcttagctctgctcacaactgaaccccctcgggaagaggtgatgttcgacggtaagtactactatgtggctattggagagagacagctgccacagggagcctgtacaagcccaggtattaccaacatcatctgccgccgcttggatcagaaattggaggaactggcgcggggtctgaacttttactacacacgttatgcagacgatctaactttttcatgcggtaaggaaagcactcaacacatcggcattttgctgaggggcgtcagggaacaggttcgctttgagggcctgcgcgtaaacgaagggaaaacgcgaatactgcgtagctcaagaagacagagagtgaccggaattgtggtgaacgaaaaaccgaatctgacccgcaaagagctacggcggttcagggccctgctgcacaacgtggaagccaatggcttggaggcggagaaccgggacgatcatcctcggttttggagcttcatccaaggatatgtctcgtacatacagatggttaggccggacgtagcggccaaaatgagcgaccagttaaatcgtatcgcggagaagcacggcctgcaccggacaatcaggacctcttga

SEQ ID NO: 13557 - RNA, 1461 nt, synthetic construct
  source 1..1461: mol_type = other RNA
atggctgaggagaaccagcaggaaacacaacctctttcacgcgaggagtggatagagagggtcatgcaggaggggaaagacgaagtcattcgccaggagatgataagaatgggcttttggtcggaaaagcctattccacctgaagagaaagcaaaacaagaacaggaggatgaagagtatgcactcctgaccgaagaactgaatcggctcaagcaggagagcgagaagctcggcgacattgaaagtatgatacgggaacggagaaagcaaagaatcgaggagtccaagaggaagcgagccgagagaaaggcagaaagggagcgccttagagcggaggcacgcaaacgttgggaggaatacaagtctaagaacgtcatccatgtgggagccggatttagcaaggacttgcagtcttttgatatggacgaggagaagctgcgactgaacaaacttcccgttatcaggacggctgaggagctagcgggcaagatgggcatctctctgtctgaactcaaatggctgacatatcatagagacacggctaccatttgccactaccatcgtttcaccatcccgaaaaagagcggtggcatgcgggagatctcagctccaaaacccaaattacggcgcgcccaggagtgggtgaaaactcatatcttgggtgggagcgaagtgcacccaagcgcgtacggtttcattcccgggaggagcactgttgacaacgccaagtgccatctgaagagggcagccgttatcaagatggatttgaaggattttttcccctccatcactttctggcgtgtgaaaggtcttttccaatccttcgggtattcagcggccatttcaaccttactggccctgctatgcacagagccaccccgcaaacaggtgcagtttgatgggaaattctactatgtggccattggagagagacagctaccacagggggcctgtacaagtcctggcatcactaacctgttgtgtcggagactggatctccgcttaaccggattgggagaagctaatgggttcacctactctagatatgctgacgacctcaccttttcctgtgatgaagaaggcctgccgcagatgggcggagtcatcaatacagctcgccacatcattcgatttgaaggcttcagggtaaatgaggaaaagaccagggtacttcgaagtagccgtaggcagaaggtgactggtatcgtgctcaacgaaaaggtgaacataagtcggaaagaacttagagccttccgagccctgctgcacaatgtggaaaaaacagggcctgagaaacaaaatatctatcaccaccccgacttttggggatatataaagggatacgcatcctacattcgcatggttcggcctgatctcaatgagactctggaacagcaactgaaccggattaacaggaaatacaatctggagaagtccgcagtcgccgaggctaagggctga

SEQ ID NO: 13558 - RNA, 1464 nt, synthetic construct
  source 1..1464: mol_type = other RNA
atgtcagccaataatccatcagaggaggttcaacctctgagtagggaagagtgggtccagaaaatgagggaagagggggggaagggcaatctggtgaggaaggagatgatccgcctgggattctggacagaaaagactctgacggtggaagagtaccagaagaagagagagctcgaccaggagtaccaggagttatcccaacagctcgaaaaatttcagcaagagaacgccaaactggaagatgtgaagaccctggtgaggcaggctcgggccaaacggattaaagaatctaaagagagaagggccaaacggaaggctgagagagaggaggccctggcacaaagacaacggaaatggcaggagtatcgtgatactcatattttgcatgtcggagagaatgtttcaagccacctcgaagatcaagaatacgaagaggagaagctgatatcccagcagctgccaatacttcggggcagccttcatctagccgaagagatgggtgtgtccctaagccgcctcaagtggcttacatatcaccgaaagaccgctactatatcccactaccacaggtttacgattccaaagaaaagtggaggaaaacgcgagatttcgagcccgaagagtgaattgcgtcaggcgcaatcctggatcaaacaggagatcctggaccacctgaaagtccactctcaggcatacgggtttgtgcccagtaaaagcacagtggacaacgcgcttccgcatgtggggaagcaggttgtggtcaagctggatctccaggacttcttcccctctatcactttccccagagtgcggggtttatttcgaagctttggctactcaggtgaggtatctaccgtgttagctctcctctgcaccgagccccctcatcgcgaaatcgagttccagggcaagaagtactatattagtattgaggaacgccagttgcctcagggcgcatgtacctctcccgctatcaccaacttgctctgcctgagactggatgaacgccttgctcagttggcctcaaaaagaggattcacatatagccggtatgccgacgacctcactttctcctgttctggcgattcggagcagcagatcgggaagatgctgggcacaatcaggaagattgtacaagcagaaggatttcaggtcaacgaaaaaaagacaagagtcctaaggtctagtggccggcaacgtgtaaccggagtcgttgtgaacgaaaagccttccctcgacagaaagcgcctgcgaaacttcagggccctgttgcacaacgtagagaagaagggtctggacgcggagaatcgagaaaaccacccaaatttttggcagtatatactggggaatgcttcatacatccagatggttcgacctgatttaaaagaagagattagccagaaacttgccaaaatcgcagaaaagtatggccagaactactccctgcaaagcgtgaataagtga

SEQ ID NO: 13559 - RNA, 1458 nt, synthetic construct
  source 1..1458: mol_type = other RNA
atgagcaatgaaaccaactatgagcaacatcagcccctgaccaaggaggagttccaagctagaatgaaagaaatggggaaaagccagtttattcgagaagagatgctcagattgggcttctggacagaggaaaccttgacacccgaagaacaggcagaaagaagccaagatctgtcagagttgcagatagtccagaaggagcttgacgagttgcgcagtgaggcacgcaagctcggcgatattaaggaacagctgaagatcgcgcggcagaagcggattgaggagtccaagcgtaagcgagacgagaaaaaggcccagatggaacaggcctccgcagaggcccagaaacagtggacaaagtacaaaaagattcacattccccacgttggtaatagatactctatcggcctcgaacatacaggcatggataaggagaaactggaggcttggcgtctgccagtgctgcagactgccaaggaactcgcatgcgctatggagatcgaacttaaccggttacagtggctgacttatcaccgagacactgcgaccctgtgccactaccatcgattttctattccaaagaagagtggagggacccgcgagatctctgccccaaaaccagaactccgacaggcacaacagtgggtgaaagaacatatacttgacctgctgcctatacatcctacggcttacgggttcgtaaaaggcaaaagcactgtggataacgcccgggtgcatatccaaaagaggattgtggttaagatggatctgcaggacttttttcctactattaccttctggagggttcgtggactatttgagtggatgggctacagtagacagatctcaacactgctagccctgctgacgaccgaaccccctcaccagcaggtcaagtacgacggaaagtactattatatcgccatcggtgagcgccaactaccgcaaggcgcctgtacgtcacccgccatcaccaatctcattacttggggcatggaccagcaactccacgcttggactgaaaaaatgggttatgcctacagccggtatgctgacgatctgacctttagttctgagacactgtcaagctcccagcaagtgggggtgctcttgaaaagggttagatctacagtaaagcttcatggattccaggtgaacgaggagaaaaccaggatcttaaggcacacccggcggcagcgcgtaacaggtatcgtcgtgaatgaaaaaccaaacctgactaggcgcagattacggcagttcagggctttactgcatgacgtcgaactgcacgggcttgaggcagctaacaggcagaatcacccgaatctctgggcctacataaacggatatatctcctacatggcgatggtgcgccccgatctttcccacaagtataatgagcaggcaagcagaatttcccaaaaatatggattgtcgtacgtggggatccctgtctga

SEQ ID NO: 13560 - RNA, 1449 nt, synthetic construct
  source 1..1449: mol_type = other RNA
atgtcagaagagaacaaagtgctgacccgcgaggagtggataaataaaatccgatcagagggcaaggccgagacaattagatccgaaatgatcaggcttggcttttgggaggcacccaatcttagcgaggaggagcgagagcagcaagctaaggaagacgaagagtataaggaagtgagaaaggaattacaggaattgcagaagaaaagcaagcagctaaaagacatcgatttcctgctgaaggaagcgcgcaaacgcaggatggaagagtcgaaaaagcggcgagccgagaggaaagcagtgcggaagaaagctcaggctgaggccaaagagaagtggcgcaaataccgacagaatcacgtaatccacgtaggagatggggtcagtgcggggctcgctagcacagagacgaacgagcagaagctgatgcaacaccaacttcccctgattcgttccgctttgcaactagcccatgacatgaacatcaccctctctgagctgaagtggctcacctatcatcgaaatacagcgacaatcaaccactatcaacacttcaccattcctaaaaagtctggcgggaagcgggaaatcagcgcccctaagagtaagttaaggagtgctcagagttggatcaaggcaaacattttagataagctggccgtccacgatgctgcgtacggcttcgttacgggtaaaagcactgtggataatgccaaacaccacataggtaaagatgccgtggtgaagttcgaccttaaagactttttcccatcaatatctttcgtacgggtgagaggtctgttcgaatctttggggtatagcagggctatttccacgctctttgcacttatctgcaccgagccccctcgccaggaagtggagttcaatggcaaaatgtactacgtggctatcaatgagagacagctaccacagggagcctgcacttcccccacactgacaaacctgctgtgtcggagacttgacgaaaagctcactcacctcgcaaaggagaaaggattcacctatactagatatgccgacgacctgactttttctggaaatgaggaagcactcaagcagatagggtcactgatgggctcggttcgcagcgtcgtggactttgaaggatttattattaacgaagccaagacccgtgtcttgaggaacggcagaaggcagcgggtgaccggaatcgtggtcaacgaaaagccgaacttgactcggaaagacattcgctccttcagagccctgctgcataacgttgaacatcacgggctggaacaagagaaccatcggaatcatccacatttttgggagtacattaatggttatgtctcctacgtccagatggttaggcctgatatcgggaagaaatttgccatccaggtgcagaggattgcagataagtacggcctcccaatccgtgtttacatagagaaactgggctga

SEQ ID NO: 13561 - RNA, 1449 nt, synthetic construct
  source 1..1449: mol_type = other RNA
atgtcagaagagaacaagatgttgacccgagaggaatggattgcaaagattagaagcgagggcaagcacgaaaccatccggggcgagatgattaggctaggattctgggaagctccaaaccttacagacgaagagattgagcagcaggcaaaggaagacgaagaatacacggaggtgcggaaggagcttctcgctctgcaaaaggagagcaagcagctcaaagacatcgatttcctgctgaaagaagctcgcaagcgacggatcgaagaatccaaacagagacgcgccgaaaggaaggctcagagggagaaatcccaggcggaggcgaaggaaaaatggaaacagcacagggagacacacgtcatacatgtgggagatggtgtgtcagccggtctggcctcaaaagagacaaacgagacgaagctcatggagagacaacttcctctgattaggagcgcactccagctagcagaggagatgggcatcacgctgtccgagctgaagtggttgacttaccataggaataccgctaccattaatcactatacaagattcacgatccccaagaaaaacggaggacaacgggagatcagcgctccaaaggctaagttacgaaccgcacagacttggatcaaagaaactatcctggataacctcactgtgcacccagcagcgcatggattcgtaaccggcaaatccacagtcgataatgctaaacaccacataggcaaggatgctgttgtgaagtttgatcttaaagacttcttccctagtattagctttgtgagagtccgcggactttttgagagtttagggtattcccgcgccatatctaccctgtttgccttgatctgcactgaggcccccagaaaagaagtggagttcaacgggaaaatctactatgttgccatgaaggagaggcaactgccccaaggggcctgcacctctcctactattactaatctactgtgtcgacggctggacgaaaagctcacccagctggcccgtgacaaaggctttacatactcacggtatgccgacgatctgaccctgagtgggaatggggacacattgcagcagattgggagcatcatgaactctatccgcaatatagtgtcgtttgagggcttcgtcgtgaacgaagaaaagactcgcgttcttcgtgccggtcgacggcaacgcgtcacaggaatagtagtgaacgaaaagaccaacctcacaagaaaggatattcgtagttttagggcactgttgcataacgtggagcagaaaggtttagaggaggaaaatcacaagaatcatccttacttctgggagtatatcaatgggtatgtttcttacgttcagatggtccggccggacatcggccagaaatttgccacccaggtgctcaggattgcggaaaaatacggcctccccatcagagtacatgccaagaagctgggctga

SEQ ID NO: 13562 - RNA, 1458 nt, synthetic construct
  source 1..1458: mol_type = other RNA
atgtctgaggactctaagcctttgacaagggcagagtggtatgaacggataaagcaggaggggaaatacgaaaccatccgatcggatatgctgaggttgggcttttatcaggaacccgaggtgagcccccagaagaaagagcagtggaagcaggaggacgaagcctaccaacagctgctccaagaattacaacaggtgcaactggaggccggaaaactgccaaaaatcaacgacctcctagcagaggcccggcaaaaacggattgcagccagcagacaaaagagggtcgaacgaaaggccgtgagacttaaagaaaaggaggagcagcaggcgcactggcagcagtacaaggcagaccacataattcatttgggaaggggggtttcagctggcctgcagcagcaggaaactgatgaaacacagctcaataagctggggctccccgtcctgacaagctcgaaacaaattgccacccaaattggcctctccctctcagagctgaagtggctgacgtaccaccgtaacaccgcgactattagccactaccatcatttcaccatcccgaaaaagaacggtgaaaagagagttatcagctctccaaaacctcttctcagaatcgcccagagttggatcaaagaggctattctggaccatattgatgtgtccccacatgctttgggtttcttaccacagaaaaatatcatggacaatgcaagacctcacgtaaaaaaagacctgatcgcaaagatggacttgaaggatttttttcccaccataaccttctggcgcgtccgcgggctgttccagtcttttggatattctgaggccattagtactcttctcgccctggtttgtacagagcccccccgcaaaaaggtgagctttgctggcaaggtatatcatgtggcgcttggggaaaggcagctaccacagggagcgtgcacctccccttccctcacgaacatcatctgccgtcggctggattcccgcatgaacggcttggccgacagtctgaatatgacctatactcgctatgccgatgatctgaccttctccggcactaaggtgaagaaccaccacattcggacactgttaagtaagtctagatcaattatcaccttcgaaggatttcacattaacgaagagaagacaaggatccttcgagccacacagcggcagaaagtaactggcatcgtggtcaataagaaactgaacataagcaggcaggagctacgttcattcagggctctgctccacaatgttaaacgctcaggccttgtcgaagagaatcgggaccagcatccgtacttctggggatacatcataggttacgctgggtacatcagaatggtgcgacctgatttaactcagagaattgctagcgagctgatcgagatagcacaaaagtatcagcaagaaattcctgcttgggtgcaccagacgtccaagagtgagtga

SEQ ID NO: 13563 - RNA, 1455 nt, synthetic construct
  source 1..1455: mol_type = other RNA
atgactgaggagcagaaccaggaagaggttaaacaactgacacgcgaagagtggatcgagcgcattaaatcagaaggacgaaccgaggccatcaaaaaggagatgctgagactgggcttctggatagaaaaacccctcacaccagaagaaaaaagagagcaggcggaagatgagctcaaactgaaacaactgcaggccgagctccaggagctgcaaaaagaatctgccaagatctcgaatttgaacaaaatcctgaagcaggcacgcgctaagcggattgaagagtcgaagaagaagcgagctgatcggaaggccgccattgagaagcgcgaagctgacaggaaagcccgctggcaggactataaggaatcccacatagtacatgttggcgacggcctctccgccgggctacaaagttttgaaacggacgagaaaaagcttatggaacagcgactgcccctcattaggagcgctgtgcagtgcgcggatgaaatgggaatcaccctatctcagttgaagtggctgacataccatagagacaccgcgaccatcaaccactattatagatttacaatccccaagaagaacggcggggagcgagagatatcatccccaaagcccttacttcggcaggcacaggcatggatcaaagctcacatcctggaccaaattcaagttcattccgctgcctacggattcgtgccgcagattaacaccgtcgacaacgcgaagcagcacgtgaatcaggccgccgtcatcaaaatggatctgaaggactttttccctagcattactttctggcgcgtccgtgggctctttcatagcttcgggtactccgaggctatatccacactgttcgcatgtttatgtaccgagccgcctcggaaagaggctagctttaatggtaaaatttaccacgtggcccttggcgagaggcagcttccacagggggcatgcacgtcaccatctataactaacatcctgtgccggcgtttagatgaaaggctgacaggccttgcccagactaatggattcatctacaccaggtacgctgatgacctgacttttagctgtcaagaaagtagcttgtcaaagattggaaccttgttgaatagtgtgcgcaacattgttaagtttgaaggttttaccgtgaatgaggagaagaccagagtgctcagggccagccgaaggcaaagagtgactggtatcgtggtcaacgaaaaacctaaccttacaaggcaggatttgaggcgtttcagagcactcctgcacaatgtggaaaagaatggtctagaggcagagaaccggtctaatcatcccaatttctgggcctatatccaggggactacgagttacattagaatggtgcggcctgagctgggcgagaaactgggcgagcaggtagaacggattgctatcaagtatcacctcgcaggatctgtcgtatctaagtga

SEQ ID NO: 13564 - RNA, 1458 nt, synthetic construct
  source 1..1458: mol_type = other RNA
atgcaaggaaagaacgacggcgaggtccagcccctgtcaagggaggagtggcttgaaagggtaatgcaggaaggccgtgacgaggtcatcaggcgtgaaatgatccgaatggggttctggtccgaggaaccgttacctccagaggagctggagaaacagaaacaggaggaaaaagagcttgcccagctcaaggaagagctggaatccctggaggaaaaaactagaaaattgggagacttagaagccatgatccggcgccgacggcaggagagaattgaagagtctagaaggaggagagctcagagaaaggaggagagaattcgtcgccgggccgaggctcaagccaaatggaaagaataccgagagcagcacgtggttcatgttggcgagggatttagtggcgatctggagcttctgaattccgatgaggaaaggctccgggaaagcggtctgcccttgattcataccccccaggaactggccgaagccatggagatccccttgggccggctgaaatggcttacgtaccaccgggataccgccacaattagccattatcaccatttcactatcccgaagaagaacggtggcaagcggattctcagcgccccaaagaagcacctccgccaggctcaggagtggattagggctcacctgttgaatcgagtcgaggttcacccatgtgcctatggattcgtgaggggaaagtcaatagtagataacgctgcgcaccatgtggggaaggcagcggtcatcaagatggacctgaaggatttttttccttctgtacattatccgcgagtcaagggcatgtatcagtcttttggctactcacccgcagtgagcaccctgcttgctttactgtgcacggaacctcccaggaggaaggtggaatttgacgggcgcatctatcacgtcgctgtgggcgacagacatctaccacaaggggcgccaacctcgcctgccattacaaatattctctgccgcagattggacgaacgcctactggggctggccgactctcacggtttcgcatacaccagatacgctgatgatctcactttcagttgttggcctagcggagaaaaacggattggcgccctactcggaactgcccgcggtatcgtgaggtacgagggttttgaggtgaatgaggaaaagacaagagtgctccggagatcccgccggcaagcagttacagggatcatagtgaatgagaagaccaacttgaatcgtggagaactgcgggcattccgagccctgctgcatcaggttgaacaaaaaggccttaaagggcagaacatacacaaccaccctaacttctgggagtatataaaaggctacacatcctacatcgagatggtgcgcggagaggctgcagctccatacagagaacaggtgaagaggatcgcacgcaaatatgggctcgaccccaaggtcgcaagtgatcacgcgtga

SEQ ID NO: 13565 - RNA, 1455 nt, synthetic construct
  source 1..1455: mol_type = other RNA
atgagtgaagagaaacggccacttacacgggaagaatggatccagaaggtgtcggccaacgggagggaggctacgattcgcgaggaaatgatcagaatggggttctggagcaacgacagtttaacagaggaggagaagaaacagcagcaggcagaggatgaagagcgagccagactcgcagccgagctgcaaaggcttcagagcaaaggaatgtcaatgccgaaggtgcaacagctgctccaggaagtccgtcagaaacgcattgaggcctcccgcaaacgaagagaggagcagaaggcagagagggagcaaaagcgccgggaagccaaggcggcttgggaacagcacagggctcgccacgtagtgtacgcaggcgaaggcgtgtccggcggacttgagaataaggaaacgcagaccgagatgttgcggcaggccggactccccatcgtgactacagctgaagaattggcagaggccattggtatcagcgtgagcaagctcaaatggttaacgtatcataggaatactgccactctgtctcattactttaggttcactattcccaaacaaaacggtgaggagagagaaatcagtgcacctaagcagaccctgcgccaagcgcaggcgtggattaagacccacctcctggacaggctacctgtccactctgccgcccaagggtttgtccccggcaaatccattgtggacaacgcaaagcagcacgttgggcaagccgctgtaatcaagatggatctcagggatttcttccccagcatccacttctatcgggtgcgcggtctgttccagtcatttggttactccgaaatgatcagcacattgcttgctctgctgtgtaccgagccacctagaagagccgtcacactcgggggaagggtctatcatgttgcaataggagaacggcagctgcctcaaggcgcttgcacttccccagcaatcaccaacctgctgtgtagacggcttgacgaaaggttgtctggtctggcacagaagtacggctttcagtactcacgctatgccgatgatatgaccttttcatgcagtgaggctgggattggacaaataggcgcggtaatcaatcaggttagacgcatagtggctttcgaagggtttaccgtcaatgaagacaagacacgtgtcttaaagcgaaccaatcgtcagacagttactgggattgtagtgaatgagaagatcaacgttaaccggcgagagtggaaacagttcagagccctgctgcataatgtggagaagaatggactagaggccgagaacaggaagggccacccgcactactgggattatattaaaggctacgctaactttgtgcgaatggttcgtcccgacctggaagagaaactcatccgacagcttcgggccatagccgtgaaacatcggttgtctctgccaggctgggctagaaaaaccgtgcagtcttga

SEQ ID NO: 13566 - RNA, 1470 nt, synthetic construct
  source 1..1470: mol_type = other RNA
atgagtgacgagcgcatggaagaaaaacggccacggacgctggaagagtgggtagagcaggtgaggaggcttggccgggaacacgccatcaggaccgagatgatacggcttgggatgtgggaagaaaaagagttgacccccgaggaaaaagcccaacagcaacgcgaagacgctgagtatcaaaagctggcagaggaatcgatgcggctgcagcgcgaactgacaaagctgggcaatctccagcacttattggcggaggcaaggaagaaaagaatcgaggaatctcggagacgccgcgaggagcgtaagaaagaaatcgccaagagagaagcagaacgcaaacgacgctgggctgagcacctggaaatgcacattgtccacgctggcgctggtgttagtgggggtctgaacgccttcgagcaccaggaggaaaagttgatggcagccggcttgcctctgatcaggtctgcccgtgagctcgcagagctaatggatatgccaatatcaaggttgagatggcttacttatcaccggaacgccgctacggtgtgtcattaccacaggttcacagtccccaagaggggaggggggttgcgagagattagctcacctaaaccagaactgcgccgagcccaggaatggatcaagcgggagatcctcgatcggttccccgtgcattcagctgctaccggctttctccctggcaagagcgtgctggacaatgccgcaccgcatctgggacaagccgccgttattaaactcgatcttaaagacttcttccctggcattaccttccatcgtgtgaagggactgtttcgctccttcggatattccgaggccatagccaccctgttagcattactgactaccgagcccccaagaaggcccgttgagtttgacggcaaaatgtaccatgtagctctgggggaacggcagctaccacagggtgcctgcacctccccagcaatcactaatctcttgtgcaggaagctggatgccaggctcgaagggcttgctcgaaagcacggctttcggtacagcaggtatgccgacgacctcacatttagctgtccggccgaacgcaccgatgcgatccctgtcctgctgggcactgccagagccgtgatccgccacgagggatttgaggtgaacgctgaaaaaacaagagtgttacggtccagtactcgacagcaagtgacaggagtagttgtgaacgagaagcccaacatctctagaaatgagctgcggcgattcagagcaattctacatagagtgtggcagaatggtccggaggctgagaacagggacggacatccccgtttttgggagttcatacaggggtacgcggcgtggattagaatggttagacctgatcttgaggggaagctcgcagtccagctcgctcgaattgctgagaaacatcgtctgcctgtggcgggatgggtcaaggaaacagcagtcagaggttga

SEQ ID NO: 13567 - RNA, 1395 nt, synthetic construct
  source 1..1395: mol_type = other RNA
atgaatgaggacgagaaggcccgattgtaccgggaagtcaccagatctgcctctgagtcagctgtgctccggcgtatgcatgccctggggttttggccgcacggcgaaggactaccccctgatccaccagaagagcatgccgagcgcgccaggattgaggcagagctcgctgacctcaggagaacacatgcaagagtggaagatcccgaagccgctctcgtagaggaacgcagacggcggtgggaggaatccaaagcaagaagagctgaggcacgggctaggcgcttgcaggaacagcaggtccgtagagaggagtgggatcgccaccgttcctcaaccatggtacacgcggggataggcgtgtcagcggggcttcaggacgctcgaagtgacgaagaggccctgagtaggcgcgggttgcctgtgctacaccgagctgaagatctggccggacagatcggaatagagctcggtgccttacggtggctgacgtatcaccgcaggagcgcgtccgttgtgcattatcatcgttacgaaatcgcaaagaagaccgggggcgttaggtgtattagcgcccccaaaccagcacttgcattcgcacagcggtgggtgttcgaccagatcttgcggcggttagatcccgagccacaggcccatggtttcgttccggggagatctattgtcactaacgcatcgacccatgccggccgagcagtggtagtcaacttggacatgaaggattttttcccctctgtcacatttcgccgtgtcaaaggtctgtttcgagctattggttacagcgagcatctggcaaccgtactggcgcttctatgcacagagccccctcgcgttccagccactctggatggcaagacaactcacatcgctctgggcgaccgcgttctccctcaaggagcttgtactagtcctagcattaccaacgctctttgcaggaggctcgaccgacgactggatggcctcgctcggagacacgggttcacatatacaaggtacgccgatgacctgaccttctcaggtgacaggccagcggtggttggacggcttctccgttctgtgagatccatccttgccgccgaaggattcgtcgaacacccaagcaaaacgcggatcatgcggagaggaggaaggcaggaagtgactggcgtgactgtgaatgacagacccaatgtgtccagacgagaattgaggacgctgagggccatcctgcacaatgccgctcgcctggggctggagagccaaaaccgggaggatcaccccgattttgccagtcacctgcgcggcagagtggagtttgcttgcatggtggaccctagcagggccggcacctatagggacgcactgtcccgcgccttacaaggccctggagcaccgtga

SEQ ID NO: 13568 - RNA, 1395 nt, synthetic construct
  source 1..1395: mol_type = other RNA
atgaaccaggatgagaaggccagactgtatcggcgggtacgacacttagcctctgattctgtagtcctgaggcggatgcagacactgggtttttggccgaaaggggagggcctaccccctgatccacccgaagaagccgctgagcgcgcacgaatcgaagctgaacttgccgacttgagacagaaatttgctaaggtgagcgaccccgaagctgccttagcggaagaacgcagacggaggtgggaggcctcaaaggcaaggagattggaggcaaagcggaggagggctgaagagcagcgtaacaggcgagccggctgggatcaaacaagatccgccacagtggttcacgctggtattggagttagcgcggggctgcagggacgccaatctgatagtgaggctttacgccggaggggactgccgatccttcatcaggccgaggacctggccgatcgcattggcatcgagcttaaagcactgaggtggctcacctaccatagacggggggccacagtcgtgcattatcgtcgatacgaaatcgctaaaaagagcgggggcgtccggtgtatttccgctcctaagccagctttggcctgggcgcagaggtggatcctggacgagattcttcggcgcttggagcctgagcctcaggctcacggctttgtgtccggtagatccatagtcagcaatgcggagccacactccgggaaagccgtggtgattaatctggacgtcaaagaattcttcccaactataacttttcgcagagtgaagggcctcttcggatcattgggatacggagagcatatcgctaccgtcctggcactcctgtgtacggagccaccacgcgttgccgcaactctggacggtaagacatatcacgtggctctcggggaccgtgttctgccccaaggcgcatgcaccagtcccgctctgactaatgcaatttgccggagcctcgatcgcaggcttgatggactggccagacggcatggttttacttacacgagatatgccgatgacctcaccttctcaggaaatcgtacggctgcctctggtagattgctgaggagtgtgcggataatcctagtagatgaaggactcattgagcaccccaccaagacccgagtgatgcgaagaggcggccgacaagaggtgaccggcctgactgtcaacgacaggcctgcggtgagcagagaggagctacgcacccttcgcgccatcctccatagcgcctcacggtttgggctggacagtcagaaccgcgacggccaccctgatttcgcatcccacctccgtgggcgggtggaattcgcatgcatggttgacccttcgcgaacaccagcactcagggaagcactggacagagccttaagggggccctcgggctcttga

SEQ ID NO: 13569 - RNA, 2343 nt, synthetic construct
  source 1..2343: mol_type = other RNA
atgtctgacaacgaaaaggcccaactctataagaggctcattcaacagacgaacgactggtttgtgcttgagcgaatgcgcgagctgggcttctggcccgaggatcagccattgccaaccgtgccgcaggaggaagctgtggaacgtaccgaactagaggctgagatcgctaagctgagacaacagaatagcaaagtagcaaatcctgaggccgctttagccgaggaacgcaaacggcgttgggaggcctcaaaagcccgtcgtgcggaggctaaaatacagaaagaaaaggaaaggcaggcccgaagagaagctcatgaggcacataaggagactaccattgtgcatgccgggcttggggttagcggcggtctacaaggtactgggtcaaatccagtcgctctgaagtcccgatggttacccgtcctccacagggctgaagaactcgccgccgagatgggcatcgaactcaacaccctacgctggctgacctaccataggaggggggcggcagtcgtgcactaccatcgctacgaactgcctaaaaaaacaggtgggagcagagccatctccgcacctaaggcggctctggatcaggctcaacgatggatcctggtgaatatcctgaacaggctgaacgttgagagccaagctcatggctttgtctccggacggagtattgtcacgaacgcaactgagcacgttggcagggaagtagtgataaacctggacttaaaggactttttccccaccattacatttcgacgagtaaaggggctttttgtcgccttgggctacggcgagcacattgccacagtcctgggactgctgtgtaccgaaccaccccgcgttgcagctgaattcgcggggacaacttaccacgtcgccttgggggacagggtccttccgcaaggagcgtgtacgagccccgcgatcacaaacgctatctgccggcggctggatagaaggttagccggattggccaagaagcacgggttcaactatactcggtatgcagacgacctgacattctccggcgatgcaccacgaagggtgggcagattgctgaaatccgtgagagcaatcctagtggacgaggggctcactgaacacccaagtaagacccggataatgcgcaagtcttctcgacaggaggttacgggtgtgacagtgaacgaaaaaccatccctgtcacgcatggaattccgcaagctcagagcaattctgcacaatgccgccaaattcggcctcgagagtcagaatcacgagcagcaccccaattttgaaaaccatctcagaggaaaagtggcctttgcagctatggtcgaccctagcaaaagcgcggcactttgggacgcctttcacaaggcaatcactgaaccccagatgacattctccagtgtgcaggagggctcagtggatgacaggcggaggggaacgctgattggcctggcagtaggtgatgccctgggggctgccgttgagttcaaacctcctggaacctttgagcctgtgaccaattatagagctggagggccccaccgcttaaaccccggagagtggacagatgatacaagtatggccctcgcacttgctgactctattgctaaggcaggctgggatctggacgatcaggccagacggtattgcgattggtggcgggatggcaagtactccgtgaatgggcgctgtttcgacataggtattacttgccgctcttcacttggtcagtttcatctcaccggagatgcgagaaaagccgcaagcaccgacgagtactcaagcggcaacgggagtattatgcggctggccccagtgagcatccagttcgcttccctgttcccggacagaatcgatgaattggcacacctagctgaagaatcctctctcactacccatgcgagtgcacagtgcttgtccgcttgccgctacttcgccctgattttggcaggactgatctcgggccggtctagagaggaggttctgtctcctgattgggagcctctttcgcagcttcgggagctcaagccccttgccgagcctgtagaggatgtggccctcggctcttttaggcggctcaatccgcccgagatcaagggaagcggctatgtagtgaagtcattggaagcagctctctgggcttttcatgacgcccgggacttcgaagaggccgttctgaaagccgtcaatttgggagacgacgctgacactaccggcgccgtgtgtggtcagttagcgggtgcctactggggcgagagcggaatcccagcccgttggagaaattatctggccaggacagatttgctggaggctgccctgaaaggaatgatagaaaaggattga

SEQ ID NO: 13570 - RNA, 1386 nt, synthetic construct
  source 1..1386: mol_type = other RNA
atggctacagaccataaggccgctctgtaccggaggctggtgcgagaggcatctgatgctgccgccattgagaggatgagggtaaatggcttctggccatggggccaaggtatccctagggatccgccagacgaactgaaggagagagcccaaatcgaggccgagatagcgaagatacaggctcagtctaccaagtccgtggacccagacaaggcccttgctcaagagaggaaacggcggtgggaggagagcaagaaacgacgcgccgccaagcgcttagagagggctagcctcctaaagaagcgtagagacgattttatccggtatcggaaagcaaacgtcctgcatcttggcgtgggggtgtcagcgggcttacaggacactcggccagataccggagagttaactcgccgggggctccccagcctgactaatggatccgatctcgctatgatgatgggagtcccgctggcttcactgcggtggctgtgttttcacagacgcggggcagccctaatgcattatcatcgtttcggcatacccaaaaagtcgggaggtaccagatcaatttcagcaccaaaaccccgacttgccaacgcccagcgatgggttctgcagaatattctcgagcgtctcgacaccgctcctcctgcacacggatttgtgaggcatagaagcattctcacaaatgccacaccgcacgcgagaagggcagtcgtgatgaacttcgacctcaaagactttttcccctctatcacctttaggagggtgaaaggactgttccgtaagctggggtacaacgaacacgtagcgacgatcctcgggttgctgtgcactgaaccccctcgggccagggtggaagttgatgggcgcgtcatttatcttgccctgggcgatcgcgtactgcctcagggtgcttgtacaagtccagctatcacaaacgcactgtgcaaacgcctggatgcccggttgctggctttggctagtcgccatggcttcacttacacccgctacgccgacgatcttacattcagcggcgatgacggtgccttggtggggagactgagacgctccgtggtttccgtcgtcagtagcgaaggatttacagaaaacaccgctaagaccaggatcatgagacaaggtagtcgtcaggaagttactggcctcacggtgaatgaccgacctactatgcctcgcgacgagttccggcagttgcgagccatgctacacaatgcagcaaaacacgggctcgaatcccagaacagaacccagcaccccgcctttgcacagcacttggcgggacgagtggaattcgcatgctgggcggatcccacgagagctgagaagctgagatctgcccttgccgccgcattagcacggggctga

SEQ ID NO: 13571 - RNA, 1386 nt, synthetic construct
  source 1..1386: mol_type = other RNA
atgccagacaatgaaaaagcgcggctctataagcggattgtgcagcagaccaatgagcacacacttctggagcgtatgagaatccatggcttttggcccgccagagagggtctgcctcaaggacctgccgaggaagcagctgagcggacaaggatcgaggccgagctcgccgaactgagaaaggcccactcagccgtgaagaatccagaaaaggctctggcagacgagaggaaacgaagatgggaagagtccaaaaagcggagagccgctaacaaagccaagcgcgaagaggaggccaagcaacgccgggaagcatgggcagctgtgcgccaagaaagcgtggtgcatgctggggccggggtatcagatcggctgcaccagacaaccagcgacgtcgcagagctcacccgaaggcacctgcccattctgcaccaaagtgcagatgttgcgaagcagctgggaataggactcccggccctcaggtggctaacgtaccataggcgcggcgccactctggtacactaccaccgatactccatagctaagaagaccggcggagctagatgcatttcggcccccaaaccagccctcgccaaagctcagcattgggtgctggaaaacatcttagacagattagacgtggaccctgccgctcatgggtttatcagaggctgcagtattgtttctaacgcaatcccccacgcaaatagaggcgtggtggtaaaccttgacatgaaagacttcttcccctcaataaccttcaggcgcgtgcagggattgtttcgtaaactgggctactccggacatgtggctactctgttggccctcttgtgcacagaacctccccggattgctaccgagctagatgggaaggtctatcacgttgcacttggtgagcggatccttcctcagggagcctgtacgagccctgctatcaccaacgctctctgtcgtcggctggatagacgcctcgatggtttggcgcgaaagaatggctgcgcctatacccggtacgctgatgatctgacattctctggcgatgacccaggggtagtcggacacgtcctgcgaaacgttaggtatattctgaaaggcgaaggctttgtcccgcatcctaacaagactcgcgtgatgcagagggccagccgacaggaggtgacaggtgttactgtcaatgttcgtccaactctagcccgccaggaaatgaggactcttagggccatcttacataacgccgcgaaacacgggttagagtctcagaatcgcgacggtcggccaaatttcgccgcttacttgcgcgggagagtggcatttgcatgtatggtcgatcccacgagggcggaggctcttagagcggcattggctctggcactgaggccggtgtga

SEQ ID NO: 13572 - RNA, 1383 nt, synthetic construct
  source 1..1383: mol_type = other RNA
atggccaacgacgagaaagcccagctctacagaaggatagtccagcagaactcagaacagcagctgctcgagcgcatgaggattcatggtttttggcctcagagagcggggttgcctcaagacccaccagccgaagccgcagagcgagctagaatcgaagccgagttggaggagttgcgccggacccaatccgccgtgaagaacccggagtcggccctacatgcagaacgtaagcgccggtgggaagagtctaaaaaacgcagggccgagagaaaggctcagaaactccaagaacagcataaacgcagagaggcatacgaagcactgcgacagactacaattgttcacgctggcgctggtgtgagcggacgactgcaagagacgatcagtaatgaggccgaattacgcaggcgtcagctgccggtgctccacattgcagcagatctggctagagaaatggggatgcccctttctaaactgcggtggctcacataccatcgacgaagcgccacgctggtgcattaccaccgttatgagatcgagaagaagacaggaggcgttaggtgtatctctgctcctcgccccgcccttaagcaagcccagggatgggtgttagagcacattctgggtaaattgactgtggaaccacaagcccacggcttcgtaccagggcggagcatcgttaccaatgcactgccccacgtcggaagagcggcagtgattaatctagatctcaaggacttctttccgaccataacctttaggagagtgcagggcctgttccggaagctgggttattccggtcatctggccactctcctggctctgctttgtaccgaaccccctcgtgtccccgctgagttagatgataaggtatatcacgtcgcacttgggcagcgggttctgccacagggagcatgcacttcacctgccataactaacgctctgtgcagacggttggaccgccgcttggacgcacttgctcggaggcacggcttcgcgtacacgagatatgcggacgacctgacattgagtggcgataatacagaaatgatcggacatgtgctacggaacgttaggtatatcctcaaggccgaaggcttcacactgcatcccaccaaatcccggcttatgcggagaggccagaggcaggaagtaaccggagtgactgtgaacgtgaggccaggcgtgagtcggcaggaggtaagaaccctccgcgccattctgcacaatgccgcccgtcacgggcttgagagccagaatagggagaaacgacctaactttgctgcttacctcaaggggagggttgagtttgtgcgcatggtcgatccccaaagagggagagtcctgagggccgcgttacaggctgtcctgcgaggctga

SEQ ID NO: 13573 - RNA, 1413 nt, synthetic construct
  source 1..1413: mol_type = other RNA
atggctgacgatgaaaaggccaaactgtaccagcagattgtaagtcgcgccgacgagcagcggatagtggagcgaatgcgcctgcacggtttttggccggccgacaaacctcttcccaaggaccctcccgatgaagtacgagaacggcagcaggtcgaggccgagcttgctcacctgagaagagagcatagcacagttagagatcccgaaaaggctttggcgcaagagaggatccggcggtggcaggaatcaaaaaaaaggcgtgctgatagaaaggtacagaagctacaagagcaggtgcgcaggcgggaagcctggaagaaaaccagggacgccaacattgtgcatactggcgagggattttccgctggactgcagcagaagaactccgatgctgcagccttacaggcccgaggactccctgtggcaaacgatagcccagagctcgcgaacctgataggtatcaagctgagcaccctgagatggctgacatatcatcgcaagggagccaccgtggtgcactatcaccgctacagcatctctaagaaaactggcgggctgaggtatatatctgcgcctaaagccgcgttacgtcaggcccaggagtgggtcctgcagaatatcctcagccggctgccagtggagccacaagcccatggttttgtgctcgagcggtccgtggtgtccaatgcactgcctcacgtgaacaaaaacgtagtcatcaatctcgacctgaaagacttctttcccagtatcaccttccgccgtgtgaagggtttattcaggcaggttgggtacggggagcatgtcgcaacagtcctggctctcctgtgtacagagcctccgagggtcgcaactgaactcgacggcaaggtttatcacgtggctttgggacagagggttctaccacagggcgcatgcacgtcgcccgctattaccaacctgctttgcagacgtttggatcggaggcttgcgggactggctaagagacacgacttcgcctacacccgctacgcagacgatctcaccttctcaggcgagaatggcaaagctgtcggcaggctcctccgtagtgttaggtctattttaacttcagaggggtttgccgaacacccacgcaagaccaaagtcatgcgccgggccagcagacaggaagtaactggcttgacagttaacgtgcgccccactgtcagtaggaaggaagttcggcaactacgggcaattatccataatgtggcaagacacggtctggaatcccaaaatagatctgaccatcccgattttgaagggcacctgagaggcagagtgcaattcgtgcgaatggtggacccgcaacgaggggagccattgcttgcagctcttcatcgagccttggggacgtcagccggcgatggaacagccaatatttcttga

SEQ ID NO: 13574 - RNA, 1386 nt, synthetic construct
  source 1..1386: mol_type = other RNA
atgaatgagaaagctagactctaccagcgcatcacaagtgagatgaacgaggagacagtcctagcccgcatgcgaatgcatgggttttggcccgctagcgcgggtgtacctccagatccccctgaagaggtgaaagatcggcagcgcattgagaaggagatcgcaaggttggccggcgaaaggaagaaagctgccgaccctgagaaggcactcgctcaggagaggaatagacggatcgaggagtcacggaagagacgggccgagcttaaagagaagcgtgcggctgagagggaagcccgccaaaaggaatgggccgcttttcgagaacgttccgtcgttcacgctggcaccggtgttagcgccgggttggaaacccccggcaggtcttccctggaagagctcgtaaggaggggcctgcccatgatgcatgacgggcaggatttagctcgctggctgggcatcactataggcaagctgcgctggctgacgtatcaccgtaatgcagccgcacttgtgcactaccaccggtttgggataccaaagaaaagcggtggtatcagggctatttctgccccaaaagcttccctcgccgtggcccaaagatggatactgaccagaatcctctcacggttgacgcccgatgatgctgcccacggattcgttcatgggcgtagtattgtctccaatgccgccccacatgccggacgaagagtggtaattaacatggacatgaaggacttctttccgacagtgacttttaggagagttaaagggctgttccgccgtctgggatacaatgagccagtagcagtgctcctggccctgctttgtaccgaacctcccagagtcgcagcggaattgggcggcaaggcttatttcatcgccctgagcagtcgaaccttacctcagggggcctgcacctctccggctattaccaacgcagtgtgtcaccgccttgataggcggttaacaggcctggcagcgcgacacggcttcacgtatactagatacgccgacgatctaacattttcgggagatgacgcaacagcagttggacgccttctgagatctattcaatccatcgcaggtagcgagggattcgtgccccacccagaaaagactagggttatgcggagaggggagcggcaggaagtgactggcgtgaccgtgaacgacaaagtgggcgtgtcacggcgcgaagtccgagagctaagggccattttgtgcaacgctgctcgcctgggactcgccactcagaaccgggaggcccatcctgacttcgcaggatatttacgggggagagtcgcgtacgtggccatggtcgacccgtcaaagaagagcaaactggaagctgccctcgcacgagcactggaagcgaggacatga

SEQ ID NO: 13575 - RNA, 1386 nt, synthetic construct
  source 1..1386: mol_type = other RNA
atggacgagggtgagaagcgcaacctgtatcgcagaatcgtggcaagcgtaccggaggacatgctgctcgggcggatgcgtgtttacggttactggcctactggagtgccaatacccgcggatcccgccgacgaagtagcacagagaaaggaaatcgagcgcgaaatagcaaaactacaatctgctcatagcaccgccaaagatccagataaggctctcgctgaggagcgcaagagaagatgggacgaatccaaaaaacgccgagccgagaataagaagaaaagggaggcagagaacaaacagcgtcgtgaagcgtgggatatttaccgcaaaaaaactgtagttcatgccggcgaaggagtcagttcaggcctgcaggacgtgctctccgacacagacgccttagtcgctcgggggctgccagtcatgcactgtgccgcagatgtcgccgttatgttaggcctcccactgcccactctgagatggctgacttttcaccgccgggctaccgctctcgtccactatcacaggttcgatattcccaaaaagaccggcggacggagacttatcagcgcccccaaggccaccctaaaaaaagcccagcaggtcgtcctggataatatcctgagcaggctccccacagagcctgaagcgcacgggttcgtcgcacagcattctatagtgactaatgccgcttgccacgcaggaaaagccgtcgtgatcaatgtggatttgaaggattttttcccttcaatcggttttcggagggttaggggattattccagcggctgggatactccggtcaggtggcaacgatgcttggactgttgtgcaccgaacctccccgaattaaggctgaactggatggcaaagtgtttcatgtggcccttggagagcgagttcttccacaaggtgcctgtacgtccccagccattacaaatacaatttgcagaaggctggacagaaggctggtgggcctagcgagtaagcacgggttcacctatagtcgatacgcagacgacctgaccttctcagggaacgtaccgaagaaggctggccgattgttgcgctcggttcgggcaatccttgaaaacgaggggtttgctgagaacggcaagaagacacgggtgatgcgccaatcacggcggcaagaagtgaccgggctcacagtgaatgacaaacctagagtgtctagggaacagcgacgggagttacgcgccattcttcataacgccgctaagagcggcctggagtctcagaacagggagggccgtagtaattttgctagctatctgagggggagagtggcatacttgtccatggtggaacctgagagagcggccctcctcaaggccactctggagagggctttggccaagaggtga

SEQ ID NO: 13576 - RNA, 1383 nt, synthetic construct
  source 1..1383: mol_type = other RNA
atgtccgatgataaagccaaactttacaaactgatcaccagccagttgtcagaacatcaggtactctggagaatgcgcgagttgggcttttggccagagggacagccaattccggacgaaccactcgacgctcaggaggagagggccaaattgacaaaggaactggaacaactaagaaaacagggcgccaagatcgctaaccccgagaaagctctcgcacaagagcgtatcaggcggtggcaggagtcaaagaagcgccgcgccatcgcaaaggccgaaagagccgcgtctgctaaagagagaagcgagaagtggaaagctcacaaagcggttgcactagttcacgccggggaagagcacagcgcaggcttacaagatcgggagtctgatgctgccaaactagcttccaggagcctgccagtgctgcatgatgctcctgatctcgctaaggccatggggatagaactgtcagcactgcgctggctgacttatcacagacgcgctgcagcactcgtacactaccaccggtacaccattccaaagaaagcgggtggaacgagagctatcagtgctcccaagcctgcacttgctaaggcacaagagtgggtcctgggagcaattctggatcggctggtgcctgaacccgaagcacatggctttgtggccgagcactctgtgctgactaatgccgcccctcatgccaagaagaagatagtcgtcaacctggacctgcgtgacttttttccctctctggggtttcgtcgggttaaaggcctgttccggaaactgggatacagtgaacacattgccacattactctcgcttctgtgcaccgaacctccaagggtggaggctgagctcgacggaaaggtgtggcacgtcgccttgggagagagagtgctacctcagggtgcctgtacctcccccgcgatcaccaatgccgtgtgcaggaggcttgaccggcgattgagaggactcgcaggccgccatggtttcgcctatactcggtatgcggatgaccttacattcagtggggacgataggaagaaggtggccagactgcttaaaagcgtgagggccatcctgcagagcgagggcttcgttgaacacccgaggaagactcgggttatgggctccgggtcccgacaggaggtaacaggcctgacggtgaacgcaggcgtgaagcttgggcgcggggataagcgccgattgcgagcaattctccacaatgccgctaagcatggtttagcgtctcagaaccgccgtgaccatagagacttcgccgcccatctcgctggtctggtcagttatgccagcatggtcgaacccgagcgagcggcagactggaaagctcggttggacagggccttatcatcgtcctga

SEQ ID NO: 13577 - RNA, 1386 nt, synthetic construct
  source 1..1386: mol_type = other RNA
atggcagatgacgagaaggccaggctctacaaacgactcactaccacttggaatgaatttgaagtgctggcgagactgcggcataacggtttctggcccgctggggtagggataccccaagacccaccaaaggagctgaaggagcgggcaacgcttaccaaagaactggcctcattgagggcctctcagctggccgtgaaagatccagagaaagccctctcagaggagaggaccaggcgctttaaggcaagcttagagcggcgaaaagctgcccgcgccagacgtctggctgatgagaaaacaagaagggaacggtggttgaaggcacgcaaggatagcgtggtgaacttaggtgagggcgttagcgccggcctgcaggatgtgtcttgcgacaaggctcagctccaagctcgcggactgcccgttctgggcgatgctgtagccctggcaggagccctaggggtgaaactgtctgtgctgaggtggctaacctttcacagaaggggcgcgacgttggttcattatcaccggtatgccatccccaagaaaaccggagggcagagggcaattagtgctccgcgcaggaagcttgctggctgccagtgttgggtactgacacaggtcctggaaaaactgcacgctgagcctccggcccacggctttgttcggcatcggtcagtcgtgactaatgccaccccccacgttgggcggagagtcgttgtaaatctcgacttgcgagatttctttccaagtgtcaccttcaggcgagtgaaaggactgttcagaaaggtggggtacggagaacaggtcgccacagtccttgccctcctctgtactgagccccccagggtcccagtgacttttgacgataagaggttctacgtcgcccttggtcaacgagtcctcccccagggagcttccacttcccctgcaatcaccaatgctctgtgcagacgtctcgaccggcgccttcaaggcttagcgagacgccacgggttcacgtatacaagatacgccgatgatctgacattctctggcgacgaaccaccaagagttggccgacttctaaagtcggtgaaggctgtggtggttgacgaggggtttcaggtgcatcctaccaagacacgagtgatgcgttccacacgccggcaggaagtgaccggagtcgtagtgaaccacagggtcggcgtgcctagagacgaattacgggccttgcgtgcaactctgcacaactgcgcaagacatggattgcagagtcagaaccgggaacatcacgccgacttcgccgcacatctgcgcggtaaagtaagctgggtgtgtatggtggaccctgctagaggtcctgcgcttcgcgcagctttggagcgtgcactcgcgtccccttga

SEQ ID NO: 13578 - RNA, 1386 nt, synthetic construct
  source 1..1386: mol_type = other RNA
atggcttatgatgacaaagcacgcctgtataggcgtttggtcaccgggacttccgatgcgactgttctggcgaggatgcgcctgcatgggttctggccacttggcagagggttacccgctgacccaccagatgaactgaagaagcgcctggatttggagcagaagctggttattttgcgggatgccgaagtggtggccacccagtctcctgagaaactgctggaggccgaacggaaaagacgctgggccgctctaaaacaacggcgagccgaaaagaaagccgcccgggctaaagcagtgcaggcacgacgagacgcctttgccaagctcaggaggtccagtgtcttgcacgccggaatcggtgtgagcaagctcttgaacgatactaagagcgaccatgccgcgttaagggcacgagggctgccggtattagacgctggccccgatttggctatgatgctgggcattccactgggggtgcttagatggttgacgttccaccggaggggcgccacactggttcactaccatcggttcagcctccctaagaagaccggaggccagagagcaatctcagcaccaaaacctcgcctgaaaacagcacaggcttgggtcggacaaaacgtgctaggtccgttagctctcagccctcacgcgcacggatttgtgcctggacggtcgaccgtgaccaatgcggctctacatgtggggaagaaggttgtcgtgaacctcgatgtacgggacttttttcccacattcggctttagacgggtgagaggtctttttcggcaccttggctacagtgggcaagtagcaacgcttctggcactgctttgtacggagcccccaaggcttgaggcctcagtcgatggaacacgcgtgtgggtggctctcggtcacagagtgctgcctcagggcgcctctacttctcccgcgctcaccaatctcctctgccaccgtttggaccagcgactcgccggattagcacgtcgccacggtttcgctttcagtagatatgctgacgacctgactttcagcggtgatcatcccgaacgcctgggaaggctactcaagtctgccagagccatactggcagccgagggactggtagaacatccggacaaaactaaagtcatgagggcatcacagcaacaggaggtgacagggatcgtcgttaatacacagctgggcctgcctcgtgacaccatgaggaggctgcgcgcaacccttcataattgcgcccgacacggcctcgactcccagaacagagagggacatcccaacttccggggctacctggagggcatggttgcttacgcctccatggtcaatccagaaaaggctgcccccctcagagctgccctgacactagccctgggcgggtga

SEQ ID NO: 13579 - RNA, 1392 nt, synthetic construct
  source 1..1392: mol_type = other RNA
atgtcagatactaaggatgaccccctcaaaaagctgaaagctcaactatcagccttgccagacgccaccgtacgtgagcggatgattgcactgggcttctggcctccaggggaacctttgcccgccgatcctatcgacgaggccaatgccagagccgctctcgaaagtggtcgcgctcggcttctagcacaggcaggcacagctgagaaccccgaaaaagcgttgcgaagggaacgcatcaggcggcttcgagagtcccagaagcggcgcacgttacgtaagctggagcgagagaatgagaagaaagccagacgggcggcctgggatgcagaaaaggcgggtcgcatcgtggatgcaggggaaggtgtcagcgcagggctcgctcagaccggatctaacgctgatcagctgaccggactagggcttccggttgtccacgacgccagcgaactggcggagagattgggcctgagtctgagccagctcaggttcctgacctatcatcggcgcggcgcaactctggtgcactatcacagattcggcattccaaagaaaactggagggatacgggccatctcggctccgaagccagctcttgcgagagcccagagatgggtgttggctcaagtactggacaagctggaagttcgagccccagcccacgggttcgtccgacataggtcaatagtgactaacgcagctccccatgtgggaaggcgtgtggtcctcaacctcgatttggagtccttctttcccaccgtgggcttccgtagggtgaaagggctgttcaggaagctgggatacgccgaacaagtggccacactgctcgctctgctgtgtacagaacctccacgcgttgaggcccggttggacggaaaaagactgtggatcgctttaggacagcgagtattaccgcagggtgcatgcacctcccccgccattacaaatgccatttgccgaagacttgacgcacgcctgtctggactggcgaagcactttggctttacctacaccagatatgcagacgatcttactttttctggcgatgaccgcggcagagtgggtaggttactcgggtgtgtcaggaaagtcgtgacatccgaggggtttagggagcacggggacaagacgcatgttatgggcagcggccggagacaggaagtgactggagtggtggtaaatcaaaaactctctacagccagggatgagaggagagcactacgggctatgctccataacgtcgcccggcgcggcttagctgctgagaatcgggacggccacgccgacttcgccagttacctgcgcggaagggttgcatttgcctgcatggtggaccctagcctcgagcctgttcttcgtcccgctctggatcgcgcactggccagaggttga

SEQ ID NO: 13580 - RNA, 1407 nt, synthetic construct
  source 1..1407: mol_type = other RNA
atgtccgatgagaaagacccacagaaagcagccctcgtcaaggctgtactggcaagtttagacgatgccaccgctctgagcagaatgaagacgctcggcttctggcctgttcatgagcccgtgcccggagatccaccaggcgaaattgtggagcgggccgagctagacgccgaattggcaactctggtcaaaatcgcttccgatggcgaaaagccagagaaagctctgcagcgagagaggataagacggtggaaggagagcagggaaagaagaaaggcgaaaaaggcagagagaattgcagaggccaaacagcgagctgacgcctggcgagctcaaagagctgagaggctggtctacgccggtctgggggtgtctgcaggtctgcacgacgtggagtcagatgtggccactctggaagcttgcggcctcccaatctggcgtgatgcgcgagatgtggctagtgccctgggaatctctatagcgaaactgcgttggttgacctttcaccgcaggggggctacactggtgcattatcaccggtacggcatacctaagaagacaggcgggattcgggctatcagtgcaccaaaacccgctctggctgaagcgcaacagaatgtacagagccttgtcctgcagcgcatcgccccttccgatgaagcacacggcttcgttcgtgagaggtcagtggtgtcaaacgccagaccgcatgttggacgggccgtggtggtgaatctggaccttagagacttttttcccacaattagtttcaggagagtgaaggggctcttcgccaagctcggctactccgagcaagtggctaccgttttggccctgctgtgcactgaaccgcccagagtccctgcagaactagacggacagcgttatcacgtcgccttaggcgcacgggtactccctcagggggcatgtacttcacccgccattaccaacctgatctgtcgtcggcttgacgcccgccttcgaggtatcgcacgagccttaggcttcacctatactcggtacgccgacgacttgacgtttagcggggacgatcctacaaagctcgcctctctgtttgggatggtgcgcaaggtaattgcctcggagggtttcgcagagcatgaagggaaaacccgcgtaatgcggaggggtgcgagacaggaggtcacaggagtggtcgttaacagggcagtccgcctccctcgggatgaaaagcgcgctctaagggccctcctctacaattgcgcgagatttggaatggagagccaaaaccgcgacggtaggccgtctttcgcgagctatttgaggggcagggtggcctgggccgttatggttgaacccgctttgggaccccgcttattcccagcccttgagcgcgctcttgaaggacggcggtccgatctgtga

SEQ ID NO: 13581 - RNA, 1404 nt, synthetic construct
  source 1..1404: mol_type = other RNA
atgccggacgacgccaaaccaaagccagagaaatccgagaagcagaagctctgggagagaataagcgcgcgccctgactggattgttgtagagcgcatgcgagtgaacggcttctggcctgccggcgagactttgcccgaagacccacctgacgaggtgaaagagcgcgccgccttagaagttgagcgggctaggcttctgaaatcagccctggccgtacagcaccccgaacaagccctcaaggctgagaaccagaggcgtatcgaagtcagtagaaaaaagaaggcggaacggaaggtcctcagagaagctgccgctagagaacgtcgggaggcttttattaagaagaagagagccaccctcgtacatctcggccttggagtgtctggcggacttgaaaagacgggcgcggatgaagcacggctgcaagccttcgagctgcctgtgctacgagacgggaatgatgtggcagcagccatcgggatccctttaggggaattgagatggcttacctatcacaggcgcggtgcgccgctcgttcactatcaccggtacgatattcctaagaagacaggcggtgctcggcacatcagtgcaccaaagggcaagctggcccgggctcagcaatgggtgctggatgctgtactggacaaagttcccgccagcgctcacgcccatggatttgtcagagggagatccgtcgtgacaaatgcgcgcccccatgtgaaatgtaaatctgtggtcaacctggatctgaaagattttttccccacaattacctatcggagggctaaaggactttttgagcatctgggatacggtgagcatgtggcaactgttctggccttattgtgcactgagcctccgcgtgttcttgtggaacacgatgagcgacgcacccacgtggctataggggaacgcgttcttccacagggcgcctgcacttcgccagctattaccaatctgctgtgtaggcggctagatgctaggctcgccgggttggccagacgattaggtctagcctacacgcgatacgccgacgatctgactttctccggggacacagtggacgagagagcactgctgggcgcagtccgacgcgttatcgctgcagagggctttgtggtccaccccgataaaaccagggtcatgaggaagggtagacggcaggaagtcacaggggtcgtggtgaatgcgaaaccatcaatcgcacgcgagcagtggaggtctttgagggccgtactccataactgcgcaaaacatggcctggccagccagaaccgtgagcagcatcccgacttcgcaggacacctggcaggtaaggtggcttgggtgaggatggtggaccctcggaggggagcacagttgggactgctcctgcaacgcgctctcgccagaccctga

SEQ ID NO: 13582 - RNA, 1404 nt, synthetic construct
  source 1..1404: mol_type = other RNA
atggccgacgatgcaaagacaaaaagcgagaagagcgaaaaacagaagctctgggagcgggttagctcgaggcctgactgggtggtggtcgaacgcatgcgcgtgaacggtttctggccacagggagagaaactgccagaggatcccccagacgaagtcaaagaacggacagctctcgaggctgatcgcacaaagctgctgaaaagtgcgcttgcagtgcaggaccccgagagggctctgaaggaggagaacgaacgtagaatactggaaagtcgcaagaagaaagctgaacgtaaggttcttcgggacaaggcccggagagagagacgggaagcctgggtcaaaaagaaacaagcagcactggtacatctgggattgggggtgtcagccggcctagaacacgtggagtctgacgtagcccggctccagaccctgggtctaccagtgctgaatgatgggactcagctcgcagcttccatgggtatcgccctggctgaactgcgctggttgtcatatcaccgccgcggggctccgttggtgcactatcacaggtacgacattcctaagaagactgggggcgcccgccatatctctgcacctaaggcaagactggccagggcccaacagtgggtgttggccaatattctcgacaagcttccagtttcagagcacgcccatggattcgtccgcgaccattccgtggtcaccaacgccaggccgcacgtcaaaagggcctgtgtggtcaatttggacctcaaggatttttttcccactatcagctttcgcagatgtaagggactgttcgggaaaatgggctatagcgagcacgtggccaccgtactcgccttgctctgcacggagcctcctagagtgctggtggaactggacgataagaggacccatgtagccctgggcgagcgagttttaccacagggcgcttgcacatctcccgcacttaccaaccttctctgcaggagactggacaaacggctcgcagggcttgcaagacggcacggtctggcttacacaaggtacgctgatgatctaactttctccggagactcactcgatgagtctgcactgttaggaagtgttagacgtgttgtggaagccgagggtttcagggtccatcccgacaaaacccgagtgatgcgaaagggacggcgacaagaagtgacgggcgtcgtagtgaacactaggccctccatcgcgagagaggattggcgacagcttagagctattctgcacaatgcggcgaaacagggcctgcagtcccagaatcgggatcaacggcccgactttgcggcccatttagctggccgtgtggcttgggtcagaatggttgatcctaggcgtggcgctcaacttgggctattactgcagcgagccttggcccggggctga

SEQ ID NO: 13583 - RNA, 1386 nt, synthetic construct
  source 1..1386: mol_type = other RNA
atggccgacgacgagaaggcaaagttgtacaaggagatcgtccgaaggacatccgatgccttcctgcttgaccgcatgagaacacatggattctggccagagaaggagcccttgccaaaagatccccccgatgaactgtctgaaagagctaagatagaggccgagctgcagaagctgaagcagacgtctctcgcagtcaaggaccctgaaaaggccctggcagaggaacagaaacgtagatgggaggagtcgaagaagcgcaggaaggaagccaaagagaaaagggaggccgagcagaaggcaagaagtgaggcctgggcgaaagtgaggaaacagaaagtggttcatcttggacttggcgtgtccaagggactggaggatacgaaaagcgatgccgagaagctcctggaaaatggcctccctgttctgcacacctcagccgatgtggcctccatgttgggggtatcactgcctgtccttcggtggcttacctatcaccgcaagagcgtggctctggtgcattaccaccggtacggcattccaaaaaagactggagggatccgaaatatctctgcccccaagaagtcactgagcgctgcccaagagaaagtgttggttctaatactcgaaaaaatcgcccctgagcctcaggctcacggttttgttgctgggaggagcatcctgactaacgcagctccgcacgccggtcgaaaggtggtgatgaatttagacctgcgggacttcttcccaacaatcacatttaggcgggttaagggcctgttccataaactggggtattccgagcacgctgctaccgtcttagcccttttatgcaccgaaccagcccgagctaaggcggagctctctggccgagtgtaccacgtagcgctgggagaacggtttctaccccaaggaacctgtactagccccgcgatcaccaacctcttgtgccgaaggctggacaaacggctctccggtctggcacagaaagcaggctttttgtatacacggtatgcagacgatctgacctttagtggcgacgacactggtgaagtaggccgcctactacgcgctatacggaaagttattaccagtgagggcttcgaggaacacgctaagaaaacaagggtcatgcgcagagggagacgccaggaagtcactgggttaattgtaaattcaagaccagcggtgccgagagaggaaattcggcgcctccgcgcaattctccataacgccgcccgtagcggtctggatgctcaaaacagggaaaatgtgcctgatttcgcagcacatctccggggcagagtggcctttgtcgagatggtggacaaagaaaggggggaaaaactgagagcagctttgaaccgtgtgcttgccggacgttga

SEQ ID NO: 13584 - RNA, 1386 nt, synthetic construct
  source 1..1386: mol_type = other RNA
atggcaaagcaggacgacaaagcgaggctgtatcaccgtatcactcaggtacaccacggcattgttttggatagaatgagggttaacgggttttggccaatgaatcaaggtctaccaccggatccagcgcccgaagcacaagagagaaagcttctagaggccgatctggccgtgttgaaacaggacgcagccatgtcccccggagatgtggagaaggctctcaaagccgagcggatgaggcggtgggaagagtcgaagaaaaaacgtgcggaaaagaagaaactgcgggaggcacgagctgctgctaggagagccgcatgggtggaaaggcgaaaggggcttgtatttcacgccggagaggggcattctggcggcctacagcatgctacatctgatgaggccgcgctgaccaaacgcgccttgcctgtgctccacaccgctcacgacctggctgttgcccttggaatcagtctcgcacggttacgatggctcacctaccatagagagggggccacactggtccattatcaccgttactccatccctaagaaaacaggggggattcggggaatcagcgcccccaaacctgcactggccaaggctcagaaatgggttttcgatagtgtcgtgcagaaactggtcattgaaccagaagctcatggcttcgtggtggatagatccattgtgactaacgccaagctgcacgtaggcaagagggtggtcacgaacatggacctgaaggactttttccccagcgtcacatacaagcggacaaaaggtcttttcgtgagtttcggatattctgagcaggtcgccaccctgatggctcttttatgcacagaaccccctcgcgttgcagcctccgtggatggaaagccagtcaacatagcaatcggagagcgacgccttcctcagggtgcatgtactagccccggactgactaacgccgtttgccgcgccttggacagacgcctaggaggtctggcccagaagctcgggtttacctacaccaggtacgctgacgacctgactttttcagggaatgacgacaagcgactgggcttattgttacgcagcgtgaggtcaatcgtcaaggatgagggtttcctggaacacccgaccaagacgagggtgatgcgtcgaggcaggcggcaagaggttaccggcgtggtggtgaatgatagacctactatagccagagaagaactgcgcgagctcagagctatcctccataatgcgatgcgccaaggcctggaagcccagaatcgcaaaggccatcccagatttattgaccacctccagggccgggtggcatatgtcgctatggtagatccagtacggggggagaaactggagcaggctttggcaagggtgctcggccggtga

SEQ ID NO: 13585 - RNA, 1386 nt, synthetic construct
  source 1..1386: mol_type = other RNA
atggacgcggacgagaaggcaaagctatatcgtagaattagttcggccaatattcatcttgtactggaacgtatgagggttcatggtttttggccccagggacagggacttccaccagaccctgctgatgaagtagcggcacgcgccgctatcgaaaaggagatcggccagctgcaaggagcagctgtcgctggggggcttgctgcaattgaggaggctctgagagaggagcgaagacgcaggtgggaggccagcaagaaaaaacgcgcagagaggaaaaaaatccgccaggcccaggatgctgaaagacgggctcagtggcgcgaggaaaaaaagagcagggtcgtgcacgccggtgtcggagtttctgcaggtctggaagaccgtcagagcaacgaagaggagttacagaggcggggcttacctgttttgcacacagccgctgatgtagctgcatctgccggagtggcctttccgaaactccggtggctgacctttcacagacggggcgccgccttggtccactatcatagatacagtatccctaagaagacaggcggcatgcgagcaatatccgcccctaaatcagccctcgccgatctgcaattgtgggtgctctcaaggattcttacacccctccacgtcgaacctgaagcgcacgggttcgttcccgaaaggtccatcgtgaccaatgccaagcctcacgttcgccaaagagtggtggtcaatctggacctgaaagacttcttcccaagtgtgaccttccgccgggttaagggcctcttccagaaagtgggctattccgagcacgtggcgactctcctggcacttatctgtaccgagcccccccggatccccgttgagattgatggaaagaaattgtacgtggcactcggtgagaggatgctcccacaaggcgcctgcacttcaccagccatcacgaatctggtgtgcaggcggctcgaccgaagactggctggactggggcatcgatgggggtatacctacactcggtacgcagacgatctgacgttctccggcgacgggaaacagggcctagccctactgctgaagggcgtgcggggaattgtatctgatgagggttttgccgaacacccgacaaagacccgagtgatgaggccaggccgcaggcaagaagtgactggagtcgtagtgaatgataagttgggtgtggcaagaaaggatgtccgacagttacgcgctattctgcataacgctaaggtccacgggcttgccagccagaaccgggataaccatcccaactttgaggcccatctgcgtggcagaatagcttttgtgcacatgatagacgaggccaaggggaaaaagttgctggaccttctgaaagaagcgatccatgggtga

SEQ ID NO: 13586 - RNA, 1389 nt, synthetic construct
  source 1..1389: mol_type = other RNA
atggccgacgaccctaaggaaaaaaagaaggccctctatcagcagctggtggagtccgctgacgaagaacttgtcctggcacgcatgcgagagctggggttctggccgtctagtgaacccctccctgaagaccccgacgatgaggtgaaggagacactggagctggaatacgaactagctcagttacggaagaaggcgaccgttgtagccgatccccagaaggctttggaacaggagagggtgcggagatggaaggagagcaaggaaagacgggcaaaagcaaagattgagagagaattggaggcaaaacaacgcagagaggcttgggaaacggcgaagaaagagcgggtatggcatgccggagagggtgtctctgccggattggaatcccataccccatcgcctgatggtgtgaggttcggagccccacctatcgccacccctaaagcactggccgaggccatgggcatcgatctcccaaagctgcgctggctaacttaccaccgcagagccgcagcactggtccactatcaccggtttagcgttcctaagaagactggcggactgaggcatatcagcgccccgaaaaaggatttaagaagggctcaggagtggattctggtgcatgttcttgagcgcgttggaccccaaccaaccgttcacggcttccagcgggggagatcagtgaaatctaatgctacaccccacgtgtcaaaacgcgtcgtggtcaatttggatctcgaggacttctttcctactctgggatttcgtcgcgtaaagggtgtttttcgaagtgttttcggctatcccgagtccgtagcaacagtgatggctctcctttgtaccgaacccccacgggtggaggcagaacttgacggaaaggtgttccatgtggctctgggggagcgtgtcttgccgcaaggcgcttgcacctcccctatgctgacgaatatagcctgctacgccctcgaccggcgattaggtggcttagctggcagcctagggttcgcttatactagatacgccgatgatctcacattttcttcagacgacccacggaaaacaggccgactgctgaaagcggtgagggacgtcgtcaagaacgaagggtttgtggtgaacgaggccaaaacccgagtgatgcgtcgaggcggaaggcaagaggtaactggggtgaccgtgaacaggaaagcaaacgtcagtcgcaaagaaaggagacgtctcagagctctgttgcacaatgccaagaaaactgggcttgcggcacagaacaggacaaaacacccaaggttcagagagcaccttcggggccgcattgcgtggatcgggatgctcgatgctgcccagggtgccaagctgagggccatgctggatgcctgtcccgactga

SEQ ID NO: 13587 - RNA, 1479 nt, synthetic construct
  source 1..1479: mol_type = other RNA
atgatggaaaaccaggaaaacaatcgtaaggattatagagaagctgtgaatgctatgggtaagaaggaattcactctgataaaaatgcaggagtacggcttctggcctcagaatctgccgactccctatgaacgccaagaaaacgaaacctctgaacagtacgaaaataggaagaatctgctagagaagtatgagaaggtgatcgacgagattgccaatctatacgaggagaaagacaagataaattccaagctgatagagctccaaaaaaaatatgacgagacatgggattatgagaagatcagactcgatgtttcaaagaccataatggaggagagtatagcccgcagggctgagcggaagaagcagagggaactggaaaaaaggcagcgaagcgaggagtggaaaaaggagaaggaggataaaatcgtatttattggaaagggctactcaagtctcttgaaagacaaggagactcacaaagaaaagttacttgctcaagaccttcctatcatcaatgacgataaagagctcgctagtttcctcggaatcgagtacaagaaactgcggttcctggtgtaccaccgtgatgtcgtgtcggttgaccattactatcggtacacaataccaaaaaagagaggaggggtccgaaatatcgcagctccaaaatccgtgctgaaaaattcccaacgcaagattctggacgatatccttcttaagattcccacatcggatgaggcccatgggttcttgaaagggaaatccgtggttagcgcggccgagtctcactttaagcagcctgagttgctgatcaacattgatctcgaagacttttttccaactattaccttcgaacgggtgagaggcctctttaaatcatttgggtacagcgggtacatcgccagtatgctagcaatgatttgcacatactgtgaacgcatgaagattgagatcagaggcgaagaaaaatacattaaaacgtcaaaccggatccttcctcagggaagccccgcatcacccatgatcaccaatatcatttgcatcaagttggataaaaggctgaagggactgagcagcaagtataactttacctataccagatatgcggacgacatgtctttctccttcaatggtgatgactatgagttaaacattggcaggttcattggcttagtatccaagattgtgaaagaagagggcttcaatatcaacaaggacaagacgaagtttctgaaaaaaaacaactgccagtgtatcactggtatcgtcatcaacaacgaagagatcggggtgccaaagaaatgggtgaagaaattgcgcgccgcaatttataacgccaacaaggcacgaaacagtggagaagtcctgagctctaaagtcatcaatgagatttccggcatgacaagctggattaagtctgttaacgagaagcggtacaaagccataatcgattctgccatggaactgataaattcctga

SEQ ID NO: 13588 - RNA, 1488 nt, synthetic construct
  source 1..1488: mol_type = other RNA
atgatggaaaatcaggaaaacaacatgaacaataggaaaaactaccgtgaagctgtgaataccatgggcaagaaggagtttacacttatcaagatgcaggagtacgggttttggcccaagaacctgcccacaccctatgagcgccaggagtctgagactgaggagcaatacaaggaaagaaagtgcttgcttgagaagtacgagaaggtcattgatgaaataagcaagctttacgaggagaaagataagattaacttgaaactgcgggagctgcagaaaaagtacgatgaaacctgggactatgaacggatccggctagatgtatccaaaactatcatgcaggagtcaattgaacgacgagcggaaaggaaaaggcagagagagcttgagaaagaacagcgctccgaagaatggaaaaaggagaaggagaacaaaattgtgtttatcgggaagggatacagttctttactttacgacaaagaaacggatgaaaacaagttgctcctgcaggaactacctatcatcaaggacgacaaagaattagccaatttcctggggatcgaatataaaaagctccgcttcttggtatatcatcgtgacgttatcagcgttgataactatcaccgttataccattcccaagaaaaaaggtggcgtcaggaacatcgctgcccctaagagcattctcaagaacagtcaacgcatcatcctcgaggaaatactgagcaagatcccaacctctaattatagccatgggttcctgaagggtaaatcagttgtttcagccgccaaggtgcacgtcaagaaaccggatctgctgattaacattgatctggaggactttttcccaacaattacttttgagagagtgaggggcatgttcaaatccttcgggtattccggctacgttgcatcaatgctcgctatgatctgtacctactgtgaacggatgaaggtggaggtgcgcggcgaggagaaatatgtgaaaatatccgatcggattctgccacagggctctcctgcctccccaatgattacgaatatcatctgcgtgaaactcgataagcggttgaatggactgagtacgaagtacgacttcatttatacaagatatgccgacgacatgagttttagtttcactggagacattaatgagctatccgtcggaagctttatgggcttagtgtcaaagatcgtcaaagaggagggcttcaacataaacaaggacaaaaccaagtttctccgaaaaaataacagacaatgcatcacaggaatcgtcataaacaatgaggagattggtgtgcctaaaaagtggataaagatcctgagagctgcaatttacaatgcaaacaaggtgaagaatagcggggagatactgagcaacaaggtaattaatgaaatctcgggaatgacctcttgggtgaaatctgtcaacgaagagaggtacaaagatatcataaatgacgcgatgaatctgatcaataattga

SEQ ID NO: 13589 - RNA, 1494 nt, synthetic construct
  source 1..1494: mol_type = other RNA
atgatggaaaatcatgagaataacatgaacaaccgccagaattaccgggagacggttaacaaaatgggtaagaaagagtttactcttatcaagatgcaagagtatgggttctggccgaaaaatctccctacaccctatgaaaaacaggagaacgagacaaaggaacagtatgcccaaaggaaagatctgctggagaagtaccagaaaatcatagacgaaatcgccaatctatacgaggagaaggataagataaacgagcggctacgagagtttcagaagaagtacgacgagacatgggattacgagaagataagacttgatgtgtcgaagattatcatggaagagagtattgcacggcgtgctgagaggaaaaagcagcgcgaattcgaaaaacgtcagcgctctgaggcatgggaaaaggagaaggctgacaagatagtctttattggaaaggggtattctagcttgttgcaggacactgaaacagacgatgaaaaattgcttagccaggaacttcctctcatcaaagatgataaggaattagccaactttctgggaatagagtataagaaactcaggttcctggtttatcacagagatgtcgtatctgtcgaccactacaatcgctacaccatccccaaaaaaaaggggggcgtgaggaatatcgcggcaccgaagtcaattctcaagaattcccagcggaagatactggaagagattttgtccaagatcccaactagtaattatgctcatggctttctgaaagggcggagcgtcgtaagcggcgcaaaagcccacactaaacaaccagagctgctcataaacatggatcttgaagactttttcccaaccattacctttgagagggtgcgcggcatgttcaaaagcttcggatactccggttacgtagcttctatgatcgctatgatctgtacctactgcgaacgaatgaaggtggaggtgagaggggaggaaaaatatgtgaagaccagtaataggattctgccacaaggaagtcccgcttcccctatgatcacgaacatcatttgtgtgaagctcgacaaaagactgtctggactggcgtcaaagtattcatttgtgtacacaagatacgcagacgacatgagcttcagcttcatgaatgataacagtgacctgaacattggcaaatttatggggctggtttccaagatcattgaggaggaaggattcaacatcaacaagaacaaaaccaagttcttacggaagaataataggcagtgcattactggcatcgtgatcaacaacgaggaaattggcgttccccgcaaatggatcaagagactccgagccgccatctacaatgccaacaaagtcaaaaataacggcgatctgccttcaagcaaagtgattaatgaaatttccggtatgacctcatggatcaagtctgtgaacgcccgtagatatgaggacattattaacgacgccatggatctgatcaattcccagttatga

SEQ ID NO: 13590 - RNA, 1158 nt, synthetic construct
  source 1..1158: mol_type = other RNA
atggaagagtccataaagagacgggctaagagaaagaaacagcgagaattcgagaagcagcagagatcagaagcctggaaaagaacaaaagaggacaagatcgtttttataggcaagggttattctggttctttgcaagacgtggagacaaatatagagaagctcaaagcccagaaattgccaatcattaaagatgacaaggagctggctaagttcctagggatcgaatacaagaagctgcgctttctggtctaccatcgagatgtagtgtcagtggataattatcacaggtacaccattcccaaaaagaaagggggggtgaggaatatcgcagcacctaaatctctgctgaaaaacgctcaacgtaaaatcctcgaagagatactctccaaactccctgtctccgagtatgcccacggattcctgaaagagaaatctgtcgtgagtggcgccaaggctcataagaataagcccgaattactgatcaacatcgacctggaggatttctttccaacgattaccttcgagagggtgcggggaatgtttaagggctttggttatagcggctatgttgcttcacttctgtcgatgatttgcacctactgcgaacgcatggaggtggaagtgagaggcgagatcaagtacgtcaaaacatctcaccggattctgcctcaaggatccccagcctcccccatgatcaccaacattatttgtaggaaactcgataaacgccttagtggcctagcatctaagtatagcttcacttacacaaggtacgccgacgacatgagctttagcttcattaacgaaaacacggacctgacttacggtcgcttgattggcttgataagcaaaatcgtgaaggaggaagggttcaacatcaacaagaacaaaaccaagtttcttcggcagaacaatcgtcagtgtattactggaatcgtaattaacaatgaggaaatcggggttcccaagaagtggataaagaacttacgggcagccatttataatgcgaacaagctgaagaacaatgagcagattccgtcgagtaaaactatcaatgaaatcagcggaatgaccagttggattaaatccgtcaatagcgaaaagtacaagaacatcatcgatgacgcgatgaatcttatcaattcactcgagtga

SEQ ID NO: 13591 - RNA, 1506 nt, synthetic construct
  source 1..1506: mol_type = other RNA
atgatcgaatctcaagagaacagtaaaaacaatcgtcaggaatacaggaagcaagtgaatgagctcggtaagaaagagtttaccctaatcaagatgcaggaatatggtttttggccaaaaaatctccctacaccctatgaaaagcaggaaaacgaaactaaagaagagtatctggagaggaaaaatctcaccaaggaatacgaaaaaatcataaatgcgatcacagacttgtacgatgagaaagatgagatcaacgccaaattgcgcgacctgaataagaaatataacgaaacttgggactacgagaaaatccgccaagacgtcagcaaggccattatggaggaatctatcgctaggaggaaagaaagaaaggaaaagcgagagctcgagaaacggcagaagtctgaagcctggcagaaggaaaaggccgatagaattgtctttattggcagaggatacagcagtctgctgtatgacaaggaggacaatgaggagaagctcctgaaccagggccttcccgtcatcaaagacgaccgtgcactggctgatttcttcgggatcgagtacaagaagttaagattcttagtgtatcaccgcgatgtcgtgttggtggatcattataaccggtatacaattcccaagaaaaaggggggcgagcgcaacattgcagctcctaagctgattctaaagaacgtccagcgaaaaatcctcgaggagattctgtccaagatccaggtttctgactacacccatggcttcctgaagggaaaaagtgtggtgagtggggctaaaagccacattgccgacaaagcctcgggagaaaacacagctctgctgatcaacatggaccttgaggactttttcccgacgatcactttcgagcgggtgcggggcatgtttaaggccttcggttactccggatacatctcctcgctgcttgcaatgttgtgtacctactgcgagagaatgccaattgaagtgaagggaaaggtgaagtacgttaaaacctctgaccgcatattacctcagggctcaccagcaagccccatgatcacaaacataatatgcgtgaaactggataagagactcagcggcctgtccagcaagtacaattgtgtctatactcgttacgcagatgatatgtcattttcctttatggaagagtctagcgatttgaatcttgggaagttcatggggctgatttccaaaatagtaaacgaggagggctttaatatcaacaaaagcaagacccgattcctacggaaaaataacaggcaatcaattacaggagtggtaattaacaatgacgaaattggggtttcaaaaaagtggatcaaaactcttagggccgcgatttataatgccaataagctcaaaaactccggggaaaagatccctcagagcacgatcaatgagatatcaggtatggtgagttgggttcggtccgtaaacgagaagcgctatgctgatatcatagagtctggcatgaacctgattaatacctga

SEQ ID NO: 13592 - RNA, 1581 nt, synthetic construct
  source 1..1581: mol_type = other RNA
atgatggaaaaccaggagacgtctaaaaataagcggcaggattacagagaaatcgtcaatcaaatgggcaaaaaagagttcaccctgcttaaaatgcaggagtatggattttggcctaaaaatttgcctaccccttacgagaggcaggagaacgagacacaagaagagtacgcgcaccgtaaatcgctgataaagaagtatgagaagatcattaagcagattagcgatctctacaacgagaaggacaagattaatcaaaaactacgcgaactgaagaagcgctacaacgagacatgggattatgaaaagatcaggagcgacgttgctaaggcaatcatggaggagtcaatcgccaggcggaaggaaagaaaagagaagcgagccttagagaaagaacagaagtctgaggactggaaaaaagaaaaggaacgtcgcattgtcttcattgggaaaggctacagtaactcactttttgacaaagaatctgataccgagcggctgctctctctcggccttccaataatcgaggacgataaagagctatctgagctgtttgagattgagtacactaaactgcggttcttagccttccacagggacgtggttactctagaccattatcacagatacacaattcccaaaaagaaggggggagagagaaatattgccgctcccaagagcattctgaagaatgtgcagcgcaaaatcctcgaaaaaatcctgtccaagattcccgtgagccactatgcacacggatttctcaggggacggtccgtggtgtctggcgcaaaggctcatgctatcgatgaaaaacacgttatcatagaggattcccgaatcagcaaaaacattgataccgaacgcagtgcccaagagcgggtaccgttgttgattaatatcgacatcgaagacttcttcggtaccatcacattcgagcgcgtccgaggcatgtttaagagctttgggtactccggatatgtaagctctttgctcgccatgttgtgtacgtattgtgaaaggatgcccatcgaagtccgtggggagatcaagtacgtgaaaacttccaataggatcttacctcagggttcaccagcttccccaatgataaccaacatcatatgcggcaaactggacaaaagactgagtggaatggccctgaagaacaactgcggctatacaagatacgcagacgatatgtcattttccttcaaacaggagatcaacaagcaggaactgagaaattttatagggctgacatcaaagattgtgatggaggaagggttcaagatcaaccataagaagactcatttcctgcggaataacaatagacagtgcatcaccgggattgtgattaataatcatgagatcggcgtgccaaaaaagtggattaagaccctgagggcggccatctacaatagtaagaaactcattaagtccggcgaaaaggttcccatgtcgaccattaacgaaatcagcggtatggtaagttggataaaaagcgtgaacgaagaacgatatgtcaacataattgaggagggtacaaaccttataaaggaacttacttacactccgtattcctga

SEQ ID NO: 13593 - RNA, 1563 nt, synthetic construct
  source 1..1563: mol_type = other RNA
atgattgagaaccaggagacactgaaaaacaagcgccaggattaccgggagaaggtgaatcagatcgggaaaaaagagttcacgctgctgaagatgcaggagtacggattttggcccaaaaatctgccaacgccgtatgaaaaacaagaaaacgaaaccaaggaggaatacgcccagcgcaagaatctcataaaagagtacgagaagatcattaacgagatatcagatctctacggggaaaaggacaaaattaacgagaaactgcgtgagctcaagaagaagtatgacgagacttgggattacgaaaagatccggatagacgtgtctaagacaattatggaggagagcatcgcaagaagaaaggagagaaaagagcagcgagagctggagaaaaggcagaagtccgaagcctgggtgaaggaaaaggctaaggggatcgtatttatcgggaaaggttatagcaaccttctgtatgacaagcagaatgatgaggataaactattgtcccaggaactgcccctcatcgaggatgacaaggcactagccgagttcttaggaatcgagtataagaagttgaggtttttagtctaccatcgcgacgttgtgacagtggatcactatcatcgcttcagcatcccaaaaaagaaagggggcgagcggaatatcgccgcccctaagtctatccttaagaacgctcaacgtaagatcctcgaagagatcctatctaaggtcccggtgtcagactacgcccacgggtttcttaagggcaaaagtgtcgtgtcaggcgctaaggcccatgtcgctgctaaagcggacttgggggaaaaggcgagtggagtcgaaaagactcacgatgaggagaaagtaagcggtgaaaaaacccagctgctgattaacatggatctggagaattttttccccactattacattcgaaagagttcgaggaatgttcaaggccttcggctactccggctatatcgcatctttgttggcaatgatttgcacctactgcgaacgtatgccaatagaggttcgaggtgaaatcaagtacgttaaagcctcaaataggattctcccccaaggaagtccagctagccccatgatcaccaacatcatttgtgtgaaacttgataaacggctgtccggcctggcacctaagtacaattgtacctataccagatacgccgacgacatgtcttttagcttttgtgaagagaactcggacttaaacctgggcagattcatgggtctggtttcgaagattatcaatgaagaaggcctgaaggtcaacaagaaaaaaactcgcttccttcggaaaaataataggcaatgcatcacaggaattgtaataaataaccacgaagtgggggtgcctaaaaaatggattaaaactctcagggcagctatctataatgcgaacaagctcacccggaacggcgaagtcgtacctgccaaaacaattaatgaaattagcggcatggtgagttgggtgaagtccgtgaacggagagaggtattccggtattatagaggacggaatgaacctgattaataatatatga

SEQ ID NO: 13594 - RNA, 1578 nt, synthetic construct
  source 1..1578: mol_type = other RNA
atgatagagaaccaggagaacactaagaataaacgacaagactaccgcgagattgttaatcagatgggcaagaaagagttcacccttctgaaaatgcaggagtacggattctggcctaagaacctccccaccccctatgaaaggcaggaaaacgagacgaaggaagaatatgctcaacggaaaagcctgattaaggagtacgagaagatcatcaaccagatttctgaactctacgagggaaaagacaagattaaccagaagctgcacgagttgaaaaaaaagtacgacgagacgtgggattacgagaaaattagggttgatgtcgctaaagccattatggcagagtcaatcgcaaggcgaaaagagagaaaagaaaagagggcacttgagaagcggcagaagggagaggcttgggaaaaaaggaaaagcgaaagtatcgtgttcataggtaagggctatagctccctattgaacgacaaggagaatgacaatgacaaactgctgctgcaaggtctaccaatcataaaagatgacaaagccctagccgaattcctcggaatcgagtacaaaaagttgcgcttccttatttaccatcgcgatgtggtcagcgtggaccactatcacagatttaccatcccgaagaagaaagggggagagagaaacatagccgctcctaagagcattctgaagaatgcacagcggaaggtcctggaggatatactttccaaaatgccagtgtctaactatgcccacgggtttttaaaaggcaagtctgtggtcagtggggccaaggctcatgtggcagagaaggggtatctgagtgaagagactgatatggtagaaaaagcgtttgtagtcgaaaaagtccatggcacagacaaagtttcatcagaaaatacacagctgctcatcaacatggacctcgagaattttttccccactatcaccttcgagagagtgcggggtatgtttaaggctttcggatattccgggtacatctcgagtctcctggctatgatctgtacctattgcgaacgcatggcgatagaagtgcgcggcgaaatcaaatacgtgaagacaagcaatcgaattctgcctcaaggctccccagcgagcccaatgataactaacattatttgcgccaagttggacaagaggctcagtggcctggcttacaagcacaactgtacatatacccggtacgcagatgatatgtccttttcctttaaggaggagagctcagatttgaatattgggcgttttatggggctcgtgtccaagatcgtgtctgaggaaggtctgaatatcaacaagaagaagactagattcctgcgcgagaacaatcgtcagtgcatcacaggcattgtaatcaataacgacgaaatcggagtgcccaaaaaatggattaagacattacgggccgccatctataatgccaacaagcttaagaataacggcaaagaggttcctgttaagaccattaatgaaatctctggtatggtatcttgggtgaaaggagtcaataccgaaagatacgccgggattatccgtgagggcatggaattaatcgattcatga

SEQ ID NO: 13595 - RNA, 1356 nt, synthetic construct
  source 1..1356: mol_type = other RNA
atgatggataacaatgtgaacaatatagaccgcaaacaaaactatcgggaggcggtcagtgtaatggggaagaaagagttcacgctcttgaagatgcaagagtatggtttctggcccaaggacctgcccacgccttatgaaagacagaagtcagaaacccaggaggaatacgagaatcgcaaagccctactggaaaagtaccacaaggttataaatcagatcaatgacctatgcaaggacaaggaagatatcaacaacaagttaaaagggctgcagaaaaagtacgatgatacctgggactacgagaagatcaggaaagatgtggcccagacaatcatgaaggaatccattgagcgtagaaaggaggtcaaaatcctgagagagatcgaaaagaaagaaaagtctgatgcatggaagaagaataagagcgagaacatagtgtacatagggaaaggctactcaaagtggctttatctgaaagacactgacgaggagaagttgaaggaacatgagatcccaattataaaagatgacaaggagctggcacagtttctggggattgagtaccgacagctccgctttttaacttatcatcgagacgtggtgaaattcgataactataccaggtacaccattccaaaaaaaaaaggaggcgtgagaaacattgctgcccctaagaagattctgaaagacagtcagcgcaagatccttgatgaaatcctctgtaaaattgaggtgagtgaatctgctaatggatttattcagggcaaatccgtcgtgtctggtgccgagtcacacattgacaataaagttgaactcctcatcaatatggatctggagaattttttccctactatcacattcgaacgggtacggggaatgttccagaagcttgggtactcgggatatgtttcctccctgctggccatgatctgcacatattgtgagaggatggaaatggagatcaaaggtgaaaaagtgtacgttaagactacagatagaatattaccccaaggcgccccgtcttcccccatgatcacaaatataatttgcagcaagctcgacaaaaggttgaagggacttgcagataaatacggcctggtgtattcacggtatgctgatgacatgagctttagcttcggagaaggtaacattatcctgaacgctatcaacaagtacattaatctcaataccgataaggagaataaccaggacgacctgaatgtcggcaagataatcggcatcatcagcaagattatcaaagaggaggggtttaacatcaacaaccaaaaaaccaagttcttgaggaaaaacaaccgtcagagcattactggcattgtcattaataacgactga

SEQ ID NO: 13596 - RNA, 978 nt, synthetic construct
  source 1..978: mol_type = other RNA
atgctgatttcttcaatcgaatataagcaacttcgatatctgacctatcatcgcgatgtcgttaaatttgacaactataatcgctacaccatccctaagaagaagggcggtgtgcggaacattgccgctcccaagaaagtgctgaagggcgttcagcggaagatcctggacgagattctcaagaataagattaagatcagcgactctgcaaacggctttatcaagggaaggtccatcgtcagcggcgcagagaagcacaaggattcaaatgtagaactcttgatcaacatggacttggaaaacttcttcccaactataacattcgagagagtgagaggaatgttcatgaagtttgggtattctgggtacgtgagctccctgttagccatgatttgtacttactgcgaacgtatggagatggaagtcaagggagaaaacgtctacgtgaaaacctctgagaggatccttccccagggcagtccagctagtcctatgattacgaatatcgtgtgctccaaactggacaacagattgaatggcctagcctccaaatacgagttcacctacagtaggtacgccgatgacatgagctttagctttaacaagggcaacaaagtgctggacgatgctaaagatagcctaaacgttggaaaaattctcgggattatatccaagatcattaaagaggagggtttctcgatcaatgaggagaagacaaaattcctgcggaaaaataaccggcaggcaataacagggatcgtgatcaataatggcgaaattggggttccgaagaaatgggtgaaaaatttacgcgcggccgtctttaacggatcaaaactcatcgaaaacggatctattcttccctgtgatctggtaagtgaaattaaaggtaagtccagctggctgtcatgtgtgaatcgagagaggtatctcaagataatagaggaatgcgagaagatcataagattcaaagggtga

SEQ ID NO: 13597 - RNA, 1509 nt, synthetic construct
  source 1..1509: mol_type = other RNA
atgatagagaacaatcggaacaatatcgacaacaagcagaattataggagcgcagtgaatacaatgggcaaaaaagaattcacactgctgaagatgcaggagtatgggttttggcccgaaaatttacctacaccatatgaaaagcagagtaacgagtccccagaggaatttaaaaaacgtaaggaactgctggagaaatacgaaaagatcatcaacgacattaacgacttatacaaggagaaggacgtgattaataataagctgaccgagttgaaaaagaaatatgacgatacctgggattacgagaagattagaaaggatgtcagccaaatcattatgaaggagtcgattgagcggcgcaaggagatcaagaccttacgggccctcgagaagaaaaacaagtctgaggcctggcggaaaaagaaatctgagaacatcgtgtacatcgggaacggttacagtaaggggctgtacaagaaggataccaacgaagaaaagctgctgaaaattggactccccatcataaaagacgataaagagctgagcgaattgttgaatattgagtaccgacagcttcggtttctcacatatcacagagatgtggtgaagtttgataactacactaggtacacaattccaaaaaagaaaggtggcgaacgcaacatcgcagccccgaaaatgatcctaaagaacgcccaaagaaagattcttgaggagatcctgtacaaaatacaaatctctgaagatgctcacggctttgtcaagggcaaaagcatcgttagtggtgcttccgtgcataccaaaaatagcgacatcgagctccttattaacatggatctcgaaaatttcttcccaaccattaccttcgaaagggttaggggaatgtttcagaacttcggctattccggctacatagcgtccctgcttgcgatgatctgtacatattgcgagagaatggaaatgaaggtcaagggagaaactgtgtatgtaaaaacgtcagaccgtatcttgcctcaggggtcccctgcctcacctatgatcactaacatcatatgtagtaggctggacaaacgcctaaacggactggccctaaaatacgatttcatatactcccgatatgctgacgacatgtcattttcatttaacaaagggaacatggtgatggaggagaatgagcatattaacgttgacaagatactcggaattattagcaagatcattcgcgaagagggcttcgctgtgaataacaagaagacgaaattcctccgaaataataataggcagtccataactggtatcgtcataaatgggactgaaattggcgtccccaagaaatgggttaaaaacctgagagcagctatctataatgcatctaaattgaaggagtgcggcagcaatatcccctctgatgtgattaatgaaatcaaaggaatgaccgcctggctggagtgcgtaaataaggaccgctactataagatcattatgaagtctaaggagcttttcgaatga

SEQ ID NO: 13598 - RNA, 1467 nt, synthetic construct
  source 1..1467: mol_type = other RNA
atggacaccaagtctgaataccggaagttaattaatgagatgggtaagaaagagttcactttcctaaaaatgcaagagtatggcttttggcccagtcatctgcctacgccgtatgagaggcagcagaacgagacagagcaggactttcagaatagaaaaaagctgctcgatgaatttcagaaactgagcgaacagattgcccaagcctataaggagaagcgagaaattgaaattaagctctctagcctacagaaacagtaccaggatacctgggactatgaaaagatccgcgctgttgtctcccaagagataatgaaggcaagtatcgcccgcagggctgagcgaaaggcagaacgtcagagacagaaacaactgaaaacagagcagtggcaaaaacgcaaatccgaaaatatactgttcattggccggggctacagcaacattttgcacaaaaaacagacagatatccaaaaactgaagcagaataaccttcctatcctcgaaactgacaaggacatcgcccagttactgcaaattgagtattcaacactgcgctacctcgcttaccacagggacgtcgttacctttgacaattactataggtttgatgtgcctaagaagtcgggcggaatgagacatattgctgctcctaaaacacagctgaagacagcccagaagcagatattggaaaaaatcttggagaagacagaaatatcggatgtggctcacgggttcatcaaatctaaatcagtgcttaccggagccaaagcacaccaaactagtccagaccttcttatcaacatcgatctagagaacttcttccccaccataactttcgaaagggtgcggggcctgtttcaatatctggggtatagcgggtacattagctccatcctcgccatgatctgtacctactgcgaacggatggcggtggagattaagggtgagactaagtatatcaagacctcagagagaatcttaccacagggatcccccgcctccccaatgattactaatatgatctgcaagcgtatggacaagcgaattaatggactctgtcagaagctgggcgtaatttacaccagatatgcagatgatatgtctttttcttacactggggaacttgagaattttgcaatcgggtctttcctcaatagcattcagaagattattgaagcagagggattccatataaacaaacagaaaacgcacattctgaggaaacataaccggcagtacatcaccggcatcgtgataaacaatgcggagatcggagtaacgcgcaactggatcaagattttgagagctagtatccacaacgcccaaaaattgaagaatgccggtgaagcgatacccaaacagaccaagcaagagatatcagggaaaatcgcctggctgaagtccgtcaacgagacacggtaccagaagatcatccagcagggcaagcagctcctgcagaacagctga

SEQ ID NO: 13599 - RNA, 1464 nt, synthetic construct
  source 1..1464: mol_type = other RNA
atggacactcggagcgagtaccgaaaattagtctccgagaaaggaaagaaggaattcacatttctcaagatgcaggagtatggattctggcccagtcatctcccaaccccttatgaaaggcaacagaatgaaaccgaagaggacttcgagaaccgcaagaaacttctggatgagtttcaaaaactgtcggatgtcatctcaaaagcatatacagaaaagaacgagatagagaagaaactgttctctctgcaaaaggagtaccagaatacatgggactatgaaaaggtgcgcgccgtagttgctcaggaaattatgaaagaaagcattgcaagacgggccgaacgtaaggcggagagagagcgtcaaaagcagttgaagaccgaggcttggcagaaaagaaaggccgagaacatcctctttataggacggggttattccaacattctccacaaaaaggagacggacgtggctaagctggaacagcagaagcttcctatcatacagaccgacagggagttggcaaataccctgggcattgaatataatactctcaggtacctggcataccacagggatgttgtgacgtttgataattactatcggttcgacatccccaagaagtctggcggcactcgccatatagctgccccaaaaatccagctgaagatggcccagcggcaaatcctggagaagattctccagaaggttgagattagtgatgtggcacacggatttgttaagtcaaaatccgtgctcacaggagctaaagtacaccacacctctcccgatctgctgattaatatggatttggaaaacttcttccccacgatcacattcgagcgcgtgcgcggtctataccagcaccttggatacagcggttatattgcctccctactcgcaatgatctgcacctattgtgagaggatgccagtcgagattaaaggggaaaccaaatacattaagacttccgagcgaatactgccacaaggcagtcctgcgtcacctatgatcaccaatattatctgtcatcgtatggacaaacgcatttacgggttatgccagaaactgggtgtgacttatacaagatacgctgatgacatgtcattttcctacatcggggaattggaaaatttcgccatcggcagctttctgaacagcattcagaagatcattgagtctgaagggtttcacatcaataagcagaagactaacatccttcggaagcataacaggcagtacataactgggatcgtcatcaacaacgacgaaatcggcgtggcccgaaagtgggtgaaaatcctaagagccagtatacataacgctcagaagttaaagaacgcgggggaggctattccgcataaaacaaaaatggaaatcgccggcaaaattgcctggcttaaaagcgtcaatgagaagagataccacaaaatgatccagcaaggcatggagctgttgaaatcttga

SEQ ID NO: 13600 - RNA, 1470 nt, synthetic construct
  source 1..1470: mol_type = other RNA
atggaccgaaaagctgagtatcgtaatttggtaaagaacatgggtaagaaggaattcaccttcctgaagatgcaggaatatggattctggcctgaaaaccttccaaccccatatgagcgccaacagaatgaaacagagcaggattttgagaatcgcaagaaactgttagacgaatttcagaagctctcagaaaagatcagcggagtgtatcaggagaaatcggagatcgagagaaagttaagccaactgaagaaggagtaccagggtacatgggattatgagaggatccgggccgccgtcgctcaggaaatcatgaaggagtcaattgctcgccgtgcggagaggaaagctgagcgggagaggcagaagcagctaaaatccgaggcctggaaaaagagaaaggccgaaaacattatattcataggaaaggggtacagcaatctgctgggcaaaaaggaaactgatgtccagaaactgaaagagaaccaaatgcctgtgatcgagacggaccgcgagctcgcacggtttctgcagattgaatacaatacactcaggtacctggtctaccaccgggacgtcgttacgttcgacaactactaccgatttgatattcccaaaaaaagtggcggcatgagacacattgccgcccctaagacacacctgaaaactgctcagagacaaatattggaccaaatactccagaaggcaggaatcagcgatttgagccacggtttcattaagtcacggtcagtgctaaccggagcgagagcgcatagtacatctcccgacctgctgattaacatcgacttggaagatttctttccaactataacattcgaacgagttagggggttataccagtcctttgggtattccggttatatcgcatcccttttggcaatgatttgcacttattgcgaacgcatgcctctggagatcaagggcgagactaagtatattaagacctctggaaggatactgccgcaaggttctccagccagccccatgattaccaatatcatctgtcggaacatggacaagagaataaatggcctttgcaaaaaacttgggatcacttacaccagatacgccgatgatatgagcttttcctacatcggagacacttctggatttgccatcggctccttcctgaattcaattaatacgattatcgaggccgaagggttccacatgaaaaaagagaaaacccatatcctacgacggaacaaccgccagtatattaccgggatcgttattaataacgaagaaattggggtgcccaagaagtgggtgaaaatcctcaaggcttctatacataacgcacagaagcttaaagctagtggcggctgtgtgagtaacaagacaatcaatgagattagtggcaaaatcgcctggctcaaatccgtaaacgcaaagaggtaccagaaagtgatcgatcagggcaccgagtttctcaagtctctgacctga

SEQ ID NO: 13601 - RNA, 1470 nt, synthetic construct
  source 1..1470: mol_type = other RNA
atggacactaaggccgagtatcgggagctcgtgaacaatatggggaaaaaggaattcaccttccagaagatgcaggagtatggattctggcccagccacttacccactccctatgaacgccagcagcacgagacacaagaagattttgagaaacggcagaagctgttgggcgaatttcaggagctctctgagaagatcgccggcgcatatcgcgaaaagaccgagatcgagaagaagctttcacacctgaaaaaagcctacgaagggacctgggattatgaaaaaattcgggcagccgtggctcaggacattatgaaggagtccattgctaggcgtgcagagcggaaggctgagcgagagcgccaaaagcaactgaaatccgaggcttggaataagagaaaggcggaacagattctttttataggcaagggctactcgtctctactcggaaagaaagaaactgatactgagaagctcaaagcactccagatgccggtcatcgagacggaccgagagcttgcaaatgccctggggatcgaatacagtgcactgagatatctggcttaccatagggacgttgttgcattcgataactattacaggtttgagattcccaaaaaatccggtggcacaaggcaaatcgccgctccaaaaacccaactaaaagcagcccagaaacagatcttaacacaaattctgcagaaggccgagatctccgacaagagtcatggttttgtaccatctaggagcgttctgacttcagcgaaaacccactccacttcacctgatgtgctcatcaatatcgacttggaaaacttcttcccaactatcaccttcgcgagggtgcgggggctattccagtcgttcggctattctggttacaccgccagccttctggccatgatctgcacatactgcgagcgtatgcctctggaagtgaagggcgaaatgaagtacataaaaaccagcggcagaatattgcctcaggggagccccgcctctcctatgatcacgaacatcatttgtagaaacatggacaagcgcattagcggattatgtcaaaaattgggtgtgacatacacccgatatgccgatgacatgtcattcagttacaccggaagtgaagatgggctggccataggcagttttctgaactccctgacaaagatcatagaggctgagggatttcatatcaagcaggagaagactcatattcttcgtaaaaataaccgccagtatattacgggtattgtcattaacagcgaagaaattggcgtaccaagaaagtgggtcaaaatcctcaaagcgtccatacacaatgctcagaaattgaaggaatctggggggtcagtcccgaataagaccatctacgaaatctccggaaaaattgcttggctgaagagcgtgaatgctaagagatacgagaagatcatacggcagggaacagagtttctgaaaacactcgcctga

SEQ ID NO: 13602 - RNA, 1464 nt, synthetic construct
  source 1..1464: mol_type = other RNA
atggacacaaagagtgaatatcgaaaacaggtgaatgagatggggaaaaaagagttcacctttttgaagatgcaagagtacggtttttggccctcacacctgcccacaccatatgagcggcagcaaaatgagtcggcagaagactttgaaaatcgaaagcaacttctggacgctttcgagaaactgtctgagcagattgcacaagcctaccagaagaaacaggaaatcgagaaaaagttgtcctcactcaaaaagcagtaccagaacacccttgactatgaaaagattaggagcatagtggcgcaagagatcatgaaacaatccatcgcaaaaagggcagagagaaaggccgagagagaaaagcagaaacaactgaagtctgaggcatggcagaagaagaaggcagaaaccatcgtgttcatcggcaaagagtactcttcactgctcgccaaaaaggaaactgatatccaaaagctggaaaaaaaccatctcccaataatccagacagataaggatttagctgatctactgcagattgagtacaaaacccttcggtacctggtctatcacagggacgtcattacttttgacaactactatagattcgacatcccgaagaaatcgggaggaacacgtcatatagctgctccgaaaacacatctgaaaactgcgcagagacaggtactagaacagatactgcagaaagtcgaagtgtctgatgcggcccacggattcatcaagagcaaaagtgttcttacgggagctaagatgcaccccacctccccagatctcttgattaatatcgatctcgaggacttctttccaaccataacctttgagcgggtacggggcatgtaccagtcactggggtatagcggctacattgccagcctcctcgctatgttatgtacatattgtgaacgcatgcctttagagattaagggggagataaagtatatcaagactagccagaggatcttgccccagggctctcccgccagtcctatgattaccaacatcatttgccagaagatggataagcgcattcacggcctttgcaagaagctcggtttcacttacacccgttacgccgatgacatgtccttcagctacacaggacagactgacaatctagccattgggagcttcctgaactccatccacaaaatcatcgaatccgagggatttcatatcaagaaagagaagacccatatcctgaagaaaaataaccgccagtacatcacaggtgttgtgattaatcacaaagaaattggtgtgcctcgcaagtgggtgaagattctgagggccagtatatataacgcacagaagctgaagaacgccggcacagctgttcctactaagacgaagcaggagatcgctgggaaaattgcctggctgaaaacggtgaatgaaactcggtatcaaaaaatgattcagcagggcaccgaactgttgaaacactga

SEQ ID NO: 13603 - RNA, 1464 nt, synthetic construct
  source 1..1464: mol_type = other RNA
atggacaccagaacagagtacagagaacaagtcaacaaaatggggaagaaagagttcacattccagaagatgcaggaatatggtttttggccctcacacctccctactccatacgagcgacaacagaatgaaaccgaagaggactttgaaaatcgtaaaaagctcctggatgaatttaacaaactcagtgagcagatttctgaggtgtacaaggaaaagcgggagatagacattaagctctctagtctgaaaaaagagtatcaggacacctgggactacgagaaaatcagagccgttgtgtgtcaggaaataatgaaagagagtatcgctaggcgcgccgaacgcaaagccgaacgcgaaaggcagaagcagcttaaatcagaggcctggaacaagaagaaagcggagaatattatcttcattggacgcggctactccgggcttttaagccaaaaggaaacaaatatcgagaagttggagaagaacaatttaccgatcatcgagaatgacaaagatctcgccactctgctccaggtggaatataaaacactgcgttatctgacttaccatagagacgtggtgacctttgacaattattaccgttttgacatacctaagaagtctggcggtaaacggcacatcgctgcccccaaaaccgaactgaaaaaagcacaaagacaaatcctggaggagattttggagaaaattgaggtgagtgagtttgctcacggctttatcaaatcaaaaagcgtagtcacgggcgccaagttccataagtctgggccggatctcctgatcaacatggacttggagaattttttcccaacgatcacattcgaaagggtacgaggattgtttcagagcctgggttactcgggctatatttcctccctactggccatgatttgcacctactgcgagcggatacccgttgaaatcaagggagagactaagtacatcaaaacgtccgagcgcattctaccccagggatctccagcttcccctatgatcacaaacatcatatgcaacaagatggataagcgaatcaacgggctttgtaaaaagttgggattcacctatactaggtatgcagatgatatgtcattcagctatattggcgatacagaaaatctggctgttggtagcttcctgaacagcattaaaaagatcatcgaggatgaggggttcaacattaagaaggaaaagacccatattctgcggaagaataaccggcagtacatcactggcatagtcataaataatgaggagattggagtccctagaaagtgggtggatattctgcgggcgtcgatacacaacgcagaaaaactgaagaactccggggaatctatcccaaaagaaaccaagatggagatcaagggcaggattgcatggcttaagagcgtgaatgaggagaggtacaagaagatcattgacaagggccttaaattactagaaaactga

SEQ ID NO: 13604 - RNA, 1488 nt, synthetic construct
  source 1..1488: mol_type = other RNA
atgatcgatcagactcactcacagaatcagcggcagagctaccgatccgaggtgtcccaaaaaggtaagaaggaattcactctcctgaagatgcaggagtatgggttctggcccaagaacctgcctaccccttatgagaaacaaaaggcagaaactaaggaggactacgaaaagcggaaggccctcctgaaggaatatgataaactgtccaatgacctagccaacctttatggcgaaaaggaagccatcaacctcaagttgcaagagctcaagaagaaatataccgcgacctgggactacgaaaaaatacggcaggacattgcgaaaacaatcatggccgagtctatcgccagacgagctgagcgcaaaaaagagcgggaagtggcacaggcagagaagtccgcagcctggcagaaggccaaaaccgagaacattgtattcatcggaaagggatatagcagtggtctgcaggataaactcacacacacctctaaattggagtcattaggactccccctgattgagacggatcatcaactggcatcatttcttggcctgacctacacagaactgaggttcctcacatatcaccgtgacgtcgtcacaagcgaccattactatcgatacgagatccctaaaaagaagggcggcttcagacagatagcagccccgaagccactgcttaaacaagtccagagaaagatacttgtggagattctggaaaagctacccattgccgaagaggctcacggctttatcaaaaataggtctgtggtttcgagtgcagaagcccacattaaggctccaaccctgctgatcacgatggatctggagaacttttttccgactttaactttcgagcgcgtgagggggatgtacaagtcctttggttactcgggatacatcgctagtcttctggctatgttgtgtacttactgcgaacgcatgaccatagaggtttctgggaccactaagtacgtgaagacctccccaagaatccttcctcagggcagtcctgcttcccccatgatcacgaatattatctgcaagaatttggaccataggctgaaagggctgagtgccacctaccagctcacatacagcaggtatgcggatgacatgtcattttcatataacgaagccgaggagaatcttaaactgggacagttcttagggctggtgagcttgatcgtggaggatgagggcttccacattaaagcctctaagacaaaaatcctaagaccccataaccggcagtgtttgactggaattgtaatcaacaacgaggaaattggggtccccaaaaagtgggtgaaaaatctgcgtgctgctatccatcacgctaagctcttgaatcaaacgggccagccaattcccacatccctcagccaggaaattcagggcaagaccagctggctgaaatctgttaacccagagcgctataaaacaataattgaagcgggtttaagcgtcatagcacacttttga

SEQ ID NO: 13605 - RNA, 1515 nt, synthetic construct
  source 1..1515: mol_type = other RNA
atgatggacagttctagtgcaaaacgggagaactatagagacatggtcgggaagcttggtaagaaagagtttactctgctgaagatgcaagagtacggattctggcccaaggatctcccaactccgtatgaaatccagaaaaacgaaagtcctgaaagctacgcgaaacggaaaaaactccttaaggagtatgagaagattattgacaacatcgccaaggtatacgaagagaaggataccatcaacgacaaactgaaggaactgaagaagaaatacgatgagacatgggattatgagaagatcaggctggatgtggcccagcaaatcttcaaggagagcattgagcgccgcgagaatagaaaacgactgaaggaggaagagagaattaagcgcagcaacatatggaaacagaaaaagtccgaaaacattgtattcatcggcaaaggatactctaatctgcttaaggataaggagtccaacaaggataagctgctaaagaatggactcccaattattgaggatgataaggctctggccgaatttctccgacttgactactcccagctcagatttcttgcgtaccacagagacgtgaccacctgcgacaactattacaggtatatcgtccctaaaagaaatggaaaactgcgcaatatcgccgcccccaagtctgtgctgaagtttagtcagaagcgcattctcgaagatattctggggaagttagaggtgtcaaaaaatgcacacggttttctgaaggagaaaagtgttattacaggcgccttggctcatggcactgggattgacttgttgatcaatatggacctggaagatttcttccaaaccatcacgttcgaacgtgtgcggggcatgtttaagtcttttggatactcgggatacataagctcattactcgctatactctgtacatattgtgagcggatggagatcgaggtcaaaggcgaaaagaaatacgtggctacaagcaggagagttctgccacagggtagccctgcatctcctatgatcactaacatattatgcctccggctggacaaacgcttggagggtttggcctcaaaatacggatttctgtatacaaggtacgccgatgacatgtctttttccctggaagacaaaagcaaactactacttttcaaggaggaaaaagtcgacaaggagtccgaaaataaggaaattaacaagttcttgggcttggcatccaaaatcatcatagaggaggggttcaagattaacaaatcaaagaccaagttcctgcgtaagaataataggcagtatattacggggatcgttattaacaacaaggagatcggggtgcccaaaaaatgggtgcggaaccttagggcaaccatacataatgcctccaaactgaaaatcaatggcgacattcccgacgaactcgtgaatgaaatcagcggcaaggttgcgtggttaaggtcagtgaacggcgagcgatataaggctatcatagaaaaagctatggaagtcatcaaatga

SEQ ID NO: 13606 - RNA, 1491 nt, synthetic construct
  source 1..1491: mol_type = other RNA
atgatcgagaatcgacatcagtctactgccaattacaggaaaagcattgagatcatgggtaagcgcgagttcactctcttgaagatgcaagaatatggattctggccaaaaaatctgcctaccccttacgaacgccaagctaacgagtccgaggaggaattcgaagcccgccagaagctgacaaaaaagtacgaaaaactgggggaggacatagccaaactgtacgaagagaaggagaagatcgaagaaaagctcagacagctgaaaaaggagtacaatgatacatgggaccttgataagattcggaaagatgttgctcgcaaaattatggaggagtcaaaggcccgtcgtgctgagagaaagagacaaagagagctggagaagaaacaaaggtcagaggcatggaataagcgtaagcaggaggaaatagtgtttatcggaaaaggttatagccagctgctgcagcagcgggaaagcgatgacgataaactctccaaacttacgctccccattgtcaagactgacagggagttagccgagctcttgggaattgaatacgcgcagctgcgcttcatcacctaccaccgggatgtggttacagaagaccactatcaccggtatgccgtgccgaaacggaagggcggatatagaaacatcgccgcacccaagccaattctgcgaaaggctcaacggaagatcttggacgaaatactttgcaagattcccgtttcagattgcgcccatggcttcatcaagggcaagtctgtcgtgtcaagcgcgagtgagcatatcgggagtccagcactggtgattaacatggacctggaagattttttcccgacaatcacctttgaacgagtgcggggaatgtttaagagtttcggatatagcggctatatagccagcctactcgcaatgatatgtacctactgcgagaggatgccaatggaggtgaagggggaaaaaaggtacgtacgaacatcccccagaattcttcctcaggggtcccctgcttcatcgatgattagcaacatcctctgcattaagctggataagagactgagtggcctggccaaaaagaacaactttacttataccaggtacgcggacgacatgtcgttttccttaaagggggaagaaaagattaaattaggcagtttctgtggtctggtgagcaaaatcgcctctgaggaagggttcaagatcaataaatctaagacgcggtttttgagggctaacaacaggcagtccattaccggcattgttgtgaacaacgaaaagctagctgtccctaagaagtgggtcaaagtcctccgcgcagcaatccacaacgctaaaaaagagaaagagaaaggcgagcttgctccccagactatcagaaaaatctctggtatggccgcctggttgaaatctgtgaatgaggaaaagtacaagaaaatcatctccgaggcaaatgagctaataaatcgctgtcagaaatccgacgtatga

SEQ ID NO: 13607 - RNA, 1482 nt, synthetic construct
  source 1..1482: mol_type = other RNA
atgaccgaaaacaacgagctcctgcagaataaaaaggcagattaccgcgagtctgtcaataacatgggcaagaaggagttcacattgttaaagatgcaggaatacgggttttggccaaaagatcttccaacaccctacgaacggcaagacgatgagacgcccgaacagcataaggaacgtcagacactgctcaaggagtaccaaaaaatcatcgacaatattgccaaactctatgaacagaaggacgaaatcaacaagagattccaagagttgcgtaaagagtacgatgaaacatgggatgtcgacaaaattcggctggacatctccaagaagatcatggaggagtccatcactagacgatccgaaaggaaaaaaagaaaggaactggaaaagcagcaacaggcggagatctggcagaaaaaaagagccgaggagatactgttcattggtaagggctatagccagctgttacaggatcgatcaagcgatgacaacaaactctctacccaggggctgccactcataaaaaccgacaaagaattggccgagtttctgggggtggagtacaaacaacttaggtttctggtgtaccaccgcgacgtgatttctgtagaccactatcatcgatataccgtgccgaaaagacggggcggagtaaggaacatcgctgccccaaagcctatgctcaaaacgattcagaggaagatcctggaggagattcttagtaagcttactgtttcagagtacgcgcacgggttcttgaagggcaaatcagtcgttagcggcgcccaggctcacattggacagcataccctgctcattaatatggacctggaaaacttctttcccaccatcacttttgagcgagtaagggggatgttcatggctttcggttactccggctacattagctctctattagcaatgctgtgcacttattgcgaacgcatggcaatagaggttcggggcgagatccggtatgtgaaaactagtcctagaattctgccccaagggagccctgcttctcctatgataaccaacatcatctgcgtgaagctggaccggcgcttgagtggattggcagaaaggactggatacatctacacacgttatgcagatgatatgtccttcagcctgaaagaggaaaattatatggatgaaggtaagctatgtgggctcgtgagcaagatcgtcaacgaggagggatttaagctcaacaagacgaaaacccgcttcctaaggaagaataacagacagtgtatcacaggcattgtgataaattcagagcagcttggtgtgcccaggaagtggatacgggcctttcgcgcagctgttcacaatgctaataagcttaaactgaccggaacagtgccgtcgaaggtgaagaacgagatttccggcatggccgcctgggccaagagtgtcaatgctgaaagatataaagaggtcatcgcggccgctatcgccgtgattcaggactga

SEQ ID NO: 13608 - RNA, 1539 nt, synthetic construct
  source 1..1539: mol_type = other RNA
atgatggacaacaatatcgaacgggaccgcagggctgagtatagagataatgtgcagtcaatggggaagaaggagtttaccatctacaaaatgatcgagtacggcttttggccaaaagggctgcccactccattcgaaaggcaggcgaacgagacacctgaacagtatcaagagcggcaacgactcttctctgagtacaagaaaattgcagatgaaatcgccaaagtctacaaagagaaaagcgagattgacacaaaactgagagagctcaagacccagtacaacggatcatgggatgaggaaaggattcggaaggatatagctcaacgcataatgaaggagagcaaggaaagacgggaacagagaaagaaacaattagagctggccaaagaacaaaagtcctctgcctggaaaaagaaaaaggaggactctatcgtttacattgggaacgggtattcgtcaatgctgcattataaatccggtaatcaggatcgtctggttgcaaatggcttgcccatcatcaacactgatcgcgagctagctgatttcctgggcgttgaatatagagcccttcgcttccttgtgtatcaccgggacgtagtgacgatggatcactaccaccattacaaagttccaaagaggaagggaggcacgcgaaacatagcggcgccgaagaaggtgttaaaaaacgtgcagaagaagatcctggaggggattctggaaaagctggcttgtcaggataatgactgcctcggaaataataggttttcgaatgcatgtagtgacaacgcgcacggctttataaagggacgttcagtggtcacgggcgccgacatccatgtgaaatcccccgctctcttgataaacatggacatagaggacttcttcccaactattactttccagcgagtgaggggtatgtttgtcggatttggctatagcggctacattgcaagcctgcttgcaatgctctgtacatattgtgagcgtatggaaatcgaagtgaatgggaagaggaagttcgtcgccaccaccggcagaattttgcctcagggaagccctgccagccccatgataactaacatcctctgcaggtccttagacaagagactgaatggtctggctagtaagtttggctttatctataccagatacgccgatgacatgtcttttagtacaaaggaaaccgtgctggccgatgctggcaaactatgcggacttgtgaccaagatcatcagtgatgagggattcaagctgaacttcaaaaagactcggttccttaaaaagaataactgccagagcattaccggtgtcgtagtgaattctcaccagttgggtgtctccaaaaaatgggttaagacattgcgcgcagccatttacaatgctcgcaaagcaatggccaaagggaaagtaccttacgaaatcgtctccgagatctccgggatggccgcttggctgaaatgcgtgaacgaggaacgatacaagtctattattacagacgcctatgacctcatccgggacatcaacaagattatttga

SEQ ID NO: 13609 - RNA, 1485 nt, synthetic construct
  source 1..1485: mol_type = other RNA
atgatcgaaaacaatcgtgtacctaaggacaaaaaagctaattaccgtgagctggtgaatcagatgggaaagaaggagttcactctcctaaaaatgcaggagtacggcttttggcctaaggatctacccaccccatatgagatacagaaaaatgaaacaccggagcgctacgcaaaaagacaaggtcttcttaaggagtaccaaagactgatagaccagattgccaaactttacgaggagaaggacgatattaacaagaaactgtgggaactcaagaaggagtacgacgacacatgggacctggagaaaattcggttagatattagccagaagatcatgcgcgaatccatcgaacgcagagctgagagaaaaaaacagcgagagctcgaaaagcagaaaaggtcactggattggcaacagaagaaaagtgagcagattgtgttcattggacgtgggtattctagcctgatgaacgatacgcaaattgacgaggaaaagctgaagacgcaggagcttcctatcatcaagacagatcgggacttggcagaggtgcttgggatcgactacccatccttgcggtttctgacctatcatagggaagtcgtgtctgttgaccactatcaccattttaaaatcccaaagaagaagggcggcgaaaggtcaataagcgcacccaagtccaagctgaaaaccgctcagagagctatcctcgagaagatactctccaagctgaacatcagtgatcaagcgcacggattcttgaaggggcgctccgtcgtgtcaggagcccaaacacatatttctcagccagcgctcttgatcaatatggacctcgaggatttcttccccactttaactttcgaaagggtgctgggcatgttcagggcctttggctacagtggctatatctcttccttgattgcaatgctgtgcacctattgtgagaggatggaaatcgaagtaaaaggcaaaccgaagtatgtcgccacatccaagcgaattcttccccagggatctcccgcgtctcctatgatcaccaacatcatatgcagggatctggacaaaagactgaacgggctggctaagagctttggctttatctacacccggtacgccgatgacatgagctttagtattaatgaggtgagtgatctcaacgaaggtcgcttctgtggcctggtttcgaaaatcgtatcagaggaagggtttaagataaacaaggcaaagacccggtacctccggaaaaacaactgccagagcgtgactggtattgtcgttaataacgaccagttagccgtgcgcaaaaaatgggtcaagcgattccgggctgccatttataatgctagaaagcagaaagccgcaggggagctatcaaacgccactaagaatgagatcagcggaatggccgcctggctgaaaagcgtgaatgaagaaaaatatcgagacatgatcggtgctgtgatggatattgttaaagaagattga

SEQ ID NO: 13610 - RNA, 1461 nt, synthetic construct
  source 1..1461: mol_type = other RNA
atgaccgaaaacactaaacaggactataggacgctaataaatcagatgggcaaaaaggagtttacaattatgaagatgcaggaatatggcttctggcctaaagatctccctacaccatacgaaaaacagctgaacgagactccggagcagtatagtaagcgaaaagcactcgttgaggattacaagtcaatcattgaaagaatctccaagctgtacaaagagaaacaggagattaatgacaaactgcgggatctgaggaagaaatacgacgagacatgggacattgaacggattaggaaggatattgcgcaaaccatcatgaaggagtctatagcgcgacggacagaaaagaagaaacaaagagaactcgagaaacatgctaaaagcgaagcatggaaaaagaaaaaggccgagcagatcattttcataggtaaaggctatagctcctttctgtacgataatgaaactgatcagcccaaactcgagttacagggtcttcccgtaatcaagtccgatattgatctggccaactttcttgagatcgactataagaagctccggtttttgtcataccacagggacgttgtcaccgtagaccactatcaccgttacaccatcccgaagcggaaggggggaatgcgtaacatcgccgcacccaagcccatcctgaaatccgtgcagcgcaagattctggaggacatattgaataaattcagtctgtcccagcaggcccacgggttcatcaaggagcgttcaatactgagcggcgccctggcacataatatccaacctgctttggtgataaacatggacatcgagaatttctttcctaccatttcattcgaacgggtgcgcggaatgttcaaatctgctgggtacagtggttttataagctctctgctcgcaatgctgtgtacgtactgcgagagagtgtccattgaggtcaaaaataaaacccgctttatcgctaccacgaagagaattcttcctcaaggaagcccagccagccccatgattaccaacattatctgccgacggttggatcaacgcctaaacgggctggccagcaagtttggtttcacatacactagatacgccgacgacatgagctttagtatcaatgatgaaacaaacgtgaaggtgggaagattctatggcctcgtttctaaaatcgtgaaggatgagggctttgagattaacaaggaaaagactcgcttcttacgcaagaacaatcggcagtctatcacaggagtcgtggtgaacaatgagaagcttggggtcaataggatgtggatgagaaggttcagggctgccatccataacgcctccaaattaagaagtaatggcgacctgccaatcgaagtgaagcgcgaattgtcaggaatggcttcttgggtccgatcggttaacccagaaaggtataaaaagcttattgaaactgcgatggaggtaatcaagtga

SEQ ID NO: 13611 - RNA, 1491 nt, synthetic construct
  source 1..1491: mol_type = other RNA
atgaccgaaagcaacgacattcagaagaggaccaagtccgattatcgggaaatgatcaataagatgggtaagaaggagttcacgctcatgaaaatgcaggaatatggcttctggcctaaggatttgcctaccccttacgagagacaggagaatgagacaaaggagcattacgaggctcgcaagcaactacttaagaaatataagggaatcgtcgatcagattgcagacctgtaccaggaaaaggctgacattaacaagaaactgcgggacttgcagaaacagtacgacgaaacttgggatattgaaaaaattcgcaaagacgtagccaaacagatcctcaaggagtcagtgacaagaagggcagaacgtaaacggcagaaggaacttgagaagcaaaggcgatctgaggcctggaaaaagaaaaaagccgagacgatagtgtttctggggaagggatactcatcttttctgaatcactttgaaaccgatgaaagcgcgctgcagagttttcagttgcccatcataaaaaccgacaaggacctcgccgagttcctgaacatcgactacaaaaagttacggttcatcacctatcaccgagacgttgtcgacatcgatcactactttcgttacactatacccaaagcctccggggggaaaagactgatcgcagctcccaagaacatcctgaaatcggctcagagaacaatcctgaacgacattctcacaaatattccaatagacgagcacgcccatgggttccttcagggcaagagcatcataactggagcaaagtctcatccaatccaaccggagctgttaataaacatggacttggaggaattcttcccaagtatcacatttgaacgtgtccgaggcatgtttcattcttttggctattgcgggcatgtgagcactctgctggccatgatatgtacttactgtgaacgaattcctctcgaaatcaaggataaagagaagtatgtggccgttagtaagagaatactaccacaaggctcccctgctagccccatgattacaaacatcatttgctataagctcgatcggcgcctttcaggactggcaaaaacctttaatctgacttactcccgctatgcagatgatatgtcattcagccttaaggacaaaaacgaggcggaggtgaatatctctaggttcctcggcctggctatgattatcattaaggatgagggtttcaagattaatcacaataagacacggtttctgcgccagaacaatagacaggcaatcaccggaattgtgatcaacaaagataggatcggggttccaaggaaatggatcaaacagttcagagcggctatttataacgccgagcaactgcaaacgaatggtggcttgccgggcgaaattaagagggagatcgccggaatggcctcctgggtaaaatccgtgaatcccgaacggtacaagaaatacttaacccgcgctcacaacctcctaagtgagaaatga

SEQ ID NO: 13612 - RNA, 1350 nt, synthetic construct
  source 1..1350: mol_type = other RNA
atggccatccagcgtcagaccgaccccagcgacttgtggagggccataatccaagcgggcggaatccagccctacattgatgctcagctcgctgagcgcggctttctggtggccagaagggagacagacggcctgagtgagcgggaactggccgactacaagaagtccctcaaagccgaggcccaggagagagcacgactgagacgggaagcatgggccgcataccgggcagagcatattgtccacctgggggatggagtgtactggaacgacgaaccgggccccgataagtgggacttgccaaacgcagaggaaagagccgccgagaatgagcttcctcctctagactctccgaggcaactggctgacgcccttgggttgaccattcctcaactgcggtggttggctttccaccgcgaagccgcgacgcgcatccactataggcgcttcaccattcctaaacgagacggaagtgaaagagccatttgggcaccaatgccccggctgaaaagggctcagcattggatcctacgcaacgtagcggaaaaactcccagtgcatggggccgtgcacggttttgtcgccgggagatccatcttatccaatgcaagcgcccatcacgatccaaaggttgctgtgcgaattgaccttaaggatttttttccaactgtcaccctgcgtcgggtaaagggtctgttcagaaaggccggctatcgggaacacgtagctacactcctggctcttatctgcaccgaatcacccagggaaatcgtgcagaacgagggggctacctattacgtggctctcgggccgaggtgtctcccacaaggagctcccacatctccagcactcacaaatgccttatgcctgcggctggatcggcgcttatcaggcttggcacgcaggcagggttggagatacacacggtatgcggatgatctgactttctcccgaccctctgactttggagggcctcctgctatcggaaaactcctgggctcggtgcgcagaattgtggaggcggagggcttcgcagtccacgatggaaagactgctatacgtaggcgcggcggtcgtcaggcaataactggccttgttgttaatggcgacagaccccctcgtgctactagggagttcaaaaggaacctacgagccgccatacataatctcgagtccggacgagcgacgccagaagccgaaccaccgcaggtgcttgttggtcgggccgcatttgtcgctatgagcgaccctgcactggggttgagcttactggacagactgagcagagccaccgagcgggatggaagtggcgatgattcaaggtctgagccccctcgccccgagtcatga

SEQ ID NO: 13613 - RNA, 1314 nt, synthetic construct
  source 1..1314: mol_type = other RNA
atggccatgcaacggcagactaatcccttcgacctctggcggagcattgtccaggcgggaggaatccagccatacattaacgcccaattgtcagagagaggatttctggtcgcgcgtagagaaactgacgggatgagcgaaagagaactcgctgattataaaaaatccctgaaagctgaggctgccgagcggaggcgattacgacgtgaggcctgggccgctttcagagcagaacacatcgtgcacttgggcgacggcgtctactggagcgacgaacccggtcctgatagatgggatcagcctaacgccgaggtacgcgcagccgaaaacgagctgcccccacttgattcaccaagacagttggccgaagccctgggcctcacgatacctcagctgcgctggttagccttccatcgggacgctgcacgaaggatccattaccggcggtttacaattcccaagcgcgacggcagcgaaagagctatttgggcacccatgcccagacttaagagggcccagcattggatcctgcgcaatattgctgagaagttgcccgtgcacggagccgcccatggatttctgccagggcgctctatcctgagcaatgctgcgccgcactgtgacagtaaggttgtggtgcgcatcgacctcaaggatttctttcctacagtcactcttcgacgggtgaagggccttttccggaaggcaggctaccgagagcacgtggccaccctactggctttaatatgcacagagtcgcctagggaaatcgtggaacaggatggtgaaacatattatgtggccctgggtccaagatgtttgccacaaggagccccgacctcccctgcgatcactaatgcactatgcctgaggctcgatcagcgcctgtcaggcgtagcgaggtcccaaggttggagatacacaaggtatgcagacgacctcacctttagtaggcccgcagattccaaagaggccccagggatagggcggctcttgggaaccgtcaggcgcgttgttggggatgagggcttcaccattcacgacaaaaagaccgccgtggggcataacggaggcaggcagagggttacaggccttattgtgaacggggatcggacccctagagcacccagggagtttcggcgaaatctgcgtgctgctatccacaacctcgtcactgggaaagagtctccgagtgctgagcctccctctgtactagccggtcgtgctgccttcgtggcaatgacggacccttctctgggccgcgcaatgctggagcgcctgtcacaggctgtggagagatccccagaagcatga

SEQ ID NO: 13614 - RNA, 1305 nt, synthetic construct
  source 1..1305: mol_type = other RNA
atgtcccggaccacatccagaacgaacgatcccatgactctgtggcgggccattgaacaggccgggggaacacaggcgtatgtggaggcacagcttgccgagcgcgggttcctcgtcaagaggagggagacagataaaatgtccgagagagaattggacgcatacaaaaagagcttgaaggccgaggctaaagagaagagagccttacaggcagacgcttggagagcttacaagaccagccatatagtgtacctgggcgaaggtatcttctggaaggatgacccaggcggtcccgataagtgggatctgcctcacgcagaagagcgggcagcggagaatgaactgccccctctagactcacctcgccagctcgccgaagccctagagctgagcctcagtgaattgcggtggctcgccttccacagagatgcagccactaggattcactaccggcgtttcactatcccgaagcgggatggctctgaaagagccatttgggcccccatgccaaagttaaaaagtgctcaacattggatcctgcgaaacattgcagagaagctcctggttcatgggagtgtgcacgggtttctgcctggcaggagcactctgaccaatgcggcagctcatgcgaaccccaaagtggtcgttaagatggacattaaggacttttttcctacggtgaccttgccaagggttcggggaattttcaggaaagccgggtatcgagaacaggtagccacccttctcgctctgatctgcaccgagtccccaagagaggtggtggaacacgacggacaaacctactatatcgcattgggccctcgttgtctgccacaaggagctcctacgtcccccgctcttacaaatactctttgcctgaggatggaccaacgcctgtcagctctggcgaaacgctttggatggcgatacacacggtatgctgacgatctgaccttctctctcccgcatgatcacaaagaccagcccagactgggggccttggttggcaccgtccgaagagtcgtggaagccgagggatttacaatccacccctctaagacacgcgtagctcgatcaggcgcccgtcagactataaccgggcttgtggtcaatggtgatcaggccccacgcgctccgaggaaatttcggcgcgaactcagggccgcaatccacaactcgcgcaacggcaaacctttacatgagggagagagcccaacaactctcgccggctctgcagcttacgtgtatatgaccgaccccgagctaggtgccaagctgcttgacgctataaaacaggaggcatga

SEQ ID NO: 13615 - RNA, 1320 nt, synthetic construct
  source 1..1320: mol_type = other RNA
atgtcccgtgcaactgacctgctgtcactgtggcgggcaattgaacatgccggtgggatcgatgcgtacgtgaatactcagctcgctgagagggggtttttagtggcccggcgcgacgtcgatacgatgagcgaccgcgagagaactgcatacaagaagcagctcaaggaggaagccgcccaccggagagagcttaagcgtgaggcatggaaggcttatcgggcaagacacatcgtacacctgggagaagggatttattggaatgaccaggccacaaaggatccctgggacgcccctgatgcagaggagagagccgccgagaacgaactcccacctctagacagtcctcgcgatctcgctgaagctctgggactgaccattagccaattgcgatggcttgccttccatagagacgcggcgacaagtatccactatcgcaggttcacaataccaaaacgagatggatctgagcgtgccatctgggcaccactgcctaccctcaaggccgcacaacactggatcctgcgaaacattgcagagaaactgccagtccatggcgccgcccatggtttcttggccggaagatctatactcagtaatgctagcaatcacgtggactctgctttggtcgtgaaaatggacctgaaagacttttttccgtccgtcaccttccggcgcgtgaaagggattttccgaagggctggctaccgggaacaggttgcaactcttctagcactgatatgcactgaggctccccgcgaaatcgtggagcagggaaaaactacctactacgtcgccttgggtcctagagctcttccgcagggcgctcccacatcaccagctctcacgaacaccctgtgtctgcgcctcgacaggaggctggatggccttgctcagtcattgggatataggtacaccagatatgcggatgacctcacatttagcctgcccagatcccacgaaggggatccgaaactcggcaccttacttgggaaggcccggcgggtggtagaatcggagggctttaccgtgcggctggagaaaacaagagtggctaggcccggtgcgcgtcagcaagtgaccggtttagtagttaatggcgctgccagtcctcgcactcctaggacattacgacgccagttgagggccgcagttcataacctgcagacaggcaagcctaggcccgacgcggatactccagaacggttggccggcctgatctcatacgttgccatgacagaccccaccctgggacaagccctacaggcccagtggaccaacccctccaagccaacgagctctgatgatagcccctcctga

SEQ ID NO: 13616 - RNA, 1296 nt, synthetic construct
  source 1..1296: mol_type = other RNA
atgtcgcggaccactgatctgacgtccttatggagagccattgaaagggcgggcggtatcgactcttatgtgaacggccagttgtcagagcggggatttctggtggagcggagagaaattgacacactctccgatagggagcgggaagcctataagaaacagctgaaggaagaggcagcacgcaggctggagttacgacgcgaagcgtggcaggcgtataaagccaggcatatcgtgcaccttggcgaagggattttctgggacgaccatgccaccgaagacaaatgggatgcgccagatgctgaagagcgggcagccgagaatgagctccccccactcgacgggcccagagatcttgctgaggctttgggactgacaatacctcagctccggtggctggctttccatcgagatgctgctacctccatccactacgcaaggttcactgtagccaagagagacgggtccgaacgagccatctgggctcccatgcctactctgaaggccgcccaacgctggatcctgcggaacatctcagaaaaactccccatacacggcgcaagccacggtttcttgccaggccgaagcatcaagagtaacgcacaggagcatgtagggtctaagctggtgctgaaaatggacctggctgatttttttcccagcgtcacctaccctcgcgtgagaggtattttcagaagggccgggtacagagagcaggtgtcaacgctgcttgccctcatttgcacagaggcacctcgcgaagtggtggaggaaggcgggaccacatactatgtggcccttggtccccgttgtctgccacaaggagcccccactagtccgtctttaaccaacactctctgcttgaggcttgaccgccgcctatccggactggccaggagtctgggctggagatacacacggtacgccgacgacctgacatttagcttgccggcttctcacggaggcgagcctagactaggggctctccttggcggagctcgtcgggtagtcgagagcgagggttttgccgtcaggttagataagactcgtgtggcacgagctggggctcgccaacaggttaccggcctggtcgttaatggtgaaggacctgcccgcgttccacgtcggttgagacgacagctaagggccgccgcccacaatctggaggttggcagagcgggccctgatgcagacccggttgatagactcgcaggactggccagcttcgtctgtatgaccgatccagcactcggagcggctctgcttggaaggttgcgtggcgggtcagcagggtga

SEQ ID NO: 13617 - RNA, 909 nt, synthetic construct
  source 1..909: mol_type = other RNA
cggtggctcgcctaccatcgggatgctgccacaaagttgcactaccgccgcttcgtgatcccaaaacggggcggaggggaacgagctatttgggcccctatgccacttctcaaggccgctcagcactggatcctccggaacgtggcagagaggttacccgtccatggtgcagcccacggtttcctagcaggccggagcatactgtcaaatgcagccgctcacccggatgcgagaatcatcctgaaaatggacattaaggagttctttccaaccgtttctctgacccgagtcaaaggcattttcaggaaggccggctatagggagcaggtcgccacactcatggccctcatctgtacagaggccccccgtgaggtcgtggaaagagatgggaagacatggtacgtgtccttaggacctagatgcctgccccaaggggctcctacttcccctgctcttaccaacaccctttgcctccgattggacagacgactagcagggttggctgcgaaactgggttggaggtatacgcgctatgccgacgatttaacctttagcctgccagacggacacaaggatgaacccaagacagggcctttgatgggctttgtaaagcggatagtggccgctgaaggcttcgcggtacatcccgacaaaaccagtgtgaggagaaaaggaggcaggcaacaggtgacggggctggtggtgaacggaggaggtccaccgcgcgttactcgtgatctgaagagacggctgagggcagctgcccacaatctggctcgcggcaaaggcctgaaagagggcgagactcctgccagactggaaggttttgcagcctacgtccatatgactgacgagaagctggggggaaagctccttgcagcgtttcgtgggggagttcgccagggctga

SEQ ID NO: 13618 - RNA, 1401 nt, synthetic construct
  source 1..1401: mol_type = other RNA
atgaatcaaaccaaccaagatcctcgtccatcagttgacctgggtgctttgtggagagccatcgagcaggctgggtccatccaggcttacgttaaccagcagctgtccgcacgaggttacctcatagagagaagggatacagcccggatgtcggcagctgaactcaaacgttacaaacagcagctgaaggatgaggcggtcgagaagcgcaggctgaaagcggaagcatgggccgcttacaaggccgcacatatcgtgcacctcggggaagggattttttttaacgaggagaatgacttcgacaggtttgatctgagggaacccgaagcccgagctgccgagaacgaactcccaacactggacaagcctgctcaactggcggaggcactgggtctgagcgtgagtgaactcagatggctgactttccatcgtgaggccgcagaaagcattcactaccagagatttaccatccccaaacgccgagggggagagagggagatttgggcccctatgcctaaactgaaggccgcccaacggtgggtgatgcgggagatcgtagagcacttaccagtgcatggggccgctcacggattcattgccggacgctcaatccttaccaacgcccaggtccatctgaatgcagaaatcttagtcaatttcgatctgcaggactttttcccgaccgtgacatggagacgggtgaaaggcgtctttagaaaagccggttatcgtgaacaggtagcgactctattggccctgctttgcactgagcccccacgcgaggttatcgagcacgaggggaagagatattatattgcactcggtcagcggtgtttgcctcagggagcgcccacgtctccggctataacaaatgctctgtgcttaaggttggatcggcggctctcaggacttgcccgcagtctgggctggagatacactcgctacgccgacgacctaaccttctccttgcctgccagcgaggcgaagccgaaagcaaagaagggcaaggctaagcccactaaagcaaagcccaccaaagcaaagaaggcccagggcgctcttaccggagaagcagcattggcacgccttatggggggcgtgaaggccattgtcgccgctgaagggttcgctctgaatccagacaaaacggcaataaaacgcccctctggacggcaaggcgttacaggactcgtggtaaacggcgatggaagcccacgcgttccccgagaggtgagaaggaggttgcgggcggccctacataacctcgaacgaggccagccactgagagagggtgaatcttatgctcacctggccggcttagccgcattcgtgtatatgacagaccctgctctgggcggcgctcttcttaagaggattggggccctcgccaggcagggctaa

SEQ ID NO: 13619 - RNA, 1302 nt, synthetic construct
  source 1..1302: mol_type = other RNA
atggccacaaggccaaatcttgtgactcagtgggtggaactttggggagcaatcgctcgagcagggggcatcgatgcttacatcactgcccagctcacagagagagggtatctggccaaacggagatcgaccgatggtatgtcagctgctgagttaaagcgctacaaggcagagctcaaacgcgaggcagcggagaggcgcaaactcaaagctgatgcttggcaggcttatcgggccagccatattgtgcacttgggggaaggcgtcttcttcaacgacgacctggacttcgatgccttcgaccttgcagagccagaggccagagctgccgagaacgaactccccaagttagataaaccccagcaagtggcagatgccctggggatgacgctggccgagcttcgatggctgtctttccaccgagaagccgccaccggggtacactaccgaaggttcgagattcggaaaagatccggagggatgcgagcaatctgggcgcctctacccaggctgaaggcagctcagcggtggatactgagggagattgtcgaacatctcccggtacacggggcggcccatggttttcttgcaggccgttccattcttactaatgctcaagcccataccgggagcaagctgatcctgaacgtggatctgaaggacttttttccttcagttacatggagacgggtgaagggactgttcagaaaagctggctaccgcgaccaagtcgctacactgctagcattgctgtgcacagaagctccacgggaaatcgtggagcacgagggcgagaaactctttattgccttagggcctcgttgtttgccacagggagccccgacttctcccgccataaccaacgccctctgcatgcgcctggataggagactggcaggcctggcgagaagtctgggatggcggtacacgcgctatgccgacgacttaaccttctcccttcccgcagaccacaagggagcccctggattgagtaagctgctgggcgcattgcacgctgttgtggccgccgaaggctttgccgtcaatcccgccaagactagggtgtctcgtcccggagcacggcagaaggttaccggcctcgttgtcaacggtgacgccgctccaagagtccctcgtgcgctacgcaggaaactccgcgctgctgcgcacaatctcgctcagggtaagccactgcctgcaggtgaaagcgtggcccagttggctggctatgccgcatttgtgcatatgaccgatccggtactgggcgccgcgttgctaggaaagtttggcgaacataggtga

SEQ ID NO: 13620 - RNA, 1311 nt, synthetic construct
  source 1..1311: mol_type = other RNA
atggccacaaggcccaacgatcggcaggccctttgggctgcaattgccagagccgggggcatcgatgcatacgttcaagctcagctggtagccggcgggttcgcagctgaacggaagccaactgacgggatgtcaaagagggagctggctagatacaaagccgaactgaaagccgaagccgccgagaagaaaaggctgaaagccgaggcctgggccgcatataaggctactcatatagtccatctgggcgagggagtgtacttcaatgacgctgatgacttcgatcgattcgatctcgccgagcctgaagcaaggctcgcggagaacggcttgccgaggatcgacgatcctcaggccctggctgaagctctagccctttccgtgcccactctgcgctggctcacgtttcaccgtgacgctgccacaatgctgcactatcggcgcttcaccatccccaaaaaatccggcggggaacgagcgatctgggctccaatggacacgctcaaaagcgcacagcgatgggtgctgagacacattgtcgagcctctacccgtccacggagcggctcatggcttcgtccctggaagaggtatcgtgtctaatgcacaagcccactcggaggctcgcatcttgataaatgtggacctcaaggacttttttccgactgtaactgttcggagagtgaagggagtttttcgaaaggctgggtaccgggagcaggtagcaaccctgttggcaatgctgtgtaccgaggcacctcgagaagtcgtgcgccacggcgaaaccgactactttattgctcttgggccccgttgccttccacaaggagcccctaccagtcccgccctgaccaacaccttatgcttacgtttggatcggaggctgtctggtctagcccggcaaaggggttggcgctatacacgttatgctgatgacctcaccttcagcctccccgttaaggcggctaagggagccgatggtaatgtgggcacactgctgggtgcagttagagccattgtcgaagcggaggggtttgccttaaacccaaagaaaacacggatttgtagaccaggggggcggcagaaggtgacaggactcattgtgaacggagctgaacctcctcgcgcaccaagggccctgaggagaatgttgagggccgccgtgcataacctggagcagggaaaaccgcttcccgaaggcgagactgtggctcgccttgcgggctacgcagctttcatctatcagacaaatccacaggagggcgcagagttgctcagacgctttgcagcgttcgccggcgagcaggcatga

SEQ ID NO: 13621 - RNA, 1302 nt, synthetic construct
  source 1..1302: mol_type = other RNA
atgagtacccgcaccacagaccttgccgctctgtggctggccattgccgaagctggtggaatcgataactatgttcagaatcaactggtggaacatggattcctcgtggaaaggagggagacagacacaatgagcaaggccgagctgaagaggtataaggcacagctgaagagggaagcagccgagcggcgggagcttaggaaagccgcttgggctgcctacagagagacacatatcgttcacttgggggatggtgtatactataatgacgcagcgactatggaccgatgggacttagatgagccggaagcccgggcagctgcaaacgaactcccccgactggacggccccgatgatttggccaaggagctgggcattaccgtggcacagctgcgttggctggcggttcatcgcgacgcagcaactagaattcactacacccgcttcaccatcccaaagcgtgatggcagcgaacgcgcaatttgggcccctttgccgcgcctcaaagctgcacaacggtggatcctccggaacgtcgtggagcatttacccgttcacggggccgcgcacggctttttagctggcaggtccgtagttaccaatgctgcagctcacgtgggctcaaaattgattgttaacattgacctcaaggacttctttccaacgatcacatggcgcagagcccgggggatgttccggaaagcgggctatcgggagcaggtggcgactctcctggccatgatatgcacggaggccccaagggaagtggtggagtgggaaggtcagtcctactttgtagcccttggtccccgctgtctcccccaaggagcaccaacgagccctgccatcaccaacactatctgcctgcgtctggacagacgcttgtcagggctcgcgcgcagattcggatacacatacacccggtatgctgatgatctgactttttctctgcctcttgcccacactggagaaccccgagtgggagccctgataggcgctgtggggcacattgtcagggccgagggctttcaagtccacccatccaaaacaagagtgcagcatactgggagacgacagcaggtcaccgggctggtcgtcaatggcagagagcagcctagagtgcctagaagtctgaaacggcagcttcgagctgcagtgtacaatctacgacgtggaaggccccttcctgccggtgagaggttcgaaaggctgatcggttatgctgcttggatacatcaggctgagccggagttggggtctgaattactcgccgccctaggcggactaaacccaaccgcctga

SEQ ID NO: 13622 - RNA, 1113 nt, synthetic construct
  source 1..1113: mol_type = other RNA
atggccgccttatggagagggatcgacgaagccggctcatgcgaaaactgggtgcaacagcagctcgtggagcacgggttcatagttagccggagggacacagataacatgtccaagagggagctcgcgaactataaaaaacaactgaaacgcgaagctgccgagaaaaaggcattgaagaagaaggcttgggaggcgtataaggccaatcacattctgcaccttggggaaggcgactggtggaatgatgcagcaacattcgacaagtgggacttgcccgagccagaagccagagccgctgagaatgagctgccgcaactcgatagtccagacgatctggctgaagcgctggggctgaccatcaaagaactgcgctggctatcttttcatcgggatgctgccaagacgattcattacaggcggtttaccatccccaagcgaaacggatctaaacgacccatttgggctcctctgccgaaactcaaagaagcccagcggtggatactgcacaatatcgtggaacatctccctgtgcatggggcagctcacggcttccttacagggaggggtatcgtgaccaacgcccgcccacatggaggctcagccttactgcttaacatcgaccttaaggagttctttccaactgtgacctggcgaagagtcagaggcgtgtttagaaaggcaggctatcgtgagcaggtagctaccctcctggctctgatatgtaccgaggcaccccgcgaggtggtagaattcaacggcgagacatggtatgtggcccttggtcctaggtgcttgccccagggtgcgcctaccagtccagctttgacaaataccatttgtctgcggctggaccgtagactaagcggcctcgccaaaaaaaatggatacacttacacacgttacgccgatgacttaacttttagcttgccccacggattcactgggccgccaaagacgggcatgctcattggtgcagtcaaaaagatcgtcgtggcagagggatttgccgttaaccctgataagactagggtactgagatccggcggacggcagcaggttactggacttgtcgtcaatggtcctcgcggaccccgcgttcctaggaagtga

SEQ ID NO: 13623 - RNA, 1320 nt, synthetic construct
  source 1..1320: mol_type = other RNA
atgacaactgcacctgttgcccccgctcctagcgctgaccctcaggttctgtggcgcctaattgtgcaggccggtggtatgaaagcatacatcgacggccagctcaaggagaaagggttcctcgtaaccaggagggacgccgattctatgtcagacagggagaaggacggatataagaaggccctcaaacaggaagcggatgaacgacgaaaactgaggagagagacatggggagcatacaaggcaaaccacattgttcacctgggtgagggagtattttggagtgatgatctcgctcccgataaatgggacacccctaatagtgaagagcgagcggccgagaacgaactgcccgctatagatcggcccgagcagctcgccgagttactaggggtcacaatcccccagctgaagggcctggcatatcatagggacgccgctaccagcctgcactacgtccgcttcacgatcccgaaaagggatgggactgagcgaccaatctgggccccaaagaaaagactgaaagctgcccaaagatggatcctgcacaatatcgtagagcggttacctgttcacggcgctgctcagggcttcctggtgggtaggtctatcctatccaatgcggcggtgcatgctaacgccaaggccattctcaagatggacattaaggagtttttccccaccgtcaccgtgcgtagagtgaaaggggtatttcgacgcgccggctacagagatggaatatccacactcttggccttgatttgcaccgaggcaccacgggaggtggttgaagtcgagggcgagacatattacgtgtcactaggcccacgctgcttgcctcaaggggcacctacgtcgccatctttgactaacgcactgtgtatgcgccttgatcgtcggctcgaaggattagctaagaagctgggctggcgctacactaggtatgcagacgacctgactttctcccttcccgccgaacataaggggaagccgaggcttgggaccatgatcggatgtgtcactcggattgtcgcagctgaaggctttgaagtgaaagcggaaaagacaagagtgcatcgcacggggggacggcaaagcgtgactggactggtggtcaatggagatggcccccctcgtgtttcacggaccgtgagacggcagttgagatccgccgtgcacaaacttaagaccggcaagccactgaaagaaggcgagagcctggccagacttagtggttatgctgcctttgtgtacatgaccaatccagacctagggaaaaagctgctcgccgacataaacggcgccacaggggcaggttga

SEQ ID NO: 13624 - RNA, 1329 nt, synthetic construct
  source 1..1329: mol_type = other RNA
atgtcaactacaacaccagcaccatcgcctgatgctcagaccctctggcgcctgattgtgcaggcaggaggcatgaaggcttatattgatggccagctgagggagcgggggtttttggtcactcggcgtgatgccgatgcgatgagcgaccgcgagaaagacgcatacaagaaagccctgaagcaagaagccgaggaacggagaaagctgcggcgagaaacttggggagcctatcgagccaaccatatcgtgcatctaggagaaggcgttttttggacggacgaacccaaagaggacaagtgggatacacctaattcagaagaacgggccgccgagaatgagctgcctgcattggataaagcggaacaactggctgaggcactcggcgtcactattccccaactgaaagggatggcttaccacagggacgccgccacaagcttgcactatgtccgcttcacgattcctaaacgcgatgggaccgagaggccgatttgggctcccaagaaacgcctcaaggctgcccagagatggatactccatcacatcgtggagaggctgccagtacacggtgcagcccagggctttctcgttggacggtccatcttatccaacgcgctggtccacgagaatccaaaaatactactgaagatggacatcaaggagttctttcctactgtgaccgttaaaagagtaaagggcgtgttccgcagggctgggtacagggacgggatcagcacactgctggcgcagatttgcaccgaagcacccagggagatcgtgaacgtggaaggtaagacttactacgtgtctcttggtcccaggtgcttgccccaaggtgcccctaccagtccggccataaccaatgccctttgtctgagacttgacagacggctcgcaggcttggcaaagcgctatgggtggcggtacacgagatacgctgacgacctgactttctctctcccaatggagcacaaaggccagcccaagcttgggtccatgttaggatgtgctagacgaatcgtcgaagctgagggatttgaggtgaagaccgagaaaaccagggtacatcgaactggcggaagacagagcgtgacaggcctggtcgtgaatggagacaacacaccgcgcaccccaagaaaactccgacgtcagctgcggtctgccctacataaactcaagaccggcaagcctctgaaggatggggaaagtctggcccgtcttacaggttatgctgccttcgtgtatatgaccaaccaggaattgggaaggaagatgcttgcggatttacacggcttcgaggataaacccgaggggccagcagtttga

SEQ ID NO: 13625 - RNA, 1314 nt, synthetic construct
  source 1..1314: mol_type = other RNA
atgaccactgctgctcctgctccacctccaacggcccctgatctggccactctatggagactgatcgtgcaggccggaggcatgaaagcctatgtcgacgcccgcctggaagagcggggttttctggtcgtacggagggacgctgatgctatgagtgacagggaaaaagatgcttacaaaaaggagctgaaacaggaagcagaggagaggcgaaaactcaggcgtgaagcctgggcagcctataaggccaaccacgtggtgcatctgggtgagggagtcttttggaccgacgaggtcagagaggataaatgggatactccgaactctgaagagcgtgccgctgagaatgagctgcccgcattggataagccagaacagctcgccgaagctcttggagttaccgtgcctcagctgcgtgggatggcatatcaccgcgacgccgcaacctcactgcattacgtaagattcacaatacccaagagagacggcacagagcgtccaatttgggcacccaaaaaacgactgaaggccgcacagagatggatactgcaaaacatcgtggaacggctcccagtccacggtgctgctcaagggttccttgccggacgctctattctgacgaatgcggcagtgcacgtgaacgcaaagatcatccttaaaatggacatcaaggaattcttccccaccgtcacagttagaagagtgaagggcgtgtttaggagggcgggttaccgggatgggattgccacactattgtcgcagatctgtaccgaggcccctcgcgaggtagtggaactggatgggaagacctattacgtgagcctcgggccgaggtgtctaccacagggagcacccaccagccccgctttgacaaacgcgctgtgcctccgattggaccgcagactcgccggcttagctaagcggtatgggtggcggtacacccgctacgctgacgatatgactttctcccttcctgccgaacacgcaggccctcccaagttaggcgcggtcatggggtgcgttcgcaggattgtagcagccgaaggctttgaggtcaaagacgacaaaactcgagtgcatagaacgggcggaaggcaggccgttacaggactcgtggttaatggcgatggtgaaccccgagcctcacggaccttaaggcgccaattgcggtccgctattcacaagctgaagactggcaagccgctcaaagagggggagactgtggcgcggcttcatggctatgccgcctttgtttacatgacagatccaaagctgggtaagaagcttctcgcggacctgaatggagtggagtga

SEQ ID NO: 13626 - RNA, 1305 nt, synthetic construct
  source 1..1305: mol_type = other RNA
atggccacaactaccaccgacccaattgccctttggcagagtatcctccaggcaggcggagtgcgagcctacatagatggacagctgaaggagcggggatttctcgtcgaacggcgtgacactgatgcaatgtctgaccgggagaaggatcagtataaaaaggcccttaagcaggaagcagctgagcggaaaaagctcaaaaaagaggcctgggccgcctacaaaactgctcacatcgttcatctaggggacggcgtctactggtccgacgagagcaaaccagacaagtgggacacaccgaattccgaggaacgagccgcggagaacgagctccctgcgcttgattctcccaaacagctggctgaagcgctggggctgactattcctcagctcaggggcatgtgtcaccatagggatgctgcaaccaagctccattatgtgagattcactattcccaaaagagacggaaagccacgccccatttgggctcctttaccgaagctcaaggccgctcagcggtggatcctccacaatatagtggagcgcttaccagttcacggcagcgcccagggcttccttgtaggtagaagtacgctgtccaacgcagcggtgcacaccaatgccaagatcctgctaaagatggatgtgaccgattttttcccaaccgtcacgtggagaagggtgcgaggagtttttcggagagctggatacagggagcaaattgcaacactgctggcactgatctgtacagaagctccccgcgaaatcgtgcaacacgatgggaagacatactatgtgtcgttgggagcacgatgcctgccacaaggtgcacccactagcccctcattgacaaacgcactgtgcttgaggctggacaggcgattgaccgctctggccgccaagttgggttggcgctacagccgctacgctgatgatatgacattctcattacctgcagatcacgcggggaagcctcagttgggcaaattactggggtgcgtgaagcgcgtagtcaccgccgagggcttcgaagtcaaggacgaaaaaaccagggtgcataggaaaggcgggaaccaatctgtaaccggcctggttgttaacggggacggcactcctcggacgcccagaaaagtgcggagagaactgagggccgccatccataatctagagaaaggaaagccgctgaaagaaggggagactctgcctcgtcttatgggtatggccgcctatgtctatatgacagacgctaagcgcggcaaagagctgcttaccgctctcagacgttttgctgccggtgaatcctga

SEQ ID NO: 13627 - RNA, 1296 nt, synthetic construct
  source 1..1296: mol_type = other RNA
atgaactccacccgcccagatcctctgaccctttggagacagatcacccaggccggaggtacccaggcatatgtcacagagcagctaagggaacggggattcctcgtagagcggagagatgtcgaaggcatgagcgatcgagagaaagaccagtataaaaaagcccttaaacaggaagctatcgagactaaaaaactcagacgagaggcctgggctgcttataaggccgcacacgttgtacatctgggggagggtgtattctggactgatggcgccaagcccgacaagtgggatactccgaatggccccgagagagccgcagagaacgaactgcccccactcgacacgccggaacaactggctgaggctctggggatcacgctggcgcaactgagaggattatgctaccacagggacgctgcgaccagtattcactacgtgcgcttcgccattcctaaaagggacgggagtgaacgccctatttgggcccccctgcctagactgaaggcagctcagcggtggatcctccacaacatcgtcgaacgcttgccagtccatggtgccgcacatggctttcttgccgggcggtccattgccacaaatgctgccgctcacgctagcgcgaaaatgatactgaagatggacgtgaaggagtttttccccaccgtcacttggcgcagggttagaggcgtgtttcggcgggcagggtacaacgagtctattgctacacttctggcattgatctgcactgaggcgccgcgcgaagttgtggacctcgaaggaacaacttactacgtgagcctgggtcctcgatgtctgccccagggagctcctacatcccctgccctcactaatgcattgtgtttacgacttgatcggcgactaaccgggctcgcggcgaagttaggctggcgttatacaaggtatgccgacgatatgaccttttcactgccagctgcccatgccggacccccaaagttaggcgctctgttggggtgcgttaagcgtgtggttgaaggagagggcttcagggtgcatgcagacaaaacgcgcgtggcccgttctggtggacggcaaaccgtgaccggcttggtggtcaatggaacatcgcagcccagagtctctaggaagctcaaacgcgaaatgagggcagccgtgcacaacctagggaaggggaagccactgccagagggcgagtcagtggccagactcctgggctacgcagcctatatctacatgaccgatcctgagacaggcaggaagttgcttgccgatctgaatgcaatacccgactga

SEQ ID NO: 13628 - RNA, 1287 nt, synthetic construct
  source 1..1287: mol_type = other RNA
atgaccactccaagaaccgatcctctgactctttggcgtcagattgatcaagccggtggagtccgggccttcgttgacgctcagctccgggagaggggcttcctggtggaacggagagatgctgataagatgtccgaccgtgaaaaggaccagtacaagactgcgctgaagcaggaagccgctgaacgcaagaccctcgcaagagaggcctggaaggcgtatcaggcagcacatatcgtgcatcttggagacggaatctactggagcgatgacgcgacccctgataaatgggatacgccaaactctgaagagcgcgctgctgagaatgagttgccacccttggatagcccagcccagctggccgaagcattaggcgtgactgtcgctcagctgagggggcttacctatcaccgggacgccgcaacctccctgcactattgccgctttgcaatacccaaaagggacgggagtgagcggcctatttgggccccattaccgagattgaaggccgcccaggcctgggtgctccataacgtggtggagagacttcctgttcacggggctgcccatggttttttggccggcagatctacattaacgaacgccgccgtgcacaccaatgctaacctggtcctgaagatggacgttaaggagttctttcccactgtgacatggcgtcgagtcaaaggggtgtttcgccgtgcaggttaccgggagcgagtagccacactgttggccctactgtgtacagagagtcctagggaagtggtgcagctggacgggacaacttactacgtgtcactcggccccaggtgtttaccccaaggcgcaccaaccagcccagctctgaccaatgccctatgcctgcgcctggacaggagacttacagggctggccgccaaactcggctggcgatacactagatatgctgatgacctcactttctcacttccggctgcacatgtcggtcccccaaggctcggagctatgattggctgcgtaacacgcgtggtagagacagaaggattccggatacaccccgaaaaaacccgggttgctaggcctggaggcaggcaagcagttacgggcctggtcgtcaatggagacgctgcgcccagggcacctagagcattgcgacgccaactacgggccgccctgcacaacagaaaggtgggtaaacctcgacccgacggcgatacagaggctcagctgcacgggctggcagcgtacatctatatgaccgatccggtactcgggcgcaaactcttggcggagatcgatggatga

SEQ ID NO: 13629 - RNA, 1305 nt, synthetic construct
  source 1..1305: mol_type = other RNA
atgaccatgacacgaatcgcagatcctctcaccttgtggagaaatgtggttcaggccggcgggcgacaagcctatatcgctgcgcagctcgaacagcgcggattccttgtggctcgccgcgaaacggatgggatgagcgagcgggaactggcacagtataaacagtccctcaaggcagaggctgcggagcggagaaagctcagacaggaggcctggttggcttacagggctaaccatatagtacacctcggcgatggagtctactggcatgacgaggctaccaaggacaggtgggacctgccctacgccgaggagagagctgcagagaatgagttgcctgctctcgattcaccgcagcagcttgcggatgctttgggcttaaccgtggctcagctgcgctggctcgtcttccatcgggaagctgccacgaggattcactaccatagattcacaatcgccaaacgtgacggcagcgagcgacccatttgggccccatgcaagaaactcaaggctgcacagagatgggtgcttagaaacattgtggagaaactcctgattcacggagccgcccacggatttactgccgggtgttcggtgctgagcaatgctcgccagcacactaatagcaggatcgtggttaaattagacatccgcggtttctttcctacggtgactctgccaagggtacgaggggtctttaggcgcgcggggtatcgcgaccagttagccactctgcttgccctgctgtgcactgaagcccccagggaggttgtcgaacaaaacgggcagacctactacatcgccctaggcccaaggtgcttgccccaaggagcccctacttctccagctcttacaaacgcactgtgtctgcggctggatcggagacttaccggcctggcacaccagctgggatggcgatataccaggtacgccgacgatatgaccttctcattgccagcaggtcacacaggggctcctcgtctgggcacactcctgggaatagtgcaacggatcgtcgaagaggaaggctttcggctacatccggacaagacccacgttgcgcgggccagttctagacagaaggtgacaggtctggtggtcaacggtgatggggtgccccgcgtatcccgtaaactgcgtcgggaacttcgggccgcggcacataggctgaaacatggcaagccattaaaggagggagaatctttggccagactggctggctatgcagcatatattcacatgtccgaccctcaaaggggtgccgccctactggcagcatttaagagtgccgcccccgccacatga

SEQ ID NO: 13630 - RNA, 1308 nt, synthetic construct
  source 1..1308: mol_type = other RNA
atgatgacaacccgaagcgattaccagaggttgttcgacctgtggagagctatcggacaggcggggggcgttaatgcttatgtgcagcagcagctgcgggaacggggcttcgtgctggagagaaaaaagacagatggtatgtcaaaagctgagctctccgcctataagaagagccttaaagaggaggccgcagaaagaagacgcttaaaaaaggaggcatggcaagcatatagggccacccacattgtgcacttgggagaagggatcttttggaacgatgagtctgaccttgacaagtgggaccatccgcatgccgctgagagggcagcggaaaacgaactcccacctatcgacagtccccagaagttagccgaggcaatgggcctgtccctgcctgacctccgctttctgtcttttcatcgggaggctgctgaaagcatccactaccgtaggtttaccatcccgaagcgtaacggctcagagcgagcaatatgggctccattgccaaagctgaaggcagcacagcactggattcttcgcaatgttgtggaacggctggccgtccatggcgcttcccatggtttcttggccgatagaagcatagcaacaaatgccgcagctcacactggggccaagattgtcgtcaaagtcgacctgaaagacttcttccctaccgtgacattgagacgcgtaaagggcatttttcggcgtgcgggctatcgggatcaaatagccaccctgttagccctcatctgcacagaggccccccgagaaattgtagaacacgaagggaagcagtattacgtggcattgggccccaggtgtttaccacagggagctcccacttcacctgccctcaccaacactctgtgccaacgcctggatagacggctcgccggactagcgaaacgactcgggtggaggtacacacgctacgcggacgacctaactttcagtcttccagagtcgcacaaagataaacccaagctaggcgtgctgctgggttctgttggcagaattgctaacgatgaaggctttcaagtgcatcccgataagacgaacgtggctcgaaagggatcccgccagaaagtcacgggtctggtggtaaatgggactggagctcctcgggttcccagggctctgaagaggcagatcagagccgccatccacaatgccggacgcgggaaaccactccaagcgggagagtctctgagtaggcttgccgggtacgctgcctacatccacatgaccgaccctaaacttggtgcaaagctgctccagcagctggccgccattgaggccaaatga

SEQ ID NO: 13631 - RNA, 1302 nt, synthetic construct
  source 1..1302: mol_type = other RNA
atgactcgctcagagcaccagcggctggtcgatttgtggagggccattggaaacgccggtggggtggatgcctatgtgcgagggcagctcagggaaagagggttcgtactggagcggaaagacacagcccagatgtccaaggcccaactggcagcctataagaagtcactgaaggaagaggcagccgagcggaggcgcctcaagaaagaggcttgggttgcctatagagctacccacctcgtccaccttggagaaggcatccattggtccgatgaagctgacgtggatcgcttcgatcacccccgtgccgaggaaagggcagctgaaaatgagctgcccccgtttgacaagcctgagcaactcgctgaggccctcggcctgagtattcctgaactacgctggttagcgtttcatagagacgcggccgagaaaatccactacaggaggttcactatccccaagcgcgatggaagcgagcgtgctatctgggctccactgccaaaactgaaggcggcccagcggtggatactgcgtaatgtgctggaacccatacctattcacggagcgagccatggtttcgttccaaaccgaagcatcctctctaacgccagccgtcacacaggcgctaagctagtggtaaagattgacctcaaggacttttttccaactatttcgtttcggagagtgaagggggtcttcaggcaggccggctacagagacagaatcgcaaccctcctagctctgctgtgcacggaggcaccaagagagatcgtgcaggacggcgacaaagaactctttgtggcactgggacccaggtgccttcctcaaggagcccccacatcacctgctattacaaacatcgtgtgtttccggttggatcgcaggttgacgggcctggccaaaaagttaggctggagatacactcggtacgcagatgatctcaccttctccttgccagcagagcatgtgggcgcccccaagcttggccttctgttgggaagtgtcggccgcgttgtcgctgatgaaggtttccgggtgcatcctaggaaaaccagagtggcacggtctggtgggcgacaggctgtcaccggattagtggtaaatggggccgcatctccacgcgttccccgagaaatccgcagagagattcgggctgtgctgcacaacttgaaacatgggaaacctttacgagacggtgagaatcttcaccgaatagccggctacgtcgcgtatgtacatatgaccaatccggagctggggaaatccctgaggaaacagcttgaagccctggacgcagtttga

SEQ ID NO: 13632 - RNA, 1338 nt, synthetic construct
  source 1..1338: mol_type = other RNA
atggctacgagcacagactactctcgcctggtcgacctgtggcagggcattgaccgagcgggagggatcgataactatgtgcagaagcagctgaaagaaaggggctacgtcgtggaacgcaaagccaccgatgagatgtcccgggttgaactgagccggtacaagaaagcactgaaagccgaggccgccgaacgtaggaacttgcaaaaagaatcatggttagcgtacagagccactcacatcgtacatctcggtgagggcatcttctggaatgatgatcttgacttcgacagatgggacctgcgtaatcctgaggagagggcccgagagaacgagctgccggaacttgaagacccgaaggcccttgcatccgcattagggctgtctatcgcagcattgcgctggtttgccttccatcgtgacgatgctacattcgtccactatcaccgcttcaccattcccaagcgcgacggttccgcacgggctatatgggcacccagtccccgcctaaaggctgtgcagagatggatcctcagacaaatcgtggagcgactgcctgtacatggagcttcgcacggttttatggccggtcgcagcattaagagcaatgcctcagtgcatactggcgctaagattgtggtcaaggtggatctgaaggacttttttccaacggttactctgccgagggttaaagggatctttagacgggccgggtatcgcgagcaggttgctactctgctcgccttactatgtaccgaggccccccgggaagtggtggagattaagggcaagacacactttgtcgcacttggcccccgatgcttaccacaaggggcgcctaccagccctgggttgactaatacactgtgcctgaggttggacaggcgtttggccggactcgccgcgaaactgggatggagatatacgagatacgccgatgatttgaccttcagtctcccaaaggccaagaagacaaggaaaaaaaagggcacaaaagctaaaaaggagcctccacacgtcggggcacttctgggaggcatcgcaaaaatagctgcgtccgagggcttcgtcgtacatcctaacaaaacccgggtggcccggagtggtggaagacaacagataacaggcctggtggttaatggcgatggaccccctagggtgccaagggctcttagacggcaggtgcgggcaaccttgcacaacctcgggcagggaaagccaatgaggtctggcgaaaccctctcacagctggccgggtacattgcctatattcagatggctgatcccaaactcggaactaagctgcgagctcagctcctagctctcgacctgtcttga

SEQ ID NO: 13633 - RNA, 1074 nt, synthetic construct
  source 1..1074: mol_type = other RNA
atggcaacacagatcgattatactcgcctactggacctctggcgcgcgattgagcaagccggtggcactgacaaatacgtgcaacagcagctgcaggaacggggatacctggtcgagcgcaaggccactgatgacatgtccaaagctgacttagagaggtacaagaaagccctgaaggcagaagcagccgagcgcagaaagataaaaaaggatgcttggttagcgtatcgggcgagtcacatcgtgcatcttggtgaaggggtgttctggaacgatgacttagactttgaccgttgggaccttcgtaatcctgaagagcgcgctaacgagaacgaactgcccgccctggataatccaaaacagcttgccgaggccctgggagcctctattgccgaactgaggtggctggcatttcaccgggatgacgccacgttcgtgcattaccatgcctttacgataccgaagcgcgatgggtcaatgagacaaatctgggctcccaaccgaaagctcaaggcagctcagcgatggattaacagagagattgtggaacggttgcccgtgcacggtgcaagccacggttttttggccgggagaagcataaagtccaatgcagcagcacacaccggggctgagatcgtcgtgaagattgatctgaaggacttctttccgactgtcaccatgcccagggttaaaggcatcttcagaaaagccggctatcgggaacaggtcgcaaccctgctcgcgctgctctgcacagaggctcctcggcatgttgtagatattaaaggcaaagtgcactacctcgcgttgggcccacgatgcctaccacagggagctcctacatcaccaggcttgaccaatacactgtgtcttaggttggatagaaggctcgctggacttgctgccaagctcgggtggcgatacactagatatgctgacgatctgaccttctctaggaagaaaggcgccagtagcgccgaggtaggagaaatgatccggaaagccgttgacatcgttggacacgagggcttcacagtccatcctgacaagaccagggtgatgaggcgtgggtga

SEQ ID NO: 13634 - RNA, 1296 nt, synthetic construct
  source 1..1296: mol_type = other RNA
atggccttcaggatcgacaccacccgactcctggacctgtggagatccattgaacaggcaggcgggcgtgacaggttcatccagcagcagctgacagaacgaggttttttagttgagcggaaacctactgaaggcatgagtaaggctgagctggaacgttacaaaaagagtctaaaggaagaagccgcagagagacgcaaactggccagagaggcctggcttgcctatcgagcctcacatttggtgcacctgggcgagggggtgttctggtctgacgatcatgactttgatcggtgggatctgcggaatccagaggagagggcagctgagaacgagttgccaaagctggaacaccccaaggcactggcagaagccctgggattgtcgattgctgagcttcggtggtacgctttccacagagaagatgctaccttccttcactaccacgcctttaccatccccaaacgcagcggcggtctgcggtccatatgggcaccaaaccgccggctgaaacagattcagcgctggatccaccgggaggtggtagagcgactaccagtgcacggcgcggctcatggatttttggccgggagatctataaaaagcaatgccgcggtgcatgctggtgccacaaccattgtgaaagtagacctgaaggactttttccctaccgtcacatatgcccgcgtcagaggcgtctttaggaaggctgggtatagggaacaggtggctacgctcctcgccttgttgtgcaccgaggcaccgcggagggtgcttgagatagacgggaagacacactacctggcacttggccccagatgtcttccgcaaggcgcacccacgtctccagggttaacgaatactctctgccagaggctcgataggcggctcgttgggctggcgaagaaatacggttggagatatactaggtatgccgatgacctgacattttcactgccagccactcatcagggaccccctcggttaggggcgcttctaggcggagtcgctatgatcgcagctggcgagggtttcgtggtccaccctgataagactcgcgtttcccgtgccggaggcaggcaacaagtgaccggactcgttgtgaacggagagcagggaccccgagtagccagagagacaaaacgccaaattcgcgcagccctgcataacttagcccgcgggaagcctctccaggaaggagaaactctgagccgaatcgccggcttcatcgcgtacattcaaatgagcgagcctgaactgggtaagagactccgtgcacagttggctgctctctga

SEQ ID NO: 13635 - RNA, 1308 nt, synthetic construct
  source 1..1308: mol_type = other RNA
atggctactacgttccgcatcgactataccagactgctggacctctggcgtgcgatagaaactgctgggggccgtgacaaatacatctccgctcagttgaaggagaagggctatctcatcgaaagaaagcccacggatagcatgagcaaggccgagctggaccgctataagaaaacactcaaggaggaggctgcagagaggcggaagctggccaaggaagcctggcaggcgtacaaggccgcacatctcgtgcatctaggcgaaggcgtgttctggaacgacgatctggatcatgataaatgggatctgcctgacgctgaagaaaggcaggccgagaacgagttacccaaacttgacaagcccaaacaacttgcagaggccttaaaagtatcgatggctgaactcagggttttggcatatcacagggatgctgccaccaaactgaactactacagatttactattcccaagcgagacggatcaaagcgagccatctgggccccccacagacgactcaaggctgctcagagatggattctgcgcgaggtggttgagcgcctgccagtccatggtgcagcccatggctttatgcacggccggtctattgcttcaaacgccgcagctcacactaatgcatccaccgtgctgaaagtggaccttaaggactttttccccactgtgacattgacacgcgttaaaggagtgtttaggaaagctggctacagggagcagattgcaacacttctggccctgctctgcaccgaggccccaagacaggtgagtgaagtcgacgggaaggtgtattacctggcccttggtccgcgatgtctgccacaaggggccccaactagccctgggcttaccaatacgctgtgtatgcggcttgatcgaaggctgcagggagccgcccacaagctaggatggcggtataccaggtacgcagatgatctgacattctccttacctgttggtcacaaagggaaaccacagttgggcaaactactggggtgcatctctgctatagccgtgggcgaaggtttcgtggtgcaccctgataagaccaaggttagccgtagtgggggaaggcagcgggtcacaggcttggtagtcaatggacaaggagcgcctcgggtaccacgcgagttgaagagagaagtccgggcggccctgcacaatctctctaaaggtaaaccgttgcgcgacggtgagacactgtccagactcgccgggatggtcgcgtttatcaccatgaccgacagaaagttaggccaaaagctgcgggcagaactcgataaactaggagcatga

SEQ ID NO: 13636 - RNA, 1302 nt, synthetic construct
  source 1..1302: mol_type = other RNA
atggctaccactaacagaattgattacaatcgaatgctcgaaacttggcgggcagtggaatctgccggaggtcgtgataagtacatcgaagctcagttgaaagaaaagggttatctggttgagcggaagcccacggagtcaatgagcaaagctgaattggagcgctataagaaaagcctgaaggatgaggccgcagaaaaacggcgcctggcgaaagagagctggcttgcatataaagcagcacacctcgtccacctcggcgaaggcgttttctggaatgaccagctagaccatgacaagtgggatctaccgggggcagaggagaggcaagctgaaaatgagctccctaaattggataagcctaaggagctcgccgaggcactgggtgtatccatcgccgagttgcgccgcctcgcttaccatagggacgcagctacaaaactgaactattaccgcttcgagattcccaaaagggacggatcgaaaagggccatttgggccccacaccgaaccctgaaagcagcgcagagatggattctgagagaagttgtggagaggttacccgtgcatggagccgcccacggcttcttgcatggcagaagtacagcctctaacgccgccgtacacagagacagccagatcctgctaaaggtcgacctgaaggattttttcccaaccgtgacacttccacgggtcaagggggtatttcggaaggcggggtatagggagcagatcgccaccctgctggctctgttatgcacagaagcccctcgacacgtcgccgaggtcgaaggtacaacttattaccttagtctggggcccagatgcctgccacaaggagctcctacttcccccgctatcacgaacaccctgtgtttgcgtctggatcgccggttacagggcctggcaaaaaagcacggctggaggtacacgcgctatgcggacgatctcactttctcactgccaaacgatcataagggcaaaccacacgtgggctcacttcttggtggcatttccatgatagccgctgcagagggctttactgttcaccccgacaagaccagagtccatcggtccgggggaaggcagcaagtgaccggacttgtggtgaatggagggcagggtcctagggctcctagagaatttaaacgggaggtgcgagccgctgtgcataatctcgcccacgggaaaccgttgaaggaaggcgagacactctctagtcttgccgggcgtatagcgtacatctacatgaccgacaagaagctcggaaagcagctgttagccgctctgtctcgagtgtga

SEQ ID NO: 13637 - RNA, 1377 nt, synthetic construct
  source 1..1377: mol_type = other RNA
atgactcgagctagaccaacaagcagcgcgtcgccgagttcatccctgactggaacttggacccgcccaagaggtgaaccgatgaccacgcgatctgagcgcctcagggacctgtggcgaagcatagaacaggcagggggagccgagaagtacatccaggctcagctgcgggaacggggttttgtagttgaaaggaaacctaccgataagatggggaaagccgagctggctcgatataaacaacagctgaaggctgaagccgcggagagaaagcggttagccaaagaggcgtgggaagccaggagagagcaccgcgtgatccacctgggcgagggtgtcttctggaatgatcagacagacttcgatcgatgggacttagagggagcggaggaaagagccgctgaaaatgaactaccccagttagacaaccctgcacagctcgccgaggcactgggtgtgactattccccagcttcggtggttggcctttcatagggatgccgccactcacgtccactactaccggttcactattcctaaacggacaggcggcgaacgtgccatatgggcaccccatcgtaggctcaaaggcgctcagcgctggattctcagaaacatcgtcgagcgtcttcctgttcacggggcagcccacggttttctacccggcaggagtattgcttccaatgcagctcaccataccgacgcagcagctgtcgtgaagatcgatctgaaggactttttccccacagtgacactgcccagagtaaagggagtcttccggaaggcgggataccgcgagcaaatcgccaccctgctcgccttgctgtgcaccgaagcccccagagaggttgtggaacaagacgggaagacatactatttgtcccttggccctcgatgtcttccacagggggcccctacctctcctggactcaccaataccctgtgcatgcgcctcgatcggaggctactggggctgagcaggaagctcggctggaggtatacccggtatgcagatgacctcacgttctccctgccgaagacacatcagggcccaccaaaactgggcgcactgctctcaacggtggctcggatcgctgcagacgaggggtttacagtgcatccagagaagacaagaatagccaaacgcggcgctaggcagcgtgttactggactggtggtgaacgatgcccatggtccaagagtgcccagaacccttcgccgcagagtacgcgctatgattcacaacttggccaggggcaaacctctgagggagggggagactttggggcagttagcaggccaaatcgcctttatccacatgacggatcccgctttgggaaagcggctggcggcccaactttctgccattgacggatga

SEQ ID NO: 13638 - RNA, 1305 nt, synthetic construct
  source 1..1305: mol_type = other RNA
atggccacagattcccaggcgacaaggctgcgtgacctctggagagccgttgagcaagcaggcggggtcgataagtacatccagagtcagctccaggagcggggattcctggtggagagacgagaaaccgacaaaatgagcaaagcggaactgcagcggtataaacagcaactgaaagctgaagctgccgaacgtagggccctcaaacgggacgcatgggcagcctaccgggaacagcacgtagtacacctgggcgagggagtattttggaatgaccaatctgatctggatagatgggatctcagagatgccgatgagcgagctgccgaaaacgagctcccccaactggagaatcctgggcaactggctgccgctctaggcctcgagataccccagttgaggtggatggcgtatcaccgcgatgccgcaactaaactacactactaccggttcaccatccctaagcggtctggcggagagcggccaatttgggcaccccataagcagctgaaggcagcgcagcgttggattctgcgaaacatcgttgaaagactccccgtgcacggagccgcacatgggttccttccgggcagaagcatagcttccaacgccgcacaacacgccgactctaagattatagtgaaggtggaccttaaggacttcttccccaccgtcactcttccaagggtcaaaggtgtgtttcgcaaggccggctaccgcgaacagatcgctacgcttctggccctgctctgcactgaagcgccgagggagattgtggaatcaggtgggcgcacgtactatctgagcctaggcccacgctgtcttcctcagggagcccctacctccccagggttgaccaacaccctgtgcctaagattagatcgccgcttacagggccttgcctcgaagctgggctggaggtacacacgatatgccgacgacctgactttttccctccctggcggacatagtggtgccccacgcgttgggacattactgggtagcatcgcccggattgcagctgatgaggggtttgcagtccatcccgataaaacccgagtggctagaaagggtgctcgtcagagggtgactgggttggtggttaatggcgacggaacccccagagtcccacggacaatcaagaggcagttgagggccgctatccataatctgtcacagggaaagccgttaaaagagggtgagacgctgtcaaagttgactggctggattgcttatgtgcacatgacagaccctaaactcggaaagcagttgcaggctcaactggacgcagtggggaggggctga

SEQ ID NO: 13639 - RNA, 1305 nt, synthetic construct
  source 1..1305: mol_type = other RNA
atgagcactgacccaatcgccctatggcgagccatcgccaacgctggtgggatcgacgcatatgtttccgctcaattggttgagaaagggtttcttgtcaaacgaagacccacagacaatatgagtaaaagagatctcgccagatataagcagcaactgaaggacgaagctgccgaacggagaagactcaagaaagaggcttggctggcatataaggccaatcacatagtgcacctcggcgaaggagtgtattggaatgatgcagcggatgccgaccggttcgatcatccaaaggcagaggagaggttggcagaaaatgggcttccggtgctggataagccccagcagctggcagatgctctcgaggtcccgctaaccgagctccgctggttgacttggcatagggacgcagcggctagagtgcactaccgtcgcttcactattccaaaacggagcgggggcgagagagctatatgggcccctctgccgaaacttaaggctgcccagaggtgggtccttcgtgaaattgtggagaagctgcccgttcacggcgccgcacatggtttcgtagcgggtaggagtattgcgacaaatgccgccgtccatgctgatgccagggtcgtggtgaaagttgacctgaaggactttttcccaacggtcacactgcctcgcgtgaaaggggtgtttaggaaagcaggctaccgcgagcaagtggccacactgctggccctgctgtgcacggaatcacctcgggaagtggttgaggaagatggcaaaacctggttcctgtctttgggaccccggtgtttaccacagggagctccaacgagccctgccttaaccaacaccctctgcttgcgcctggatcgacgcctgaccgggttagctcaggccttaggttggcgatacactcggtacgccgatgacctcaccttttcgctccccagaccccagggaaggaaaaagccaaagccccctcagacagctaagttgctgggaggcatcaagactatcgtagcagacgagggctttaccgtccatccagacaagacacggttcgcccgctctggcggaaggcaacagattactggaatggtgatcaacgatgatcacggacctagggcacctcgggagttgcgtcgacaactccgtgcggcaattcacaacctgaaccagggtaagcctctgcccgagggggaatccatcgacagactgcggggctacgtagcttacatacgcatgacccagcccgaacttggcgagtccctatctgcccagctcgacgctgccctttcaggggcttga

SEQ ID NO: 13640 - RNA, 1395 nt, synthetic construct
  source 1..1395: mol_type = other RNA
atgtcagacctaaccactctctggttggccgtgaggactgctggctccgtggacaactatgttaggcagcaacttgaagctaaaggcttcttggtgaagcgcaggcccaccgatgggatgtccccaaaagagctggagaaatataagcaagagctaaaacgcgaagccgctgaagcgcggtcgcttagggcagctgcctggaaggcacacaaggccaatcatattgtccatgtgggcgagggcgtctattggaacgacgccgacgacctggatagattcgatgttccgcagcctgaggagcggcaggcagaaaatgggctgccacctctggatagcccaaagaaactggccgaggcactgggcctttccattatagagttaagatggctgtcttggcaccgcgaccttgcaacaggcgtccactaccgacgttttaccatccccaagcggtctgggggagagagggccatatgggcccctatgcctaagctcaaaaaggcccagaggtggatcctacgggagatcgtggaaaagctgcccgttcacggcgccgctcatggcttcttagccggtcgaagcatcgctaccaacgccgcagcccacaatggagcgctggtcgtgctgaagctggacctcaaagatttttttcctaccctgacgctgcctagggttaagggactgttccgtagagccggttacagggaacaggtcgcaacactcctcgcgctcttgtgcacagagagtccccgggagatcgtggaacaggatgggaaacggttgttcgttgctttagggccgcgatgtttacctcagggagcgccaaccagccccgccataactaacgccgtgtgcatgagactggacagaagactcgcgggggcagctgctaaacttggctggcgatatacacgctacgctgacgatctgacttttagccgggtgcgtcctgcagaagccccagtagtagaggctgcagccccagcagctaagcccgcaaaaggtaagaaggctactgcggccgcagagacaacccctgcaccatctcaagctcccgccgctcgcctcagtaaactgctgggagtggtgcatgaggtggtgaaggatgaggggtttattgtccacccggacaaaacccgcgtagctcgctcaggaggcagacaagcggtgacagggcttatcattaatggggatcagggcccaagacctccaagagaattgaggcgtcgggttcgagctgccttgcaccatctcgcccagggaaagccgctgcccgaaggagagacggtcgaaagggtggccggtctgatcgcttacattcggatgacgatgccccaggagggtgaacgcctctacgccgaacttcagaaggtcactggcgcagtagcccccgcctga

SEQ ID NO: 13641 - RNA, 1299 nt, synthetic construct
  source 1..1299: mol_type = other RNA
atggccgacgacttgatgactctctggcgcgctgtgaggtctgcagggggaagagacgcgtatgtccgcgcccagctggaggagaaaggctttctggtgcgccgcagagagactgatggcatgtccaagcgggagctggctaaatataagaaagagctcaaagctgaagcagccgagcggaaacgattggccaaggaagcctgggacgcctataaggcagcgcacatcgtgcatctgggggagggcgtctactggaacgatgccgcggatttcgacaggttcgatcacccaagagccgaggaacgtgtcgcagagttgggactgcccgcactggatgacccagacgctctggcggaagccctgggattaggcgtcgcagagttacgctggctcacttaccacagggacgccgctaaagccatacactatcgtcgctttacgataccaaagagctcgggtggagaaagggccatatgggcgccgctgcctaagctgaaggaagctcaacggtgggttctgcgggaaatcgtggaaaggctacccgtgcatggtgctgcccatgggttcgtccccgggagatccacagcgactaatgccgccgcacatgccgatgcagagatcctcgtcaaggttgatctcaaagatttttttcccacagtgacactcccccgtgtgcggggagtgtttaggcaggctgggtatcgcgaacaggtagctaccctgctggcccttctgtgtaccgaatcaccacgagaggttgttgagagaggcggcgagacatggtacctggctcttggacctcggtgccttccccagggagctccaacctctcctgccttaaccaacgccctgagtatgaggctcgacaggagactcactggtctagctaagaaactggggtggcggtacaccaggtacgccgacgacttatcattcagcctgcccgtgagtaagaagaagcgaaaagctgcacctaatattggcagcctgctgggtggcgtaaggattattgtagagtccgaagggttcacggtgaacgaaaaaaaaacacaagtggcccctcccggtgctcgtcagaaggttaccgggcttgtcatcaatgatggcttgggtccgcgggtgccaagagcagatagacgacggattcgcgccgcacttcaccgcctaagactcggcaagcctttgccagagggagagtctatcgaacggatcgaaggctggattgcatacatccagatgagccagcctgagctcggggaaagacttgctgccgagttggcagaggtgcgaggaggctga

SEQ ID NO: 13642 - RNA, 1299 nt, synthetic construct
  source 1..1299: mol_type = other RNA
atggcaagacaacgtacagatattgccactctgctcaggggtatagaacaggcgggcggaattgacgcttacgtggacgcacaactccgcgagcacggtttcctagtgcagcgaaagcccactgacaatatgtcacaacgcgagctcgcccgatataagaaagagctcaaagacgaggcggccgaacgacgaaagctgagaaaagaggctcgcgaggcttatgagacacagcacatcgtgtacttgggggaaggggtcttctggaacgacgcgtatgattatgacaaatgggatcttgaagatgcagaagagcgagctgccgaaaacgagctgcctgcactagacaagcccgttcagttggcagacgccctgggaatcaccgttccccagctgaggcatctcgcctaccacagggattgcgctgagatggtgcattatcggcggtttactatccccaaaagaaacggaggggaacgcgctatttgggcacctctgcctaggctcaagggtgtgcagcggtgggtgcttagagcaattgtggagcgtctgcttattcacggtgccgcccatgggttcgtacctggaagaggaatccacaccaatgctaggatacatagagatgccagcatcgtgctgaagatggacatcaaagacttcttccccagcgtgacatttcctagggtcagaggggttttccggaaggcaggctaccgcgagcagatcgccaccctgttagccttaatttgtacagaggcacctcgggagattgtggaggaagacggcaagcgatggtttgtatccttaggcccaaggtgtttgccccagggcgcaccaacatcgccagccttgaccaatgtggtctgcctcaagcttgaccggaggctgactgggctggccgaaaaactggggtggcgctactctagatatgccgatgacatgacctttagtcgcccgcggggtgctaaaggacctccgaactttgcgactctgaggtccagggcccgccaaatcgtcatggatgaggggtttcgggtccacccagacaagacgcacgttgcccgccgtggtgcaagacagactgtgaccggccttgtcaccaacggcgacttgccaccgagagttccacgccggaatcggaggcagataagagctgctatacacaatctcggacagggcaagccccttcatgatggagaaacggtagataccctggccggctacatcgcttacatcgccatgacagatagggcggctgctgatcggctgcgtcaggaattatctgccgccctgggcggctga

SEQ ID NO: 13643 - RNA, 1293 nt, synthetic construct
  source 1..1293: mol_type = other RNA
atggccacgactacccccaactacgatgacctctggagatccatcgcgcaggctggaggtatcgatgcatatgtcacacagcagctgaaagaaaggggcttcctgactgaacgtagcgacgccagccagatgtctaagaatgagctgaagaggtacaaggcctccctgaaggctgaggccgctgagaaactgcgcttaaagaaggaggcatggctggcgtaccggtcacagcatatcgtccatttaggcgagggcatgtattggaatgacgctgccgatatcgatgggttcgatctggcagaacctgaagcgcgggccagtgagaacgaattgcctcagctcgacaacccgaaacagctggccgacgccctctccctgactgttgccgacgtgaggtggctctcttatcaccgggacgccgctcgatcgctgcactatcggagatttaccatacctaaaaagtctgggggagaacggccaatctgggcgcccatgcctaagcttaaggcggctcagcgctggattgcccggcatattgtggaaagacttccggtgcacggccacgcccatgcatttcttccagctaggagcataaatacgaatgcaaagcaacacatcggaagcaaaatggtgttacagatggatttggtcgggttcttccccaccgtcacatttcccagggttaaggggattttccgaaaggccggctacagagagcaaattgccactttgttggcagccatttgcactgaagcaccgagagaggtgttggagcacgagggaaagacatggtttatcgccatgggaccaagggctctcccacagggagctcctacatccccaggtctaaccaacacactctgtctacgtctcgatcgtcgcttgacagccctggctgcaaagctggggtggaactacaccagatatgctgatgatctgactttcagtctactgaagtcacataaaggcaaacccaatctcggggcacttatgggctgcataaaaaaagtcgtgaccgacgaagggttcgtagtgaacgcagacaaaacccgcgtgtcaaggaagggaggtagacagaaagttaccggcctggtggtgaacggagtacaaccaccccgagttccccgcgaatttaaacgacgcctgcgcgctgcaattcacagactggagaatgggggtgccttatttgagggcgagacactggacaccctgaagggccaagctgcctacgtattcatgacggaccctgaacttggccggaagatgcttgagaggctcgccaaactcggttga

SEQ ID NO: 13644 - RNA, 1338 nt, synthetic construct
  source 1..1338: mol_type = other RNA
atggccagaaagcgtacagacccagtgtacatatggagggccattctccaggctggcggcatcgatgcatatatcgaagcacaacttgccgagagaggggtgaaggtagagaaaaaagagactgccgggatgtcagcccgggaattggagcagtacaagaaacagctcagagcagaagccgaggagagaaaaaaactgaagaaggaggcttggaaagcctataaagctaaccatattgtgcatctgggagagggtgtctattggaacgacgagaaaaggcaggataaatgggacgtggctcacgcagaagagagagcagcggagaatgaactgccgcccctggacaccccacctcaacttgccgaggcgctgggactgaccgtaccacagctgcgctggttggcctaccaccgagaagccgccactaaagtgcactattaccgcttcaccatcccaaagcgcaatggatctgagcggcctatatgggctcctctgcctaaactgaaggcggcacagcagtggattcgggtccatatcgtggaaaagctcatcgttcatggggccgttcacgggtttttacccggccactcgacactgtccaacgccagcgtccataggaaccctaagatcgtcctcaagatggacattaaagagttctttcccaccgtgacattgccaagggtcaagggagtgttccgcaaggccggctatcgggaacaggtggccacgctcctggctttattgtgcacagaagcacccagagagatcgtccaccatggaggcaaagactattacgttgcactcggaccacgatgcttaccccaaggcgctcctactagtccgggcctcacgaatactctctgtttacgacttgaccaacggctggccggcctggcaaagaagtacggctggcggtacaccaggtacgccgacgatcttaccttcagcctgccgaaggcacacgatggcgatccccacgtggggactttgattgggctcgtgcgcagaattgtggaggatgaaggcttcgcggttcatccagataaaacccgcttggctaggtctggtgggcggcagaagatcactggcctggtggttaatggagatcttaagccccgtgtacctcgaaagctgcgcaggcagatgcgtgccgctctacacaacctacagtgtggtaagcccctaaaagaaggagagacatttgcgaggttggctggttacgcagcttatataaacatgtccgaccctaatctgggggccagaatgcttgaaacatttaagattggtctggctgctacagtcacgaccaatggagagcagaccgccgaagacaagtga

SEQ ID NO: 13645 - RNA, 1308 nt, synthetic construct
  source 1..1308: mol_type = other RNA
atggcccgccgtagaacaaatgtggctgacctgtggcgcgcaattgagcaggctggtagcgtccaagcctatgtggatcagcagctccgggagcgaggcttcttcgtggagaggcgggatgccggccagatgtccaaacgagaactggcagcatataagaagcaactgaaagaagaagcagctgaaaaaaggaagctaaaagccgaggcctggcaggcgtacaaagccaaccacatagttcacctcggggagcacgtattttggaatgacggactcgattgggacaaatgggaccttgagcatgccgaggaaagggctgcagaaaacgaactgcccgccttggatagtcccggacagttagcaaaaaagttagacgtgagtgtagctgaactgagatggcttgcctaccatcgcgaggccgcaactatgctgcattatcgacggtttacaatcccaaagcgggacggatctgagagggccatctgggccccactgcctaaactgaagagtgcgcaacggtggatcctccgcaacattgtggagaagctggtcgtccacggtgccgcacacggattcctgcctgggagatcaatactgagcaatgcggctcagcatacagattcaaagattctcctgaagatggacctacagaatttctttccgaccatcaccctgcctcgggtcaagggcgtgtttcgcaaagctggctatagagagcaagtggccacgcttctggccctaatctgcactgagtctcctcgtgaaattgtggagcactcagataagacatacttcgttgccctcggccctagatgtttgcctcagggagcgcccacttccccagccttgactaacaccatctgcttgagactggataggaggctcgctggcctggctaaaaagcatggttggaggtacaccaggtacgccgacgacctgaccttttccctgccccaggaccacaagggtccacccaacctcggcaccgtaatgggaggagtcaaagttgtggttgctggcgaggggttccggattcacccagaaaagactagagtggctcgtgtgggggggcagcagaaggtgacaggtcttgtggtaaatgaagatcgcccgcccagagtctctcgcaaattgaagcgacagttacgagcggcaatacataacttacaacaagggaaaccgctccacgaaggcgagacgctggagtctcttaagggccatgccgcttacatcgcaatgagcgagcccgagctcgggcagtcgttgcttgaacagattgctgcagtcagcgagccagtttccaattga

SEQ ID NO: 13646 - RNA, 1299 nt, synthetic construct
  source 1..1299: mol_type = other RNA
atgaccgaacgtactactgacctggccaccatcttcaggggcattgagcaggccggcaccatagatgcctacgtcgatggacagcttcgagaaaggggctttctggtggagaggcgagccacggatgatatgtctcagcgagagctggccaggtacaaaaaagagttgaagcaagaagctgcagaaaagaggaagctccgggctgtcgcgtggaaggcatacaagacccagaacatcgttttcctcggcgaaggagtgttttggaacgacgccctggactgggataaatgggacttggagaacgctgaggcacgcgctgcggaaaatgagctacctccattggacaaaccacagcagcttgccgaggcgcttcaattaaccatctcacagctgaggtggctggcctatcacagggacgtagccacgtctattcattaccgaaggtttacaataccaaaaagagatgggtccgagcgcgcgatttggtccccaagacccacattaaaggctgcacagcggtgggtcctgcgtaacatcgtggagcgcctcacagttcacggggcaacacacggctttctggccggaagaagcatagccagtaatgccgcagcccataccgacagccagatgattgtgaaaatggatctcaaggacttcttccccactgttacctaccctcgcgtgagagggattttccgtcacgctggatatcgggaacaaatcgccaccctgctggctctgctctgcacagaggcacctcgggagattgtggaagaagacggtcagaccctgtatgtgtcactcggcccccgctgtttgccacaaggagcacccacatctcccgccctgacaaatgtgatctgcgtgaaaatggatcgccggattagtggcttggcacagaaactggggtggagatatactagatacgccgacgatatgactttttccctcccgtcgaataccggtaaagctaagacgaagcaggatgctaatcctgccccactaatagggtgggtcaagcgtatcgtggcggatgaggggttccgggtccatcctgacaagactcgcgtaattaggaagggaggtcggcaagccgttaccggcctcatcgtgaacggaactggggccccgagagtacctcggaaaacaagacgaatgcttcgggccgcaatgcacaacctaagcaagggtatcccccttcgcgatgacgagacactggctactttacagggctatatcgcttttatcgctcagacggaccccgaacaggcacagagactgaaggaacaactggcttga

SEQ ID NO: 13647 - RNA, 1362 nt, synthetic construct
  source 1..1362: mol_type = other RNA
atgtctacagagaaccagaaagccttagttgccctctggaacgagattcagcacgccggcggcagagaaagctatattcgcaatgaactcacaagaatggggattgaaatccccgctagagtgaaaatcactaacatccgcaataaagagaagaaagccgcgtacatcgctttgcggcagaaggaggaggaagcaaggggctttattaacaagaaagtgtgggccgcatatcgggccacccatatcgtggacctgggagatggaatattttggaaggacccaaccaaggatttctatgatacccacgaccgcgcccagagacgtgaggataatggtattccggagctagaaaccgttgaccagctggtcgaggctttatcagaggcttacgccaatggggattccaatattgaactcgatatccccactctcagatggctgtgttaccatcgcgaagtggctactaccacccactacaagtcatttagcataccaaagaagaccggtggaaacagacagatatgggcacctatgccccgcttgaagagcgtgcagaagtggatttctaggaacatcgcagagaaactggtcaaccacggcgcagctcacggatttatctccggtcggagtatactcagcaatgccagcgtacatacgaactctaaaatcgtggtatccatggacctgcaagacttctttccaacgttcacatttaatcgtgtgaaagggattttccgagcggccggctatcttgaagggatagcaacactgttggcgctgctttgcaccgaggctccacgaaagaagatcaaattccctgacgagaagaaccctggtaaagagaagtgggtgtatgtagcctccggcgatcggtgtctgccccaaggatcacctgcctccccctctctgacaaacgcagcctgcctgaggttggaccggcggttagccggatacgccactaagtacggttggcgctacactaggtatgcggatgaccttaccttcagtttcccggctgactctgctaaaagccctaagacagatctgttgatcaagagggtccaggagtttgttgtctccgagggcttcatcgtgcaccctaataaaacagacaaaatgggcactggggggcagcaaaaggttactgggctcattgtgaatggagtgggaaaaccccgagtcagtaagggctttcgtgataacctgagggcagccatccataatcaagaggaaggcaaggagctgatgtacgaagaagaatcacttgagacacttatgggctatgctagtttcatcttctcggctgacccaaccaaagggaccacgctaattgagaagctccaggcactggaagaggaatga

SEQ ID NO: 13648 - RNA, 1341 nt, synthetic construct
  source 1..1341: mol_type = other RNA
atgagtactgaaaattccaacgagctcgtcgagctttggaatgagatccagcaagttggcgggaaggaagcctatatcaggagagagctcgcaaggatgggcatagaggtgccagaacgcgtaaagatcaccaatattcgagacaagacaaagaaagctgagtacatcagcctgcggcagaaggaggataaggcacgcgctataataaacaagaaaatctgggccgcatatcggaaaacgcacatcgtggacctcggggatggcatattttggaaggaccccagcaaggacttcttcgacgttcacgatagggaagaaagacgtaaagacaatggcattccagagctagaaaccgttgatcagctggtggaggccttacgttctgtagatagcgacatcgacgtgcccacaattcgatggatgtgctatcaccgcgaggttgcgaccactactcattaccgggctttcaaaattccgaaaaagaccggaggtgaacgccacatctgggccccaatgcccaggctcaaagccattcaaaaatggatcagtaggaacattgccgagaagttggcaacacatggggcagcccatgggtttatcgtcggcagaagcattgtgtctaatgcgatggtccacacagattccaaagtggtggtcagtatggacctgaaggacttcttcccaacctttacctttaaacgggtgaagggcatttttcgcgccgcgggttaccttgacgggattgcaaccttgttagccctgttctgtacggaggcacctcgggttcctatgtgtctgcctgacgagaacgacccgtcaaaggaaaaatgggtctacgtagcttccggagagcggtgcctgccacaaggatcacctgcctctcctgcgctgactaacagtgcttgcctacgcctggatcgtagattggccggttatgctcagaagtatgggtggaggtacactcgatacgctgacgatctgaccttcagctttccctcttccgattcccgatcagcaaatgtggatcttctgaagaaattcgtccacgatatcgtgacttccgagggctttgttgtgcatcccgacaaaaccgatgtaatgggaacaggaggccagcagaaggtgactggactgatagtcaatggtaccggctcacccagggtgcccagagaatttagagataagctgagagctgccatccataaccaggaacaggggcagcctctctttgaagacgaaacaatgagcacgctgcttggctacgcctctttcgtgttctcggctgatccagaacggggaaaaacacagttagagcaattgcagaagctcaacgagcagtga

SEQ ID NO: 13649 - RNA, 1326 nt, synthetic construct
  source 1..1326: mol_type = other RNA
atgattgagcggcttagtgagaagcttagcggggttgagagagaggcactggaggcgaaggcggagttatggagcgcagtcgagcaggctggtggcgcaagacgctatgtggaggctgaactgcggcgacgtggggtgttcgtggaaagacaggatgtgctcgccatgggattcgacgaaaaaaaggcctacgtggaacgggtggcagccgagcaggaagtcaggaggccgctgcaaagcaaagtatgggccgcttacacagcgctgcacataacccaccttggagaggaagttttttggcaaggcgacgtgtctgtggacttcttcgacccggatcatttagccgcccgcctggaacagaagggtctgcctccactggagcgcccagaggacctgtgtgaggcgttaggtctaacactgtccgaattgcgctggctctgctatcatcgtgaagcggcaacctctctccactatcgcacctttgagatcccaaagaaaacgggaggcgtgaggaggatttgggcccccttacccaagctcaaagccgctcaggagtgggttctgcggtcgattgccgaaagactcgtcgtccatggcgcagctcacggcttcgttgcaggcaggtcaatctactcaaacgcactcgagcatctggactcccgccttgtggtaagtatggatttggctgacttcttcccttcttttacattcaagcgggtgaagggaatctttcgacaggccgggtacatggacggcatagccgctctgctggctctgttgtgcacggaagccccaagagaggtcacagagcacgagggccagcggtactatctggctctcggaccccggtgtctgccacaagggagtcctgcttctcccgccctcactaatgcagcctgccttaggctggatcgaaggctagcagggtgggccgcaaaagccggctggagatacactcgttacgctgatgatctcaccttttcagtccccgcctccgctgctgaggaaccttcagtatcccagttgcttggggtcgtgcacgctatcgttgccgaagaggggctggtggtcagagacgacaaaacccatgttatgcgacgcggtgccaggcatcaggtgactggactcgtagtcaatgatgccactcctcctcggcccccaagagaattgagacgccgagtacgcgccatggtgcacaacgtcgcgtccggaaggggtctaagagagggcgaaagcctgagccaattggttggctttgtggcatatttgcacatgtgtgatcccgtggaaggacggaggctgatggaggtgcttcgtggggcctga

SEQ ID NO: 13650 - RNA, 1329 nt, synthetic construct
  source 1..1329: mol_type = other RNA
atgagtgagcacctaaacgaccgtacctcccatcaggaattctggaccgaaatcgtcgaggcaggcggcccacggaagtacgtggaaacccagcttagggagagaggggtgtgggtgaagcggcaggacgttttgagtatgggagctaaggccaaacaagcctacatcgagcagatcaaagctgaggacgccatcaggaagccgctgcaggaaaaggtctggaagacatacaccgccctgcacatagtgcatctcggggaagatattttttggcagtcagacgtgtctatagatttcttcgatcccgcccacaggcagtcccgccttaagcagcgccaactccaagatatcgaaagcgctgaggagctcagcgaccagatgggaattactctcggagaactgcgatggctctgttaccatagagaggcggcaaagtccattcactatcatcgcttctctatcccaaagaagtccgggggggaacgccaaatatgggcgccaatgcctaaactcaagacagcgcaaacttgggtgttacggaacatcgccgagcgactcacggtacacggtgctgctcatgggtttatggccggcagaagcatttattccaacgcattggagcacacaaatgcatcggtgatcgttagtatggacctggccgatttctttccctcatttacattcaagcgggtcaaagggatctttcgtcaagccggatacatggacggaattgcaaccattctggcacttctgtgcacagaggcacctcgggaagtagtagaggacgaaggcgagacttattatgtggcaatgggaccgaggtgcctgcctcaaggaagcccagcttcccccgctctaactaatgctgcctgtctgagactggaccggcgcttatctcagttcgccgagaagaaccagtggcgctacacacgatatgcagacgatctgactttctctgtgcctaaagctgaaagcaaactgtcagaggaggaactgagcgccaagattaaacagttgatcggcacggttcacgctgttgttgaagacgaggggcttcaggtccgttctgataaaacccatgtcatgaggcccggcaagagacagaaagtgaccggtttggtggtcaatggtcaggataccccaagaactcctagggagctgcgaaggcgggtcagagcgatgatacataatctcaaggtgggcaaaacgttacacgagggcgaaagtctaaaccacctgaccggtctgatcgcctttatttacatgtcagatccccagcagggccagaaacttttggagcagctgaaacaggccacagcccccagctga

SEQ ID NO: 13651 - RNA, 1314 nt, synthetic construct
  source 1..1314: mol_type = other RNA
atgaataaagagcgagttcaggagctggagaagcgttggcagaagatccaagaccaaggcggtccccaggcttacctcgaacagcaacttagaaaggcaggggtgtggagaagatacaggcccaatatgatagagcctggtatcaacaagagtgacgaaatccgcgctagccggctggaacgcgaaaagaggctcgagctcaagaaatatatttgggaggcgtacaaagccactcatatcagccatctgggactggacgtctactggaacgatgaggtgggagaagactttttcgacgtgcatgaacggctgaagaggcaggaagagcagggccttcccagcattgagacagtggaggaactagtagaagccctgagtcaggcagtgccagaaatgaccatcccaatgctgcgctggttgtgttaccaccaggacgtcgcgacccatctgcactatagacactttgagattgagaaaaagaccggaggttttaggcagatctgggcacctcttcccaaactgaaggccatacagcactggatcttgcagaatatcgtagaacacatgccaatacacggcgccgcacacgggtttgtatcaggccgatccatattctcaaacgccgaggaacattgcaattcggatgttgtggtcgggctggatctgaaggatttcttcccttctttcacattcccccgggtcaagggaatcttccgtaactatggctacaagtctgagatttcaaccctcctcgctttactatgcaccgaggccccgcggagaattgtgcagattgagggcaagacagtctacgttgccacaggctctcgcgcactacctcagggaagtcctgtgagccctgctcttacgaatgtggcctcaatgagattggaccgacgcttatctggttatgccctgaaacacggctggcggtatactaggtatgctgatgatctgacgttttccgctccgaccggccaaggccgcaagaacattaaagcgcttttagagactgtcgacaccatcgtgacagaagagggactgaaggtgcatccaaagaaaactcacgttatgggaaaagggcgaaggcaggaggtgactggactggtcgtgaacgggtccgaaagcccacgggtgcccaaagagcggcgtaaaatgcttagggcagctctcaataatgcccaaaaagggaaggaagttgagttggggtatgcactccagcaactcatgggtcatgccgcctttgtttacgctgcccagccagagctggggagatccttgattgaggctttctccgaactgatgaacgaatga

SEQ ID NO: 13652 - RNA, 1290 nt, synthetic construct
  source 1..1290: mol_type = other RNA
atgaccgacctcctcaagctttggcaggagattgaagccgccgggaatatagacaattatatcgagcagcagctggtgaagaacggctatctggttgagcggcgggatacagatgatatgtcaaaaaaggagctcgatagatacaagaaacagttgaaacaggaagctaaggctaagaaggagctgaaaaaaaaaacctggctcgcctacaaggcttcgcacatagtccatgttggtgaggggattttttggaatgatggagccaacttcgaccagtgggaccacttgagggcagaggagcagacctcagccaacgagctccctcctctagatagtccaaaggaattggcgaaaactatggggataacaatcgaagaactgaggtggttcacttaccatcgcgacgacgccaagaagatccattataggcggtttacaatccccaagagatctgggggagaacgcaacatctgggcgcctctcccaaagttgaaagagttacagaggtggattctgcgcgagatagccgaaaagcttcccatccacggagcctcccacggttttgtggctggacgtagcattctgtctaatgcagctgtgcataataactctcacattgtggtgagaatggacctgaaagacttcttccccacgttaaccttcccacgggtaaaaggtatctttcgccacgcgggttaccgagagcagattgctaccctgttagccctgatctgcaccgaggcaccacgcgaagtgattcagcacgagggggaactgcattatcttagccttggaccgaggtgtttaccccagggtgcacccacaagtcctgccctgagtaacgtcgctagcttgaagctggatcggcgcctatccggactcgctaagaagctgggctggcgatatacacggtacgcagacgaccttactttttcccttccagagaaatacaagaaaggcaactcacaactcggagccctgctaaaaagcgtgcctaacatcgtgagcgatgagggatttgagatcaataggaaaaagacttgggtcgcacgaaagggcggcagacaatgcgtcactggcctggtggttaacggcaaagagatgcctagagtcccccgtaagaaacagagggaaatcagatccgccatccacaatctgcagcaaggcaaggggctgagagaaggcgaaacgatagaacaaatcctcgggtacgtagcattcatttatatgtctcagccggataaaggcaagaaactgctggagaagattgggaatattaagttgcaatga

SEQ ID NO: 13653 - RNA, 1302 nt, synthetic construct
  source 1..1302: mol_type = other RNA
atgtcagagcacaaggccaaccgttatgagcaaatctggcaggcaatcgagcaggcaggaagcgttaatgcttatgtgcgggagcagctgcagcaacatgggttcttggttacacgcagacccacagacgagatgagtaaagccgagttagaaaaatacaggcaggccctgaagaaggaggcggcagagcaaaaccgcctcagacagcaggcttggcaagcataccaggctaaacatattgtccacttaggtgaaggcatctactggaccgatgacagctcagaggatcagtgggatgcccccaatgccaaccagcggctactggaaaatcagcttcctgctatcacccaggtggctcaactctgtcaggctctccagttgtctgtgagcgagttgcgctggctgtgctaccagagggaagtttctactcattcacactacacccgatttgaaatccccaaacggagcggaggcattagagccatttgggccccgctccctaaactgaaacaggcacagcattggatattgcacgagattctggaacgcctcgtggtacacggcagcgcacatggttttattactggcaggtcgatagccactaatgccgcggaacacggggacagtcaggtccttgtgaagcttgacatagagaattttttccccacgattagttggaggagagtgaagggcgtatttaggaaagccggctatcccgaacagattgccacacttcttgccctgctctgcactgaatccccacggcagctggtcgagcatgagggcaagtccgtgtatgtggctctggccgagaggtgtctcccacaaggagcgccaacgtctcctgcactgaccaatgcgctgtgcttgagacttgatcggagactcacagggttcgcccacaaagccgggtggcgatacacacgatacgctgacgatttaagtttttccctcccagcaaccaaccaagcccccccagagttgtccaggctcctaggcaccgtgaagcgtgttctgggcgaagaagggttcgcgctgaacctgtccaagacccgcgttatccgtccggctgaagtgcaaactgtaaccggactggtggtcaatggagcacagccacctagagtcaagaggtctttaaagcgccagatgcgggctgccgtgcacaacctgaaccagggtaaggcactgcctgcaggagagtcactgagccggctaaaaggatatgccgcttatatcgctatgacagatcgagacttgggtttcgacctgcttaaccagctgcaacctgtcggggaaatctga

SEQ ID NO: 13654 - RNA, 1290 nt, synthetic construct
  source 1..1290: mol_type = other RNA
atgtccgagctgagtagatatgagcaggtctggcaagcaattgaaaaggccgggtcagtaaatgcttatgtacgagagcagatgcagaaaaacggatttatggtggccagacggcccactgataacatgaataagaccgagctcgagaagtataggcaggaacttaagaaggaggcggccgaacagcggagacttaataaagaagcttggcaggcctacaaggccaagcatattgtccacctgggggaaggcatctactggactgatgatagttccgaggaccagtgggatgtaccgaacgctaacaaacgactgctcgaaaaccagttgcctgccattactaaggtgccacagctatgcgaggcgctcaaattgagcgttaatgagcttcgctggctgtgctaccaacgggaagtggcagataagagccactatacgcggttcgagatacctaagaggtccggaggtctgcgagcaatatgggccccgttgccaaaactgaaacaggctcagcattggattctccatgagatattggaccggcttgtggtccatggttctgcacacggtttcatcgcgggaagatcgattgcaaccaacgctgccgagcacacgaactcacaagtcctcgtgaaagtggacatcaaagactttttcccctcaatcagctggaagagggtgaagggcgtattcagaaaggcaggctacccagagcagatcgccacactgcttgctctcctgtgcaccgagagccctagggaagtggttgagcacgccgggaaacaggtttatgttgcattggctgataggtgtctacctcagggggcacccacaagtccagccttgacaaatgtgctgtgtctgcgactcgaccgtaggctcaccggctttgcccagaaagccggctggagatacaccaggtacgcggacgatctatctttcagcctgccagctacttctaagaatcctgctgaaatctcaagactcctggggaccctgaagagggtgctgggagaagaagggtttgacctgaatgacaagaagactcgcgtgattcgccaaggtgctgtgcagacagtgaccggcctggtggtcaacggcgaacaatctccccgggtttcccgtgtcttaaaacgccagatgcgcgctgccgtccacaatctgaaacagggaaaagttctgcccgagggcgaatccttacaacgtttacgcggctatgcagcctacatcgccatgacagaccgggagttaggacttgggctgctcggacaactgcagcaagagcagtga

SEQ ID NO: 13655 - RNA, 1287 nt, synthetic construct
  source 1..1287: mol_type = other RNA
atggccaagcagaccaaactcgaaaagctatggaccgaaattgagaaagccggcagccgtgacgcctacattcaagagcagctgcgtaagaacggatttatggtccagaggcggagtaccgacaatttgagcaagtctgagctcgagaagtataaacaggagctgaagaaagaggccgctgagaaaagacgccttcaacaagctgcatgggcggcgtacaagacacagcatatcgtgcacctgggagaaggcatatactggacagacgacaccagcgcagatcagtgggaccttgataatgctcacaaaagactcttagccaatcagctccctcagctgacccgagtgaaacatctctccgacgctctcggtctgagcattgccgagttgcggtggctttgctaccagcgcgatgcggcactgaagactcactatacaagattcgaaataccaaagaggtcagggggagtgcgcgctatatgggcccccttgcctaaattaaaacaggcccaacgctggatcctggatcatatcttggaccgactgctcgtacacggagccgcccatggttttctcatgggcagatcgattgcatccaacgcagcagagcacagtgacagccagatcctggtgaaaatggacattgccgactttttcccctctatttcctggaagaggatcaaaggggtcttccggaaggcaggatatcctgaacaaatcgcaacgctgctggcgcttctgtgtactgaatccccgcgagagcaggtagagcacaatggtcagtcttattacatcgctatggccgatagatgcctgccacagggtacgcctacctctccggctctgactaacgcgctatgtctgaaacttgatagaaggctggctgggttcgcctcaaagaccgcttggcgatatactcggtatgccgatgacctgacttttagtttcccaaatcactccacaagcaaggcaaatatatcacaactgctgggcacagtgaagcggattcttggggatgaagggtttaagctgaacaactcaaaaacccgtgtgattaggcagaatactgttcatgaagtcacgggcctggtggttaacggcacacaggccccaagggttaagcgcaccttgaagcggcagttgcgcgctgctatccacaacttaaaacaaggcaagcccctccccgaaggcgagagtatccagagactaaaagggtacgcagcctacatcgccatgacagagagggaattaggactcaagatgcttgctgagttggataacgtctga

SEQ ID NO: 13656 - RNA, 1284 nt, synthetic construct
  source 1..1284: mol_type = other RNA
atggccaccgagtgggaagaacgatgggccgagattgaaaaagccggtagcatcaatgcatacattcagcagcagctcgtcgccaaaggcttcttggtggaacgacgggctactgataaaatgacccctcgcgaactggagcaatataaaaagagtctgaagactgaagctacagaaaaggctcaactccgcaaagcggcttggcaggtgtacaaagcaaatcacatggtgtacttgggagaagggatctattggagcgatgactcctcagaggatgacttcgatttagcatctgccgagaagcggttactggataaccagcttcctgctatcaccaaagtgaaacagctggcggagcagctgaaactgacaattcctcagctgcgacagttgtgttaccacagagaggctgccaccgacctcaattacacaagatttgagatcccaaagcgaagtggagggatgcggccgatttgggcgcccagactcctcctgaagaatacccagaggtggatcctcgagcatatactggagcgactgctagttcacggagcagcccacggatttctgatgggcaggtctatcgccacgaacgccgcacagcacaataactccgaaatattgatcaagctcgacattaaggacttcttcccctctatatcctggagaagggttaagggagtgttccggaaggccggctatcgggaacaggtcgctactcttctggcactgctgtgcaccgaagctcccagggaagtggtcgagcgtcaggggaagaagcattacgttgcccttggcgctcggtgcctacctcaaggtgcgccaacttcaccggccctgacaaacgtgctttgtctcaggttagaccggagactgaccggcatcgccacaaagttcggttggcgctacagtcgctatgccgacgacatgacttttagcctccccgtagggcatgctggagatccacaaatcgccaaggtgcttggatcaattcagcgcgtaatgggtgaggagggctttgagctgaatcgcgccaaaacgcacattgttaggaggggtgcacgtcaggaggtcaccggcttggtggtgaacaacgaggggctgccacgcgtcaaaagatccacgaaacgtcaaatgagagccgcacttcataacttaaagacagggaagggcctgaaagagggggagtcgctaaataggctgaagggctatgctgcatatatggcaatgactgaacgggagttgggccttagactcctgtctgaattgagcgagtttgggtga

SEQ ID NO: 13657 - RNA, 915 nt, synthetic construct
  source 1..915: mol_type = other RNA
atggcaaatcaacagcagaataagatcgagaagttgtgggcggctattgagaaagccgggagcatggatgcttacgtccgcggtcagttgcgggacaaggggttcctcgtggagcgtcgtgacaccgatgacatgtcgaaaagggctctgaacaaatataagcaggaactgaaggccgaggctgaagagaaaaggaaacttaccaagaaggcttggcaggcgtataaagccaaccacatcgtgcatcttggagaaggcatctattggacggatgatacgtccgaggaccgctgggatctcgataatgctcagaagaggctgctggaaaatcagctgcctaacatcactcgcgtaaaacagctcgcagaggccctggaactgagcatctcagagctgagatggctctgctaccatcgggaagctgcgacctctagccattacattcgattcgagataccaaaacggtctggcggccaacgcgcaatttgggcccccatgccaaagttgaaaaaggtacagaggtggattctgggagagatcttagacagattactcgtgcacgggagtgcccacggatttcttgccggtcggtccatagcaaccaatgcggctcagcatactgactcacgcctaatcgtcaagatggatattgaagacttttttcccagcgtttcctggaaaagggtgaagggcgtgttccgaaaggccggttataacgagcaaatagccacactcctggccctcctgtgtacagagtccccccgagaaatggtcgaacacaacgggagaacccactacgttgccttggcagagcggtgtcttcctcaaggcgcaccgacaagtcctgcactgacaaacgtgctgtgcttaaaactagacagaagaatttctggaactgccggcaagttcaattga

SEQ ID NO: 13658 - RNA, 1287 nt, synthetic construct
  source 1..1287: mol_type = other RNA
atgggaaggaccagtaacaaagtcgagaaactgtgggctgacattgaaaaggctggttctattaaccgatatgtccggcaagagttagacaacaaaggctttcttgtcaagcgagtgaataccgataatttgtctgtgcgcgaactgaagcagtacaaagcagctctgaagaaggaatcagccgagaagcgtgccttgaataaggccgcttgggaggcatataaagcacaccatattgttcacttgggggacggcatatattggaccgacgacacatcgacagatcagtgggatcttgacaacgccacgaagagactccttgagaatcagctgcctcagattacccgggtgaaggccttagccgaggcgctaggactcacaatcagccagttgcggtggctgtgttaccatagggaggtggccacacaatcacattacacgcgcttcgaaattcccaagcgttctggtggggttaggaccatttgggcgcctcgacctaagctgaaaaaagtgcagaggtggatcctgaacaatattttagactccttgctggttcacggcagtgcacacggcttcttagctggcaggtccatcgccactaacgctatcgagcacactgatagtcaggtgctgatcaagatggacatcgaaaattttttcccgactatcagttggaagagagtcaaaggagtatttagaaaggccggttactccgagcagattgctacccttctggctcttctatgcacagagtccccaagagaagtgatcaacaaagatggacaagatctctatatagcattggctgacagatgcctcccccaaggtgctccaacaagccccgcgataaccaatgcgctctgtctgtcactagatcgcaggatgactagcatggccaataaggcagggctgcgatacactaggtacgccgacgatctgacgtttagctacgctgcgaagaaaaagaaagcccccgaaatcagccagctgatcggaggagtaaagcggatcctcggagacgagggcttcaaggtgaacactaaaaaaacccatgttatccgccagggcagcacacaggaagtgaccgggctcatagtcaacggcaagggcatgcctcgggtgtctcggaaactgaagagacagatgcgcgccgccatttataacctgaaacaagggcgtgagctgccagaaggtgaatcaatccagcgcctccgggggtatgcagcctacattgcaatgactgatagagccctgggccttgggatgctcgaggcactgtccgattga

SEQ ID NO: 13659 - RNA, 1278 nt, synthetic construct
  source 1..1278: mol_type = other RNA
atgagctcaacactggagtctctgtggattgtaattgagcaggccggaggcatcgaccggtacgtcgataaggaactcaaggccaagggctatctggtcgaaaggtcagatacagcgagtatgagtaaacgagccttgggcatctataagaaagcactgaaacaagagagtgtagagaagaggactctgaaaaaacaggcttgggctgcttacaaacagacacatcttgtgcacctcggagagggcattttctggagcgacgcagaagacgaggacaagtgggacgtggagaatgcccataagcgcctgcttgaaaaccagctacccgctatcacgaaaagcaaacagctagccgaggccttggatatatctatcgctgagctgcgctggctgtgctaccacagagaggcctcgacttcaagtcattacacccgattcgaaataccaaaaagggatggctctagccgtgaaatctgggccccacgtccgttgttgaaaaaggtgcagacctggattctgcgggaaattctggagcggttgcttgtgcacggtgcagcacacggctttctggcaggcagaagcatcgcgactaatgcctcccagcacatcaactcgaagattttagtgaaaatggacattgaggatttctttccgtccatctcctggaaacgagtgcgcggagtgttccgcaaggccggatatcaaggtcacatcgcaaccctcctggctctcctgtgtaccgaagcgccaaggaagatcgttgaacaccgtgggaaaactacgtatgtcgccttgggggaaaggtgcctaccccaaggtgcgcctacttctcctgcattaagcaatgctctctgcctttctctggaccgaagactgacaggagttgccaccaagctgggatggcgctacagcagatacgctgacgatcttgctttttcacaggtggctaccaagaagcaggccccagagttaacccccctctttggctccataaagagaattctcggggaggaaggattcgtcgtgaatcagaagaaaacacatgttgtgcggcagggggcccggcaagaagttacagggctcatagtgaacggtaaaggggagcctcgggttccccgcaaactcaagaggcagctccgggcagccgtccataactttaagtgtgggaagcctctgagagatggcgtatccttaatggagctgaagggctatgccgcatacatcatgatgaccgacagaaggctgggagaggagatgaagtccgtgcttgtcgaatga

SEQ ID NO: 13660 - RNA, 1281 nt, synthetic construct
  source 1..1281: mol_type = other RNA
atgtcggctaactgggagacactctgggacgaaatagagaaggcaggtaatgtggagcgatatgtgcagcagcagctcgagctgaagggcttcgttgtgaagcggcgcgctacagataccctcagcaccagggagctagagaactataaaaaagagctgaagacggaagcccttgaaaaaagaaaactgaaaaaggaggcatggcaagcttaccgcgctacccatattgtgcatcttggaacgtctatctattggtctgacgactcaagtcacgaccggtgggatctgcaggatgctgagaaacgtctcctggagaatcaactgcctcccctcactcaagtcaaacatctcaccacagcccttaatttatctataccacagcttaggagtctgtgttaccagagagacgctaccacagacactcattacaggcgcttcgaaatcccaaagcgatccggtgggctgagagcgatttgggcaccgaggcctcagctcaagaaggcccagagatggatattgcgcgagatcctggataggatgctggtgcacggcgccgctcacggatttttggcagggaggtccatcgttaccaatgccgcccagcacaccaactctcaggtgattgttaagctggatatcaaggactttttcccttcaatctcatggcggcgcgtgaaaggcgtgttccggaaggccggttacagagagcaaattgcgacacttctggccttgctgtgtacagaaagcccccgggaagtcgtttcccacgaggacaaaacctactatgtcgctctgggcgaacgatgcttgccccagggagctcccacaagcccagcactgactaacatcctatgcttacagctcgaccgaagattgactggtattgcccagaaattcgggtggtgctacagtcgctacgccgatgatctcacattttcatttccgcaagacaccgccgaaacttccaatataagtcacttactaggaagcatccagcgcgtaatgacggatgaggggttcagcgtaaacatgaagaagactcacgtgatcagagcgggaaacgtgcaggaggtcaccggcctgctggtaaatggccagcatgcccctcgggtcagcagaaccaagaagaggcagatgagggccgcgattcataacttacagcaacagaaacctctccccgaaggcgaatcccgtgaacggctgatgggatatgcagcatttattgctatgactgatcgtccattggggcaacagatgatccacgcacttatggccctgtga

SEQ ID NO: 13661 - RNA, 1458 nt, synthetic construct
  source 1..1458: mol_type = other RNA
atgtccacagtgaatagtcagcagaccgattatattagcccggcccagacaatgactcccgccgagagacaatggcaacagctgtggcaagacatcgaggaagctgggggccggtatcagtatatccagcagcaaatgttgcagcacgggtttattgtagagaggaagccgattgataatatgaccgcaaaggaacgggagagatacaaaaagtctctgaagaaagaggccgccgaagagaaatccctaaaaaagcaggcttggcaggcctataaggcacagcacattgtgtacctgggaagacacatatactggagtgacgacacgtccatggacaagtgggatgttaaagacgccagtaacaggctgatcgagaacaagctccctctcatcagcaaacatactcagcttgccgaggcagtgaatctgactgtgccacaactgaagggcttatgctatcagcgcgacgtcgccacaaacatcccttacactcacttcaccatcaataaaagaaacggtacacccagacacatttggagccccattcctagactcaagttcgtgcagcgctggatactcgagaatatcctgaataacctcatgactcatggggctgcgcatggcttcgtccgcggaaagagcattgttacaaacgccgctgtacactccaattctgccctactgattaagctggatgtgaaagacttttttcctagcgttcattggcgcagagtgaagggtgtgttccgacacgccggttacccagaaaagatcgcaattctcctcgctttattgtgtacagagtccccaaggcaggtcgtccaacagaacggcacaacctattacgtagcgctatcagatcgggcactcccacagggagctccaacctcccccgcacttacaaacatcgtctgcctgaacctggataggcgactcactggattagccgacaaagttggattgcgttattcacgctacgcggatgatctgacgtttagcttgccagtcagttcaacctcagccgagaacaatgtgcaggcaaacgtgcaggcaaatgtgcaacctgcagaccataaccaactcatcggtcagctgctggggtccgtccaaaaaatcttgcgtgaggaaggcttcacacttaataatgacaagacccgcgtgattcggactggcaatcagcacaacgtgaccggcatggtaataaatggggagggagtgcctagggttcccaggcatataaaacgaatgttacgggctgccctgcacaatctggcctcaggccagccccttagggaggatgaaaccctggaaacccttagtggctacgcttcttggatcgcttctgctgagcaggaacttgggcagaactacttggctaagatcgacactctgcgggaacaggcgaaagtggttgaaaccaagagctctgccgagtctacgtcgctgctgaacgaatga

SEQ ID NO: 13662 - RNA, 1440 nt, synthetic construct
  source 1..1440: mol_type = other RNA
atgaccacccatacagcaaatcacaacgactatatttctcctgaacctgttccaacctccttcgaaaggcaatggcagcagctgtggcaggatatagaattggctgggggacgataccagtacgtgcagcagcaacttgtttcccaaggtttcatggtggagaggcagcctgtggacaacatgtcacccaaagagcgagacaggtataagaaagcgctcaaaaaggaggccgccgaggaaaaatccctgaagaaggctgcttggcaggcctacaaggctcatcatatggtatacttaggccggcacgtatattggactgacgataccagcactgacaaatgggatatcaaggatgcagccaaccgcctgatcgagaacaagctgccgttgctaagaaagcacaatgagctcgcagaggcggtcaacctgactattccccagctaaaagggctgtgctatcagcgggaggtagccactaacctttcgtattcccacttcacgattgccaagagaaacggaacagcaaggcagatttggtcccccataccaagattaaagttcgtgcagagatggatactgcacaatattctcaacaaccttacgactcacggcgctgcacacggctttgttaggggaaaatctattgtgacgaacgccgccgtccatagtaactccgaactgatcattaagctggacgttaaagactttttcccatctgtgagctggcggcgtgttaagggcgtttttcgtcacgccggctacccagaacagatcgctactctcctggcactgctctgcaccgaaagtccccggcaagtggtccagcaggatggcattacctactatgtcgcattgggagacagggcattacctcaaggagcgcccactagccccgcattaactaacatcgtgtgtctcaatctggaccgccgcctcacaggtctggctgagaaactaggcctgcgatatagccgctacgccgatgacctgacctttagcgtcccaactatcgaagacaccaagcctaagcttaaagtgaaaacgaccataaaagccacaacatcaaccgctaagaagcaggccgatacacagcataataagctcatcggtcagctgctcggctcagtgcataagattcttcgggaggagggttttgccctgaataatgataaaacccgcgtgatccgtaaggggaatcagcagcaagtcacagggatggtggtgaatggccaaggggtcccgagagtgagtagacaaatcaaacggatgctgagggcggccgtgcataatctggaggccggagggaccttgagagccgatgagacacttaatacactgagtgggtacgctgcgtggatcgcttctgctgaacctgagctcggacactcatacttggatcgcatcgaacgattgcaggtccagcaggaaacaagcgtatga

SEQ ID NO: 13663 - RNA, 1338 nt, synthetic construct
  source 1..1338: mol_type = other RNA
atgagttccacatctacacagaacttgagggagcattggcagactctatggcaggacatcgagcaagctgggggccggtaccagtacgtgcagcagcagcttgtgacccagggattcgtggttgagcgcagacctattgacaatatgtccaaggccgagagacagaggtacaaaaccatgcttaaaaaggaggcggccgaagaaaaaaacctcaagaaggatgcctggcaagcctataagtcacaacatatggtctatctgggaaggcacgtgtattggagcgatgaccacagcgccgacaagtgggacgtcactgacggcgaacgcagacgtgtgagcaatcagttgcctactttaactcagccgaaagagctcgcagctgcactcaacctttcaatagcccaactgaaaggcctgtgctatcaacgcgaggtggctacctgcgttccttacacccatttctccatccagaagcgcaggggaggtacccgggaaatctggtcgccaatccccacgctcaagacggcccagcgttggatcctgcaccacatcttggatcaactgccaacccacggcgcagctcatggatttgtcagcggacggtccattgtcaccaatgctgaagttcatcgagactctgctgtccttattaagctggacctgaagaacttttttcccacaatccactggcgccgtgccaagggcgtatttaggcaggcggggtatccagaatctatagcaacattgctggcactgctatgttcagagtccccccgccagatggtccaacagaacggggtgacatattacgtagccctggctgatagagcgctcccacagggtgcccccacttcacctgccctttccaatattgtgtgtgtgaatatggaccgacggctgacaggcctcgcggataagcacgggctccggtactctagatacgcagatgatctaactttcagtatcccctccagctctgcggccaattcagacgcccagaacgcattaattggtttgctgctggggagcgtgtacaaaatagttaaagaggaagggttcgttctcaacaccgataaaaccagtatagtgaggactggacagcagcagaatgtaacaggtatggtggtgaatggcgagagtgctccaagagtcccgcgaagaattaagcggatgctgagggctgcaatccataacctgcagcagggacgagctctgcctgaaggcgaatctttggccaccttaagcgggtacgccgcttggattacgagtgcagaacccgagctcggccggcactatcttgagcaaatcgaggcactggctaaagccacacctgcctga

SEQ ID NO: 13664 - RNA, 1521 nt, synthetic construct
  source 1..1521: mol_type = other RNA
atgagcaaccggaacaataattcaaacaatccgaataacgctcagcagctctcccagtatatccataacaaccaggcgcaccacggaaacctgataaaccctaatggaaacgaaaagctgaacgaattacagcaactgtggcaggacatagagcaagcaggcgggcgctatcaatatgtccagcagcaactcgttaagcaaggcttcctggtggagaggcaacctatagacaatatgtcacccaaagagcgggaccgatacaagaagcagttaaagcaggaggcccttgaagccaagaaactgaagcaacaagcatggcaggcatacaaagcccagcatatcgtatacttgggaagggatatttattggacagatgatacctccccggatcaatgggacgtgaaggatgcgagtaaccggttgatcgaaaaccagctgcccctgatagataagcctcagaaattggccagcagtctcaatctgacaattccacagcttaaaggcctctgctaccagagggacgtagcaaccaatcttacttacaatcatttcaccatcgcaaaaagaaatggcaccccaaggcagatttggtcgccgattcccagactgaagtatgctcagagatggatccttgacaacatactgaataacctgccaatccatggttccgcccacggcttcgtgcagggcaagagcattgtgtctaatgcctgcgtccatacggattctgagctccttattaaactcgatatcaaggacttctttccctccgtccactggcgacgtgtgaaaggcgtgtttcgccacgccggataccacgaacagatcgcaaccctgttagctctgctatgcacagaatccccaaggcagatcgtacgccagaatggtgttacttattacgtggccctggccgaccgatgtctacctcagggggctcccaccagccctgctttgaccaacattgtttgtctgaatctcgacagacggctgacggggctcgctgacaaactgggtcttcggtacagccgctatgcggatgatctgacctttagtctccccaaaacagacaccacaactggaaagccatctaagaagcccaatactaagaccgctaagaccgcaaatgataactctaccaacaacaacaatgagcagaatcaactaatcgggcagctgctgggctcagtgtcaaaaattctgacggaggaaggcttcgccatcaacagtgacaagaccaaaatcattagaacaggtaaccagcagaacgtcactgggctcgtcgtgaatggtgacggaacacctcgggtgccacgtaaaactaaaagaatgctccgcgcagttatccacaacttgcagaatggggggaaattgagggccgacgagaattttaacactttaatgggctacgccagctggattgcgatgacagatcctgaacttggagcttcttacttgcagcaactgggggaactatccaaggagtttgccaagaaggctgagaaggaggacaaaactgagtga

SEQ ID NO: 13665 - RNA, 1356 nt, synthetic construct
  source 1..1356: mol_type = other RNA
atgacgaataacaagcacacaagccttccccagcaatgggaacagagatggcacgcaatcgagcaggcgggcggtcgttaccagtatatcatgcaacagatgaaagaacacgggtttctggtcgaaaggaaacctattgacaacatgtcccccacagagagagagagatataagaaacaacttaagcaggaggctgcagagcagcataagatcaagaaagacgcttggcaggcctacaaggccaatcacatcgtgtatttgggccacggcatctactggagcgacgacacgagcgaggacaagtgggacgctaccgatggagcgaaacgccttctcgagaatcagctgcctaccttcaagaatgtcaaagctctcgcagagcaactgaatcttaccatttcccagctgaaaggtctatgctttcacagggaagtggcaactaggattccctattcccatttcaccatcgtgaaaagatctggaggcgagcggcagatctgggctccagttcctaggctcaagtacgcacagaggtggatcctggataacgtgctgaatccgatgctcatccacggggccgctcacggttttgtgaggggcaagtctattgtcaccaacgcagagaatcatactaacagccagttgattattaagatggacattaaggacttcttccccagtatagggtggcgcagagtgaagggggtcttccgacaagctggatatcctgagcagatcgccacactttttgccatgctgtgtacagaatcaccacggcagctggtaaaacagggcaacgtaatttactatgtggcactagccgatcggtgcctcccacaaggggcaccaacaagtccagccttgactaacatcatatccctgaacctggatcgccggctcacgggcttagctgagaaacacggcctgcgatactctcgatacgcggatgatctgactttttcattgcccgccgaagccaccatcgataccaaggccaaaaatactctgattagcactttgctgggaagtgtaaccaagatactcacagaagaaggcttcgccatcaacgctaagaaaacccatatcatacatcaaggaggggttcaacgtatcacaggtctagtggttaacggagattctgtgccccgggttcctcgcaatattaaacgtatgctgcgcgccgctattcataacctggaacagggtaagccgttcaaggagggagagtcatttaatactctgcaggggtacgccgcgtggattgccatggcagaacccgacgtcggcgaagccctcttaaaaaagctccggcagttaaaaaacagacctcttcagatagagccagtgtcggactga

SEQ ID NO: 13666 - RNA, 1287 nt, synthetic construct
  source 1..1287: mol_type = other RNA
atgacagatttccagcagctctggcaggatatccagcacgccgggtcaattgacgcgtacgttaataaacagctgcagaaaaagggctatttggtgaaaagattagacgctaagcaactgtccgcaaaggagctggcacgttacaagcagcaactgaagcaggaggcggaggccaagcagaaactgaatcaggaggcctggcaggtgtacaaacagaacaacatcgtgtatcttggcgaccaggtgtattggcatgataatgacgattgggataaatacgatcgggagaatgcagataaggccttagtcgggtaccagctccctgtgattcacactccggctgagctagctgaacaactacagctgactatcaaagagctgaggtggttcacctatcaccgcaacgccgctgaatattcccattatcagcagttctctattcccaagcggagcggtggggaaagatccatttgggctccaaaacccaagctgaaagccgctcagcgatggattctgctcaacatagtggaacgaatgctcatccacggcgcggcacatggattcgtcggaggtcgctctatactgacaaacgcacagcaacacacacaatctgaactggtagttaagtttgacttggcggacttcttccctagcattagttggcgcagagtgaagggcatctttcggaaagcaggatacaaagagcaggtcgccacccttctggccctcctctgtaccgaagcccctagggagcggattgagcatgaacacaaaacctattttatcgctcttgctgaccgctgtctgccacagggtgccccaacctctcctagcctgaccaatatcctttgcaaatcaatggaccgcagattgactgccttcgccgaaaagaacgggtggaggtactcaaggtacgctgatgacctaacatttagctggtctggttcccaaagtaaatccaacattaagcaactgattggcatagtgcatcaagtggtaaaggatgagggccttaatatcaattccaagaagacgagaatcctgcggccggggagctgtcagcagataacgggcttggtcgttaacgagcatgcccagcccagagtaccaagggcaactaaacgagaggttcgtgcaatgctccacaacctcagtaagggaaagtcgcttcacgaagacgaaactttgagtcagttacaaggaaagatcaattttatcaggatggtggagcccgaactcggggccagctttctgacacagttccagcaaatcgtccagtcagcttga

SEQ ID NO: 13667 - RNA, 1299 nt, synthetic construct
  source 1..1299: mol_type = other RNA
atgaaacagcaatccaagatcaatcagctctggaatgcgattgagaaagccggaagcatgaacgcctacatagacggacagctacgcgagcacggatttctggtcaagcgccgcgatactgacaacatgtcaaagcgggaactggatcgttataaaaaagagctcaaggctgaggcagcagagaagaagcggctgaaacaggtggcttggcaggcatacaaggccaaccacatagtacatctcggggatggaatctattggaatgatcatgatgatttcgacaggtgggatctaaataacgccgaagagagagccgccgaaaatgaactgcctcccctggacaaaccacaacaactggcccatgcactcggcattaccattccgcagttaaggtggctggcattccatagagacgcagccacagaacttcactataggcgattcactatccctaagaaggacggtagtgatcgcgccatctgggctccaaaaacactgctcaagcaggctcagtattggatcaacgacaacattacccgaaagctgattgtccatggtgccgcccatggatttatccctggcagatcaatactttccaacgcagaagtccacacgaattctaagattatcctgaagatggatcttgaaaacttctttcccacaatcactttgaaaagggtgaaggggctgttccgcaaagctggctacagggagcagatagccaccctgttggcactgcttgtgacagaagcgcctcgggaagtggttgaggaccagaataagacttatttcgtgtctatggggcctcgttgtttaccacagggcgcccccacaagccccatgatcacaaatgctttatgcctgaagttggatcgcagactgaccgggattgcagaaaaatacgggtggagatacagcagatacgccgacgacttgacctttagtttgccagacggaaaagataaacagcccaacctcggcaagctcatgcacgttattaagcagatcgtcaaggacgaggggtttataatccacccagaaaagacgcgaatcactagaaaggggggtcggcagaaaattaccggcctggttgtgaacggccaaggcacccctcgggtaccccaaaaaaccaaaagggagctcagggcggccattcacaacctaaagaacggaaagccgcttcgggagggtgagacattagctcacctggagggcctggctgcgtttatctgcatgacggagcccgccttgggccacaaaatgctcaatcagctgaaagctgtggctaatactctttga

SEQ ID NO: 13668 - RNA, 1299 nt, synthetic construct
  source 1..1299: mol_type = other RNA
atggcccagcggtccgaaattgacaagctgtggaatgctatcgaaaaggcaggctcaatggatgcttatatagatggtcagctgagagagcatggattccttgtgaagagaagggccacagacaacatgtcccgacgcgagttagacaagtataagaaggagctgaaaggggaggcggccgagaggaagcgcgtaaaaaacacagcctggcaggcgtataaagccaaacacatagtccatctaggtgacggggtgtactggaatgacaatgatgatttcgaccggtgggacctggacaacgcagaggagcgtgccgcagaaaatgaattgccgacattggacaagccccaggatctcgccctcgcactgggcattacgatacctcaactgaggtggctcgcttatcatagagacgccgcaacggagctccattacactcgtttcaccattcctaaaagagacggaagtgaccgggccatatgggctccaaagaccctgcttaaaaaagcccaatactggatcaatgacaatatcgtgtcgcagcttattgtccacggggcagctcacggttttatggccggtcgctccatcctgactaacgctaccgtacataccgattcaaagaccgtgcttaaaatggatttaaggaactttttccccaccgtgacatttagacgggtcaaaggcttgtttcgcaaagctggctatcgcgaacaaattagcacactcttggccctgctggtgacagaggcgcctagagaggtagttgaggagaataacaagacctacttcgtgtctctcggccctcgctgtttaccccaaggtgcgcctacctctcccatgattacgaacgtgctgtgccttcagctggatcggcggctgacaggcattgcggaaaagtacggatggaggtatactcgttacgctgacgatcttacctttagcttacctaacgggccggataaagaaccaaaattgggagctctgatgcacgttgttaagcagatcgtcacagacgaagggtttgtggtgcacccagaaaaaactagagtcactcgaaagggcgctcggcagaaggttaccggcctcgtggtgaatgataagggcgcccccagggtcccacagaaaaggaaaagacagctaagggcagccatccacaacctccagaacggaaagccattgcgagaggacgagactctggcccagctggaagggctagctgcattcatctacatgactgatcccaagctgggaagtagcatgctggcagatctccgaaatatcgccaacaagatctga

SEQ ID NO: 13669 - RNA, 1305 nt, synthetic construct
  source 1..1305: mol_type = other RNA
atgactaagtcaatcaagcaactcgctcttgaaattgagaaagccgggtcaccggaggcatacgtgaagcagcagatgcagaagcaggggtttactgtgaccaggaaaaacgtagctgacttgtctaaaaaggagctgtctgcgtacaagcaggctttgaagaaggaggcatccgagaaacataaactgcagcaggaagcttggcagggatacaaagcctacaatatcgtccatctaggcgatgatatctactggaacgaccaagacgtttgtgataaattcgattgtgacgatagacacgtcagaatgcaggaaaatgcaatacccgatttcaaaaatccccaggctctggctgcatggctcggcgtatctatgccacagctacgcggattgacttaccaccgggaatgcgcggagagtatcaagtatcggcatttcacaattgaaaaacgcagcggagggatgcgttccatctgggctcctaaccacgaactgaagcaagtgcagagacaaattctggatgaaatactctcctcgttactagttcacgatgcttcacacggatttatgcaggggagatccatcttcagcaacgcactccgccacacggatgccaaaatcgtggtcaagatggacttaaaggacttctttcctaccattagtttcaagagagtcaagggtttgttcaggaaggccggctatcaagagcagattgcgaccttgttagcactgctctgcacagaggctccacggaaaatcattgaacgcgacgggaaaaagtatttcattgcactcggagaaaggtgccttcctcaaggcgcgcctacatcacccgctatcagcaatgtggtgtgtcttcgactcgaccgaaggcttcaggggcttgccgaaagcctgggttatcgctatacccggtacgccgacgatctgacttttagtcagctgaacgactgtaaaaaacctatgtctattggcgccctcaaggccgccatcaaaaatattatcgagtctgagggttttgtgctgcacacagaaaaaacccgtataacatatccccatcggtcccagcaggttactgggctggtggtgaacggtaagggactgccaagggttccgagaaagacgaagaggcatctgcgagccgccatacacaatttgcagcaaggcaagcccctgcaggacggcgagagccttgagcagctgaaaggctacgcagcctttatcgccatgtccgaccccaagaccggccaagagatgctcgccaagctgaacgagtgccagctgagcctgccagagagtacctga

SEQ ID NO: 13670 - RNA, 1344 nt, synthetic construct
  source 1..1344: mol_type = other RNA
atgtctcaagccgattataccttacctccaatcgagacgtcagaggagaggagggaactgtggagtcacattgacgaagcaggcggtgtgagggcgtacattcggcaggaaattcacaggcaagatctcgctgcgactggcaacccagagcacatgaacgcctcccaacgtcagcggtataagcaggcgaaaaaactagaggctgaatttagaaccgctctgcggaagagaacttgggcagcatacagggagacacacctcgtgcatttaggggacgacattttctataacgaccttatcgacatcgatgcctttgatattgataacagagagcagaggcgcgaggctaatgacattccctccattgagacagtggacgagcttgccactttcctgggcctgaccatccccgagctgagatggctcagctaccaccgaaatgccgaagcatcccctcactacgtccagttcagtataccgaaggccgacggtagccgccgtgttatatctgcccctaagcccaagctgaaagcttgccagaccaaaatatatcatgagatactgtctctgctgcccgtacatggagccgcgcatggcttcgtacctggcagatcaatcgcaacccacgccagcttgcacgctggagggaacatcatcgtcaagatggacatccgccacttttttccaacaatcgtgttcccgagggtcaaaggcttcttccgaaagattggctacccagaacaggttgccacagtgatggcactgctttgtacagaatcgccgcggcaggagatggaacacaagggacaagtcttgcatgtggcccttcaggaacgctgtttaccccaaggcgcgcccacatctcctaccctgacgaatctgatgtgcgtgcgtctcgatagaagagttctcggattggcccgaaaactgggatggacttacagccgatatgccgacgacctcgccttttcatggcatcaggatagtgagcccgatctggcccagctacttggatgtacgaaggccatcgcaggagacgaggggttcaaaattcatccaaagaagactcaggttatgcgggccaagagccgccagatggtgactggcttggtgctcaatgctaccggtggggatgaacctaaccacccccgcccagtgcgaaggctagtacgccagattcgggccgctatccataatcggaaaaatggtaagcctggcaaagctggggagtcccttctccagctccaagggctggctgcatttgtctgccagaccgatccaagaaggggggaacctttgatggaggatatccgggcactgatcgcagctgaactggctgaatga

SEQ ID NO: 13671 - RNA, 1341 nt, synthetic construct
  source 1..1341: mol_type = other RNA
atgtctaaaatcaaggtgcctccaaccgaaacacatgagcagcgcgttgaactttgggaagagatcaagaaggccggcgggattgaaccttatatacagcagaccctgtcagcccagggactcgctgtgcacaataacgacacctctcggatgaaccaaaaacaaaaaagcgcctacaagaaatccaagagggctgaagcagaagcggaaaaggtcgtcaggaaagccacatggaaggcatactgtgccactcacttggtgcacctgggcaatggtgtattttacaatgacctggtagatgccgataagtttgacatcgagaaccgcgaacagcggatcagtaataacgatcttcctaacattgaacatgttgacgccctggctgaatttctaagtctgacgttgccagaaatgcgctggcttgcttaccacagagatgccacaaagaatcctcactacaaacagtttacaataccgaaatccgacgggagtgagcgtgtgatcagcgctccccgacctaagttgaaaaaggcacagcacactatactccataaaatactcgacaggatgcccattcacggcgcagcccatggattcgtgcctggaagatctattgcctcgcacgctgacaaacatgccgggcgtaagatcgtggtcaaaatggatttaaaggacttcttcccgaccctgactttcccccgagtgaaaggcctgtttcggaagattggatacccagagcaggtagccacggtgatggcattgatttgcactgagccaaagcggaaggaggtcgaacacgatggcgagatgtatcacgtctcactgagccacagatcattgccacagggtgcgcccacaagtccaaccatcaccaacatcgtttgtatgcgactggaccggagaatgtccggccttgcaaaaaagctgggatggtcctattctagatatgcagatgacctggtgttctccaccaatgatactgacatcaatattggcgccctcttacgcctctctgagaaagtgatcagagcggagggatttcggaggcatcccaagaagactcatgttatgcgccagtgcaataggcaaaaagtcactggcttaattgtaaaccccacacccagcgaggagaaaacaacctcacgggttcctagaaaagtcgtgcgacaagtgaaggctgggatctataaccgtctgaatgggaaaccacataagagcggtgagagcctcgagcaactgaggggtctggctgctttcatcaaccagaccaaccccacgcttgggaggaagttcctagatcagataaagaccctcgtggagcgcgaggaaaacgagatttga

SEQ ID NO: 13672 - RNA, 1296 nt, synthetic construct
  source 1..1296: mol_type = other RNA
atgaccgagcccgctctgacttgggctgatgttgcagccgctggcggaatccgagaatgggtggatgcagaagttgctagacagggccttgcaagtactggcgtgcctcctaacatgactgatgccgagaagaagctttttaaggctagaagagacgaggaaaggcgcgtgcgcaaagaactttacaagcgggcctggtcggcttataagcgggctcatattgtgcacctgggtccaggcgttttttggcacgatacagccgacgtggaccgcttcgatgcagacgaccccgaaaaaaaacggcaggataacgccctgcctaaactggccgatgtcgaagccttcgcaaaagccgtcggtgtagacattccacgtctcagatggctgtcttaccaccgggaagttgactccgggactcattaccgccgttggacggtcccgaagagagacggcacagcccgacttattagcgcccctaagcccgacttgaagcgcattcagcggtggatcacaacggaggtcaccgagcatttacccgtgcatggagctgcacacggcttcattaccgggcggagcatcgtgagtaacgcgagagtacacgctggtgctcatgtcgtggttaaactcgatataagagggttttaccctactgtgactatgcggagggtcaaagggctacttagacgagcaggcctaggggaacaggtagctacactcatggcgctgctggcaaccgaatccccaagggaggaggtggagacacacggaaaagttcactatgtggccatcgggccacgctcattgccacaaggggcacccacctccccgtctattaccaatgcgctgtgtctccgtctggattgcaggctcgcaggcttagctcggaagctcggatgcaggtatacccgatatgccgacgacctgaccttcagctggcacggcgatggaaaggccgccataggctctctgttgagggccacgaccatgattgtcagggccgaaggttttgagatccatactaagaagaccagagtgatgcgcaagggtgcgagacagaaagtcacagggttggtggtgaatgaggcacaagggaggccaacagctcgggtgcctcgcacaactcagcgagagctccgagccgccatccgtaatagggagttaggcaggcccggaaaaggcgaatcactggaggagctgaagggaatggccgcattcataatgatgaccgatcgggagaggggacgcgcctttatggaacggatcgacaaactgatcgcggctagagaggtaaagtga

SEQ ID NO: 13673 - RNA, 1197 nt, synthetic construct
  source 1..1197: mol_type = other RNA
atgaccgacgctgagaataagctctacaaagccaggcgggatgaggagcgcaaagtgcgaagggagctgtacagaagggcctggcaagcctaccgaagggctcacgtggttcacttaggcgctggcgtgttctggcacgacacggcagatgtagatcgcttcgacgccgatgatccagaaaaacggcgccaagactctgccctgccctccttggacgatgttgctgcactggctggcgcgctaggattgtcaatcccacgcttacggtggctggcctatcaccgggacgtggacaccggtacacactatcatcgctggtgggtgccgaaaagagacgggagcaagagattgatctcggcaccaaaaccggagctgaaggccgtgcaacggtggattactcgggaggtgactgaacatcttcccgtccacggggcagcacatggctttctggtggggcgcagcatcgtgagtaatgcccgcgtgcacgccggtgcacgagtgatagttaaactggatattcggggattttatcctaccatctctatgaggcgggtcaagggcctgttaagacgcgctgggttgggagagcaggtagccaccgtcatggcccttctggctacagaaagcccccgagagcaggtagccacccatgggaagacctacttcgttgccactggtcctcggtccttgccccagggagctcctacttctccaagcattacgaacgcactgtgcctgcgtctggactgcaggctcagtgggctcgccaggaagctgggttgtcggtatacccggtacgcagacgaccttacattttcatggcatggtgatgccagaccacaggtcggcgcgttactcagaggggtggccatgatcgtcagggctgaaggctttgaagtgcacgccaagaaaacgagagtgatgcgcgcaggagcgaggcagaaggttacaggcctcgtggtaaaccaggcacccgcggaaaggcctactacccgcgtccctcgtgttacacagagagccctacgagcagccataaagaacagagaacttggcagatccggaaaaggcgagacactcgagcagctgaagggaatggctgccttcgtcatgatgactgacgctgctcgtgggagggcacttatggcgagactggatcgtctcattgccgctcgagatcaggctggcggacaaccctga

SEQ ID NO: 13674 - RNA, 1305 nt, synthetic construct
  source 1..1305: mol_type = other RNA
atgtctgagcctgtgcgtccgcccgttcgatgggcagatattgccgccactgggggcattcgtgagtgggttgacgccgaaatcactaggcagggtctgtctgaccctggcgccggaaatctgagcgatgcggagaaaaaagtctataaagcacgtagggaggaggagcggagggtgagacgagagctgtacaaacaagcctgggcagcttatagacagactcatattgtgcacttggggagaggcgtcttctggcacgacaccgccgacgtggatcgatttgatgccgatgaccctgaaaagaaacgaagggacaatgcccttcccgaactaaaagatgtcgaagctctttcccaagctctgggccttagcgtggcgcgtctcaggtggctggcctatcaccgcgaagtggacacagggacgcactatcacagatggcggatccccaagagggacggaaccccacggctgataagtgcgcccaagccccagctcaaagaggctcagagatggataacacgggaaatcacggagcatctgccagtgcactccgcagcccacggcttccttgtcggtcgctcgatcgttagcaatgcccgggtacatgctggggcacgcgtgattgtaaagatggacatagagggtttttaccctaccgtgaccttcccacgggtgaaaggtttgctgcggaaggcaggactgggagaacaggtagcaacactcctggcattgctcgccacagagagcccccgcgaagagcttgtgttagagggaaagacagtctttgtagcaaccggcccacgctctttaccccaaggagcccctacatcccctagtattaccaacgctctttgcctgaggctcgattgtcggctatttgggctggctagagctctcggggccaggtacaccagatacgcggacgatttaaccttcagtttccatggcccggctggagaggtcgaccatgtgggaactctactgaaggcagtgacccggatcgtggctgcggaaggctttgccatcaagcctaagaagacgcgggtcatgcgatcaggtgccaggcagcgggttactggcctcgtggttaacgccgctcccggacgaccgttggcaagagtctcaagacagcagttgagggagctgcgcgcagctatcaagaacagagaactcggccgcccaggcaaaggggaatccctggatcagctgagggggatggctgccttcgttatgatgactgaccgcgagcgcggccgcatgttactcgataggattaacagactggccgccccaacagaaccatga

SEQ ID NO: 13675 - RNA, 1344 nt, synthetic construct
  source 1..1344: mol_type = other RNA
atgacagcaggcgcgaaactggccgctgtgccatgggcagaagtggctgcagcaggaggcatcaggccctgggtcgatgctgcgttagcccgtcagggattagccgaccccggcgtaccgtcttccatgagcgacggcgagaaaaaggcttacaaagccaggcgagaggaggagaggcgggttagacgcgaactgttcagagtggcttgggccgcatacaaggcagtgcacattgtgcatgtaggtgccggcgtgtggtggcacgacacaccagatgtcgaccgttttgacgcggcagaacccgagcggaaacgggctgatgccgatctgccagctttgcctgatgtcgaagccctggccaaagccctcgggttgtctatcgcccgccttcggtggttgagctaccaccgcgaggtggatacgggcacacactatcagagatggacggtgcccaagagagacggaggcgtgcgtcccatcaccgcaccaaaacctactctaaaggctgcacagcgatggatcgcacgctccattaccgaacatctccccgttcacggtgcagcccatgggtttctgccaggccggagtatcgccacaaatgccgtagttcatgcaggggccaagatcatagtcaagcttgacatcgaggggttttaccctactgtaacctatcggcgagttaaagggctcctgaggaagggggcagggttaggcgagcaagtggctaccctgctggctttgatggctacagaggctcctagggaggagttgctcgtgaggggccggacctgttatgtcgcaactggccctagggccttaccacagggggctccaacctcaccctccattaccaacgccctgtgcctcaggctcgacgggagactaaccggtcttgccaggtcgctgggatgccgctatacacgctacgctgatgatatgaccttcagttggcacggaggtgctgctggccaggcagatcggactaatgctataggcaagcttctgcgggctgtggagatgatcgtggccgccgagggctttacgattaagcggactaaaacccgggtgatgcgcggagggggtagacaacaggtcacagggctggttgtcaatcaagccgacggacgaccgcctgccagagttccacgagcgactcagcgcaacctcagggctgccataaagaacagagaactgggccgacccggacgcggtgaaagcattgaagccctgcgtggcatggccgccttcgtgatgatgactgacccggccagaggaagggcgttcatggcgagaattgacagacttgcggaaagggcaggaggtgcacctgccggatcagaatga

SEQ ID NO: 13676 - RNA, 1221 nt, synthetic construct
  source 1..1221: mol_type = other RNA
atgtccgatgccgaaaagaaagcttataaggcgcggcgcgatgaagaaaggcgagtgcggcgcgaactctttcgtgtggcctgggccgcttacaaggccgctcacatagtgcacctgggacccggggtatggtggcacgataccgctgacgtcgatcgcttcgacgctgccgacccagcaaaaaagcagcaggataacgcactccctgcactccccgatgtcgaggcactggctaaagccttaggcctgtcaattgcccggctgcgctggctttcgtaccatcgcgaggtcgacactggcacacactatcatagatggactgttcccaaacgggacggcggcctcagacccattagcgcacctaaacctgagttgaaggccgcccagcgttggatcgccagacaggtgaccgaacacctgcccgtacacggagccgctcatggctttcttccaggcagaagtattgcgacaaacgccggagtacatgccggcgccaagataatcgtgaagcttgacatcgagggattttacccgacagtgacgtggaggcgcgtcaaagggctgctgcggaaagccggactgggggaacaagtggccactatcatggcgctagttgcaaccgaggccccacgcgaagaactggtggtgcgtggcagaccatgcttcgtggccacaggacctcgagccttacctcaaggggcccccacatctccgtccatcaccaatgcattgtgcctcagacttgactgtcgcttgactgggcttgcgaggaagctaggagctaggtacacccggtatgccgacgacctgacctttagctggcacggcgatgctgctagagcagcggatgcaggcaatgcaatcggaaaactcttgcgggcagtcactgagattgtggcagcggaggggttcaccattaagcggaccaaaacgagggtcatgcgggcagggggtaggcaacaggttactggactggtggttaaccaggccgatggtaggccggcagctcgagttccccgtgctacacagcgaaagctgagggctgccctgaagaatcgcgagttgggtcgacctggccatggcgagacactggaggctttaagagggatggcagcgttcatcatgatgacggacccagagagggggagagcattcatggcccggatagaccgactcgctcagagggctggtgaagccccagctggttctgagagagcctga

SEQ ID NO: 13677 - RNA, 1332 nt, synthetic construct
  source 1..1332: mol_type = other RNA
atggctaacgatacgcagacacccccagttagcgcggtaccggctgacctacccaagtgggccgatatcgaagccgccgggaatattaggtcttgggtggacgctgaactgaccagactcggtctgtttgagccgggagttgatacatctactctgagcgacaaacagcggaaggcctacaaggcaaagagagaacaggagcgcaaggtgagaagggaactgatggcaaaggcttggttcgtctacaggcagcaccatctggtgcacgtgggggtcggcgtttggtaccatgataccgccgacatagatcgctgggacatacccgatttggagggccgcagacagctcaacgaactccccgaactcgagaatgttcacgcactcgccaaatctctcggccttgcgatcccccggttgagatggctggtgtatcatcgagaggtggataccgggactcattaccaccgctggacagtgcccaagaggtcgggcaagggggtacgccttatcagtgccccaaaacctgacctgaaaagagtgcagagctggattgcccgaaacattacagagcatctgccggtgcatggagcagcccatggttttcttgcaggcaggagtacactatccaatgctcgtgtccacgctggcgcaagagtcattgtgaaattcgacgtacgggatttctatcctacggtcgtgttgcgtcgtgtgaaagggttgttcagaaaggctggatacggtgaacaggtcgccacagtcctcgcattgctgtgcaccgagtgtcccagggaggagatcgagctgggcggtaggcctcactatgtggccactggaccacgctccctaccccaaggagccccaacttcacccagcatcacgaataccctgtgcctgaacttagacgctaggctgacaggcctcgcagccaagcttggcttccggtacactcggtatgccgacgacctgaccttctcatttcacggccctgcgggccacaagattgcggttggacggctgcaaaaggccgtagtggatatcgtcgcagacgaagggtttatagtgcaccctcacaaaacccgggtgatgcgaagtgggggccgacagaaggtgaccggtcttgtagtcaataccgcacctgaaggagagcctgtggcgagagtgccacggaaagtcgttagggaattacgcgctgctattcacaaccgagcacagggaaagccagggaaaggcgagactttagagcaactgcgcggtatggctgcctatgttcatatgtgtgatcctgccaaaggagctgcctttatgcaacagatcaactccctgccagggtga

SEQ ID NO: 13678 - RNA, 1308 nt, synthetic construct
  source 1..1308: mol_type = other RNA
atggccaatgacaacgccaccactaccactgcaggaccagcatggagcgagattgaggccgccggcaacctgaggaattgggtggatgccgaactggaacggagggggttacgagatcccggcgtcgacacatcacggctgaacgataaacagagaaaggcctacaagactaaaagggaagaagagagaaaggtaaggcgtgagctcatggctcaggcgtggaaggtttaccgccagcaccatttggttcatattggcgtaggcgtctggtaccacgatacagctgacatcgatagatgggacatcgcagatctcgaggggagacgggctataaatgaactgcctgaattgaaggacgtgcacgcactggccaaaatactggaactgccaatcccacgacttcgctggcttatttatcatcgagaggtggacacgggcacccactatcacaggtggactgtccctaaacgatccggtaaggggcggcggctgatttctgctcctaagcctgacttgaaacggtgccagacgtgggtcgcgaggaacatctccgagcatctcccggtgcatggggctgcacacggatttctcgcaggcaggagtacactctctaacgccaaagtgcacgccggggccaaggtagtggtaaaattcgacgtgcgtgatttctaccccaccgtttcttacagaagggtgaagggactgtttaggaaggccgggtacggagagcaggttgctacggtgctggcactgctctgcacagagtgcccccgcgaagaaatcgaaattggggggagagtccattacgtggccacaggcgtgcgttcattaccccagggtgccccaactagtcccagcctaacaaacgcactgtgtgtccggctagacgcgaggcttaccggactggcaagcaagttgggctttaggtatactcgctatgccgacgacttaaccttctcgttccacggcgagggtaaagttccagtggctcgcttgcgacgagccgttgtggatattgtggctgcggaggggtttgaggtgcaccccgataagacccgggtcatgagatccggtggacgccaaaaagtgaccggactagtgatcaatggcgcccctgagggaagacctgaggcacgtgtcccgcgcaaggtcatacgcgaactgagagctgctatccataatcgggagcaaggtaaagccggcaagggagagagccttgatcagctgagaggtcttgcagcttatgttcacatgtgtgatccagaaaaaggccgcgcgttcatggcccggatcgacaagctcgcttga

SEQ ID NO: 13679 - RNA, 1347 nt, synthetic construct
  source 1..1347: mol_type = other RNA
atggcaaatgacacaagttcgactaccgccaccacagctgatggaccggagtgggctgacattgaagcagcagggagcatccggaactgggtcgacgccgaactggacagaaggggcctgctcgacgatggagccgatacgtctcgtatgagcgacaaacaacggaaggcttacaagacaaaaagagaagaagaacgggtcttgagaagaaaactgatggcccagggctgggcctgctacaggcagaataaactggtccacgtgggggtgggagtctggtaccacgacactgcggacatagataggtgggatattgccgatctagacggtaggcggcagctcaatgagctgcccgaactgaaagatgtgcatgccctcgccaaggtacttgagctggccatgccacggctccgctggcttgtgtatcatagagaggtggattccggcacccactaccaccgttggacagtccctaagagatcaggcaagggggtgcgactcatctccgcaccgaaaccagaattgaagaggtgtcaaacttggatcgcacggaacatcagtgagcatctgcctgtgcacggagcagctcacggtttcctcgcgggtcgctcaacccttacaaacgctgccgctcatgctggggcggaggttgtggtgaaatttgatgtgcgagacttctatccaactgtgactttcaggcgagtgaaagggctcttccgaaaggcaggctatggggagcaggtagcgattgtgctggccctactgtgtaccgaatgcccccgggagactatcgagatcgggggtcggacctaccacgtagcaaccggaccccgatctttacctcagggcgcccccacgtctcccagcataacaaacgctttatgcatgagactggacgctagactgaccgggttggcccgcaagctggggtttcggtatactcgttacgccgatgatcttacgttctcatatcatcgcggagagggcggtgaaggcgaacaggagacaggtaagattcctgttgcccgtctgaggaaggctgtgaccgaaatcgtcgccagtgagggctttagagttcatgaaggcaagacccgcgttatgcggagcggcggaaggcagaaggtgacagggctggttgtgaacggggcaggagagggagtaccaaccgccagggttccccgcaaactagtcagggagctccgagccgcgataagaaatcgcgagttgggcaagcctggcaaaggagaatcccttgagcaattacgcggttgggcagcttacgtccacatgtgtgacccatccaagggcagggcatttattgcccgcctggagaaattggctgagtga

SEQ ID NO: 13680 - RNA, 1314 nt, synthetic construct
  source 1..1314: mol_type = other RNA
atggctaacgataccacagccgaggtggaaggcacacctcctaaatgggccgatattgaggcggcaggtaatatccgcaactgggtggatgctgaactcgagcgaagaggcctgcgagatcccggggtggataccagcagactgtccgataaacagaggaaagcatacaaggctaaacgcgaggaggagaggcgtgtgcgacgggttctgcaaggtcaagcctggcaggtttacagacagaatcacctggttcatgtcggtgtgggcgtctggtatcacgatactgctgacattgatagatgggatatcgctggaatagacgaaagaagggaattaaacgaacttcccgagctcaaggacgtccacgccctagccaaggctctggagctgcctatcccaaagctccgttggcttgtatatcaccgggaggttgacaccgggactcattatcagcgttggactgtaccaaagcgcagtggcaaaggcgtgcggctgattagtgctccgaagccgaccctgaagcggtgtcagacttgggtggccaggaatattacagaacacctgcccgtgcatggggcagctcacggatttctcacaggacgcagcacggtcactaacgcagcggtacatgctggcgcacgcgtggtcgtgaagttcgacgtgaaggacttctacccaactgtctcatttagaagggtgaaggggatgatgcgaaaggccgggtacggtgaacaggtggccactgtgttagcgctgcttaccacggagtgtcctcgggagagcatcgaactccatgggagaacccattatgtcgccacaggcccaaggtcattaccccagggggctcccacatctccttccatcaccaatgctctgtgcttgaggcttgactcgcgcctcaccggcctagcacgcaaattgggattccgctacacgagatatgcggatgaccttaccttcagcttccacggagccggaaagatcccagtaggccggttgcagaaggccgttgccgacattgtgaaagacgaagggtttatcatacacccccacaaaacaagagtgatgcggaagggaggacgccagaaggtcaccggcctcgttattaatggcgcacctgagggtgctgccaaggcaagagtgcccaggaaagtcgttcgtgagttgcgggccgccatcaggaaccgagagttgggaaaaccagggaaaggcgaatctctggaacaactgaggggtatggccgcctacattcatatgtgcgacccggcaaagggcaaagcatttctggaccggataaacgcgctgtcttcctga

SEQ ID NO: 13681 - RNA, 1329 nt, synthetic construct
  source 1..1329: mol_type = other RNA
atggcagacagccatgatagcaccgaggtgtcacttccggagtggaaaggcattgcagaggccggaggaattgagtcgtggatccaccgcgaactggaaaggcgccagctgatcgaagaagtcgattacgcttccctcagcaaggctgagaagaaggcatacaaggccagacgggatgaagaacggcgcgttaggcgactccttagaaaacacgcatggcaggcgtataaaaaagcacatgtggtccatctgggccgtggcgttttctaccacgacacacctgactacgatcggtatgatattgatgggcgggaggagaggttagccgacaacgccctccccgaaattgccgatgccagcgctctggcagaagccctggggatcacggttcccacaatgcgttggctggcctaccacagggaggtcgattccggcacccactacaggcgatggacagtcccaaagagggatgggcgtcgacgcttgatctctgagccaaaaccccagctgaaggaagcacaacgctggatcgctcgcgagattaccgatcatctccctgtgcacggagcggcgcacggttttttagccggcagatctaccgtgaccaacgctgctgtacatgccggcgcgcggattgttgtcaagctagacctcaaagactattatcctacgatcactacacccagggtgaagggtatgttcagaaaagctggctatggcgagcaggtagccacattgctggctatgctgtgcactgaaagtcccagagaggagatcgaactcgacgggaagacctggtatgtggcgactggaccccggtccttgccacaaggagccccaacgagcccctcaataaccaacgcaatatccctgagactggacctcaggctagccgggctggctaggaaaatgggttttagatacaccagatatgccgacgacttgacattctcacaccaccagcgttccgaagctcctatcggttctctgttccgccttgtgggccagatagtggtggaggaggggtttgaagtgcatcctaagaagactcgagtcatgaggagtggaagccgacagaaggtgactggcctggtggttaatggggcagacggagctcctgcagcacgggtaccaagatctgtccggagaaaactgcgggccgctattaagaatcgcgagttaggccgaccgggcgaaggtgagtcattggctcaactgcgcggatgggccgcctacgtgtacatgactgatccagccaaaggaagggcactccttgaccggcttgccgccttggggggtgagagtgatgagggaggcacagacgggtga

SEQ ID NO: 13682 - RNA, 1302 nt, synthetic construct
  source 1..1302: mol_type = other RNA
atgacgactgccgccgaggataaactaccagactgggcaggaatcgcagccgagggagggattgatgcctgggtcaggagtgagctgatgcgccgagacttgatcgacgatagggataccacacagctttctgagcgcgagaagaaacagtataaagcccggcgtgaggaagagaggagagtgcgtcggctgctccagaaacacgcgtggggggcatatcgggccgcacatgtcgtgcatgtgggagtcggggtgttctaccatgacacacccgacattgatcgcttcgatatcgacgaccccggggccaggagggttttaaatgatttacctgagttggcagacgctacgacactggccgctagactggaactgactatccctcgcatgcgatggttggcctaccatcgggaagtggattctgggacgcactaccacagatggaaagtgccaaagcggtccggaggagagcgcctcatttcagcacccaagcccgaactcaagagagtgcagcattggatagccgagcacatcactgagcaccttccagttcatgccgccgcccatggctttatggcaggaagatctaccgtgagcaatgctgccgcccatgctggtgctaggtgcgtggtgaaaatggatctagaagacttctacccaaccataaccaccccgagagtgaagggcatgttccggaaggctgggtacggcgaacaggtcgctaccttgctcgcgctgctggtgactgaaagcccacgagaagaggtgcctattgacggcaagacatttcacgtagccgttggagcccgatccttgcctcagggtgcccctacctccccgtccattaccaatgccatctgtctgcgtctggatacaagactgatggcactctgccgtgtactgggctttacatatactcggtacgcggacgacttgaccttcagttggcaccaagagggcgacgctcctgtaggccaccttctgcgagctgttggtggcatagtgaccgatgagggctttcgggtgcacagaaagaagactagggtcatgcgccaaggaaggaggcagaagatcacaggactggtcgttaacggggcacacgatgttcccgcaagggtccccaggctggtaatccgccaacttagagctgccattaaaaaccgagagctcggccgcgaaggtagaggcgagtcgcttgctgaactgcgggggatggctgcatatgtcaacatgagcgacccaactaaaggccgggcttttttacagagactcgcggcgctcagcaagcgcggtgaatcatga

SEQ ID NO: 13683 - RNA, 1338 nt, synthetic construct
  source 1..1338: mol_type = other RNA
atgtccgactctaccgccgataagcaaagaaccgagtggcgctccattgccgaagccggtggaactgatgcttgggtgcatcaggagctgcttcggcaaggcctgatagacgaaggcgttgacaccgctagcatgggtgataaggagcgtaaagcctacaaggccagacgtgaggaagagaggcgcgtccggaagatcctgagaaaggatgcatgggccgcatatcggcgggcccaccttgttcatgttgggacaggtgtgttttatcatgacactgccgatatagatcggtttgacatcgatgaccccgagcagcgacgccagcaaaatgacttgcccgccctggctacagcgcaggacttagcccaggccctggatctgcctatgccacgacttagatggctcgtgtatcaccgagaggtcgacacgggctctcattatcacttctggacggtgcccaagagaagcggcggagaacggctcatttctgcaccgaagccggacctcaagaaagcacagcgttggattgctgagcacatctcagaaaggttgcctattcacggggcggctcatgggtttgtggctggcaggtccactgttactaacgccagactccacgctggagcggctgtagttgtgaaattcgatctggaagccttctacccaaccatcacattccctagggtgaaagggctgtttcgaaaggccggctacggggaacaagtcgccaccgtgcttgcccttctgtgtacagagagtcctcgagagcaggtcgctctcaagggcaaactctattacgtcgccgtagggcctagatcattgccccagggggccccaacaagcccatccataaccaacgccatttgccttcgcctggacgccagattggctggcctagctagggcagcaggatggcggtactctaggtacgctgatgatctgactttttcatggcacagaagagacgcagcggctccagtaggtcggctgatgcgcatgttggggcgaatcggatcagacgagggcttcgcactgcaccgcaagaaaacccgggtgttacgcagtggacgcaggcagaaagtatgcggcctggtggtgaacgctgcaggagatggacagcctagggcccgtgtgcccaggaaaattgtccgcgaactgcgggccgccatcaggaatcgcgaactgggccgggaagggtgggatgagagcctagcagagctcgcaggtatggcgtcctacgtgcatatggcggaccccaagaaaggaagggctttcctcgacagaatcgcagccttacaggctgcaggccagcaatcgggtggcgaggtcagtagctga

SEQ ID NO: 13684 - RNA, 1353 nt, synthetic construct
  source 1..1353: mol_type = other RNA
atgacggagtcaagtaccccacctagctctgagtatatcgatctacccgaatggactgccatagccgcaaaaggcggaattcactattggatccaagaggaacttgctaagaaaggtctgctcgacgaccaggcgccctcttccccatctgttagagagaagaagcagtacagagcgcggcgggatgaagaaagacgggtgcggcgaagactcgctcagcatgcctgggcagcttatcgacgtgcccacctagtgcacgtagggctggacgttttttaccatgataccccagacattgaccgctacgatgtggtggatccacctgctcggcgcgccacaaattctgtccccgagattccggatgcccgtcgtctggctgagatactcgaccttcccatgcctcgcctgcgctggctggtcttccacagagaggtcgactctgggacgcactaccacaggtggaccatccctaaacgcgacggcagtgaacggctcattagcgcccccaagccagagcttaaaagagtgcagaaatggatatcacaacagatcactgagcacctaccagtgcatggcgcagcccatggatttctggccgctagaagtactgtgacctgtgcccaggtgcatgcaggggcaagggtactcgtgaaaaccgatttgaaggacttctatcctacaatcactttcccccgggtgaaaggcatcttccgcaaggccggctacggcgaacaggttgcgacactgctcgccttactctgcaccgaatgccctagggataagatagtgagggcaaacaaaacgtactatgtggctgtcggtcctcgctccttaccccagggagctccgacatcccccagcttgaccaacgtgacatgtttcagattggacgaccgcctgacagggttggccaagaagtttggggtttgctacacacgatacgctgatgatttgacttttagttggcacactcccggagaggcctcagtgggtctgcttctcggcattatcagggggatcgtgaccgacgagggattcgagctgcaccctaataaaacccagattttatcgagcggtaggagacaaaaagtcactggactggtcgttaaccgctccgacgcagatgtaagcgtgagggtaccgcggaaggtcgtcaggcagctgcgaagcgctattaagaatcgtgaaaacgacagagatggaccagaatccctggctcagctgaagggcatggcagcctatatccatatggccgatccagttaagggcaggcaatttcttgagaggatcgcgcagctggaagcacggcaaaccgttgccgtggggtcagaaatggcagaccgagtcgagtga

SEQ ID NO: 13685 - RNA, 1371 nt, synthetic construct
  source 1..1371: mol_type = other RNA
atgaccgagcccaaccagtcgacccagaatcccacaggatccgtcggcggaggctcatctgagctgtccgttcgggttccggattgggctgccgtggtagaagctggaggacgggacgcctttattgaaagggagctgctccgcttagggctggtggatgaatcaaccgagcccgggaagcttagtgattccgaaaagaaagctttcaaagctaggcgagaggaggagcgtagagtaaggcgggaattggataaagctacatgggcttcttacagggccgctcatattctccacctgggagcaggagtcttctactccgaaggaattgatatagacagattcgatctcgacgatcccaaggctaggcgcgacgccaatggcctgccagacatcgcaaacgcacaggccctggcgaagctcctggggatatctatgtttcgccttcgacagttgacgtatcaccgggacgtggatagcggtagcaactatatccgctggatgattccaaagcgtagcggtgggctacggttaatcagcgccccaaagaaggaacttaaacgcattcagcgtttcgtggccaaagaaatcgtcgagcatttacccatgcatggcagtagccacggttttgtaagaggacggtccactcggagcaatgccattaagcatgcaaaagccgaagtgattattaagctggacttgtcttcattctacccaactatcacattccctcgagtgaagggccttttcaggaaagcgggctatcaggagaagatagccaccctgctggcactccttgtcactgagtcccccagagaggaacgccacgtggagaacaggacatactatgtcgccaacggcccaaggtcactccctcaaggcgcacccacgtctcctgcgataactaatactctttgtctgagactggatagtcggctcgacgggctgtgcgcaaagtggggtctggtgtacactaggtacgccgatgacctcacatttagtgccaaaaaggggagcaaagtccacgtggggaaggccatcggcgcagttaagagaatcgtgtcggaggaggggtttgtggtccacccagccaaaacaagaatcatgcggggcggtcgccgtcaaaaggtaaccgggctggtggttaatgccgcacctggcgcccctctagctcgagttcctcggaagctggtgagaagactgagggcggcaatcaccaaccgcgaaagaaataaacctctcagggagggagctgaaacgatcgagcagctaagaggctatgcggcttacgtggccatgaccgacccaccgaaaggaaaagcatttttggaccgaatcaaccgcttggctgagcgagaacccaccgctggttga

SEQ ID NO: 13686 - RNA, 1332 nt, synthetic construct
  source 1..1332: mol_type = other RNA
atgtcacagacgaacgatcctttgacggggcaagcactggttgcccctctggactggggggcagtgaaggaggcaggtggaagggaaaactttattgataaagagctcgcaagacgaggcctgactgactccagcgatccaagcgtgctgggggattccgaaaaaaaaagttttaaggctagacgcgaggaggaacggcgggtacggaaggagctcgagaaagccgtctgggccgcctacagagctgctcatattgttcatcttggctctggcgttttcttcaatgacgctatcgacatcgacaagtatgacctggaggatcctaaaggtcggcgtgaggctaacgaccttccagacatcccatcccccgcagaactggccaaagtcctgggcattagtatgcggaggttgaggcagctgaccttccacagagatgtggattcaggcaccaattacgtccgttggactattccgaagcgcaccggggccctgcgtctcattagtgccccaaagaaagaactgaaacgtgcccagcggtggataaacagagagatcgttgaacacctacccgtccacggtgccgcacatggattcgtgcggggtcggtcaacccttactaacgcgacaccgcacgcgagagccgaggtaatcgtgaaactggacctcagcgacttctaccctaccatcacatttccccgggtgaagggcctcttccggaaagcagggtaccaggagcgcatcgctacactgctggcactgctggtgacagaatctcctagggacacacgagtgctaagcgggcgcacatattatgtcgccaatggacccagatctctcccacagggagcccccacatctccagcaataactaatgccttgtgccttcgattggatgccaggcttgacgggcttgctagaaagttcaaggtggaatatactagatacgccgacgatctgaccttttccgcgcagcgtggcacgactcccgatttaggccgcttcctgggagcggtgaaacgagttgtgcgcgaggaaggttttctcgtgcacccaaagaaaacccgaattatgaggggcggcaggcgacaaaaggtgaccggactagtggtaaacgcagccaagggaaggcccgtagctagagctcctaggaagttggtccgggcattgagggctgctatcactaatcgcgaacgcggcaagcaagccggacccgaaaccctcgagcagctcagagggtatgctgcctacgtctcgatgaccgatcctgctagagggaaggcgtttttagagcgcatactgaggttagccgatcgcggaggcgccgagaggtga

SEQ ID NO: 13687 - RNA, 1410 nt, synthetic construct
  source 1..1410: mol_type = other RNA
atgagcgagcaacctcagacccatacacccgatggagccgaggcagcagcaccacctcctccaccaccaccagcaccagccgcatctccacctgaagcggctcccaggctgacttgggatgtgatcgccgaggacggaggcatacgcggctggatagatgccgagcttcgccggagggacctggttgatgacggggtcgatacccagtcgatgtcagacaaacagaggaagcggtacaaggcacgccgcgagcaggaacgtcgggttagacgagaactgcgcaagcaagcttgggcatgttacagagaagcccacctcgtgcacttaggagccagtgtgttctaccacgacacaccggacgtcgacagatatgacatcgccgaacccgaagaacggctgcgcgagaacgatctgcctcttttgaaagatgccagagccttggctgatgctctgcatctcagcgtcccccgattacgctggctaacctttcacagagaggtggattctggctcacactatgttcggtggaccatcccgaagaggagcggtgggacaaggctgattagcagtccgaagcgtgatttgaaggacgcgcaacggttcatcgctaggaaaatctccgaacacctccctgtgcactccgcggcacatggctttctcggagggcgtagtaccgtgacgaatgcccgagcgcatgctggagcggaggtggttatcaagctggatatcaaagacttctatcccacagtcaccatgcccagagtgaaggggatgtttcgcaaagccggatacggggagcaggtggccactgtactagctctgctgtgcacggatgcacctagggaggccatgctgctccgtggccagacacggtacgtagctacaggaccacgtagcctaccgcagggcgcacctacatcaccatccattactaacgctatttgccttcggatggactctcgcctctcaggcttggcccgaaaactcgggtttaggtatacccgatacgccgacgatctgaccttcagctggcatgacggaaaaaagcccgctcccgtaggtatgctgcttggcggcgttcggaagattgtctccagtgaaggtttcgtggtgcatcccaacaaaactagagtcatgcggaaaggtagggctcagcgggtaacggggttagtggtcaatgctgcgggtgaaggagctgcacccgccagagtgcctcgcaagcttgtgcgcaggcttagggctgccatacacaatcgggagagagggaaggccagagagggcgaaactctggcacaattggccggctgggccgcctatctgaacatgactgaccctgagagagcccagcccatgctcgctcgaattcacaggctgatgcgaggcgagagagactcttcttccggggagtga

SEQ ID NO: 13688 - RNA, 1308 nt, synthetic construct
  source 1..1308: mol_type = other RNA
atgagcgcagagattcagaccaccacaccggccacagctgaacccatccccccatgggcatcggtaagagaggccggaggtatcagggagtgggtcgaggccgagcttgctcgaagagggctcatagaatcagtggacaccagcgcactgagtgcagagcagaagaagcagtttaaggcccgcagggatgaagaacgccgagtgcggcgtctgttgaggaaggccgcatgggcttcctataagagagcccacctagttcacctcggggcaggcatctttcatcacgataccgctgacctggatcggtttgacgccgatgatcccgaagccagacgcaaagataacgacctacccgaactggccgatgcgcaggctttggcagccgctctcggcttgccaatccccacccttcgctggctggccttccatcgggaagtggacaccggtacccactatcatagatggacagtgcctaagaggtccggaggagcgaggctcataagtgctcctaaaaagactctgaaaaccgcgcagaagtggattgctacaaacattgtggagcatctgccagtccatggagctgcccacggattccttccgggacggtctacgaagacaaatgccgaggttcatgtcggcgcccggttggtcgtgaagctggaccttagtgacttctaccccactatcactttagagagagtgaaagggctgttccggaaagcgggttatggcgaacaggtggcaacggtgctcgccctgctctgcaccgagtctccaagggaggccatttcactgcgtggcaggacgtgctacgtggcacttggcccacgatctttgcctcagggggcccctacatccccatccattactaacgctttatgtctgagaatggactcacgcctcagcggcctcgcccgtaaatttgggtttaggtatagccgttacgctgatgaccttgctttctcttggcacggagagggggaagggcctgtaggagaattgttaggagcagtccatagaatcgttcgcggcgaaggctttgtcgtgcatccaaagaagactcggatactgaggtgcggcagacgccagaaggtgactggtctggtcgtgaatggccaagggccccctagagtacctcgagccctggttcgcaaactgagggctgcaatccaccaccgggagcacggtaaacaagggaagggagagacactcgctcaactacggggctgggccgcatacgttcacatgtgtgacccccagaaaggccgcgcattcctggagcgactggcgaaattaggtgaggcctga

SEQ ID NO: 13689 - RNA, 1350 nt, synthetic construct
  source 1..1350: mol_type = other RNA
atgtccgacccctctcagcagacagcaaccggcaccgctacgggtacagacccagtgccgcctgaatggccccagattgccgaggcagggggaattcacaactgggtccaggccgacctacgaagaagaggactgattgaggaggtagacaccgcatctctgagtgataagcagcggaaagctttccgggctaggagagacgaggaacgtagagtgcggaagctgctgtatgctcaagcctgggcggcttacaagcgcgcccatcttgtgcatgtgggcgtgggcgtattctaccacgatgtggccgattacgataggttcgacatcgccgaacccgagcagcgaagacaggaaaacgaccttcccgccttggctgataccaccgccctggcagaagctttggagctgccaatcccacgcctgcggtggttagtttatcatcgggaagtggataggcacactcattatcaccgttggacagtccctaagcggtccgggggtgagaggctcatctcagctcctaaaccagaacttaagcgagctcagagatggatcgcccgaaacatcaccgagcacctgcctgttcatggtgctgcccacgggtttttgcccggcaggtctactgcaactaatgccgcagtgcacgcaggcgcacgcgtaattataaaattcgacatccgcgacttttatccctcggtgaccttgccgcgggttaagggggtattcagaaaagcaggatacggcgaacaggtcgccacagttatggcgctcctctgtaccgaacctccaagggaggagatggttctgagggataagaagtactacgtcgcggtcggaccgcgttccttacctcaaggcgcccctactagccccagcataacaaatgccctggccctaggccttgacagtcgcttggccggcctcgctagaagcctggcatgcagatatacaaggtatgctgacgacttaacgttttcctggcacggagatagtgaggccccaattcaacgactgaagaatgccgtcgcgagaatcgtgcatggagaggggtttagggtgcacgaggggaaaactaggatcatgcgggcgggtggccggcaaaaagtcactgggctggtggttaacgctgcagctggggaaggcgcaatgccaccagccagggtgcctagggatgtcgtgcgacgggtgcgtgctgcgattcataaccgcgagcggggcaaacccggaggtgaagaaacactcgagcagcttcgcggatgggccgcctacatatacatgaccaatcccgagagagggcgccagtttctcgagcgcctggacgcactcgccgatgatggaagctcatcatga

SEQ ID NO: 13690 - RNA, 1428 nt, synthetic construct
  source 1..1428: mol_type = other RNA
atgaccgcctctgacacaaatcagaacccccagacagcgaaaccgcagagcgctaagccacagtccgaaagccctcaagcccactccacatctgaacgcgtcgagtggacagtgatcgcagaggccggcggaatccacacctgggtctatagcgagctagagcgccagggcctgattgacaatgtcgacacttctaccctgacagccgctgagaggaagagatatcgcaaaaagcgcgatgaggagcgtgtggtgcgaaaaatcctgcagaagaaggcctggaagtcttaccgcgaagctcacatcgtccatgtcggccgcggtgtgttctaccacgatacccccgacgtggacgtctacgatgtcgaagatcccaaggggcgtttggaatccaatgaccttccaccgattgcagatgcgctgggcttggctaagcggctcggaatcggcattcctaaacttcggtggctcgttttcaatagggaagtggatactgggtgtcattaccactactggaccgtgcctaaacgggatggtggcagacgattgattagtgcaccaaaacctgaactaaagaaagcgcaagcctggattgctaggactatttctgagcacctcccaatccatggcgccgctcacggctttgttcctggacggagcaccgtgactaacgcagcggtgcatgctggcgctagcgtagttttcaagttcgacataaaggacttttttccctccgtgactacgaaccgagtgaaggggcttcttcgtaaagccggttacggcgagcaggtagctaccttaatggcactcctgtgcaccgagtttcccagagaagagctgatgttgagaggtagaaaacactatgtagcgatcggtgcaagaggactgcctcagggagccccaacttctccaagtctgaccaacgctctgtgtatgcgtttagactgcagactcacaggactggccaatagcatcgggctgaagtactcccgatacgccgacgatctgacattttcctggcatggagaaggaaaggaagcacccgttatgaggctaaggcatgcagtgcggaaaatagtgtccgctgagggcttcgtcatcaaggattcaaagacaaggatattgaggagtggccggcggcaaagagttaccgggctggtggtaaacaaggccgagtcagccgaggatgcaagggtgcccaggttcatgctccggcaaattcgaacggccatttataaactggaacgggggcaggaggccaaggaatcattagagcagctccgcggatgggcagcttatgtttatatgactgacaaaaaacgcggggccgacatgctttcaagactggccgccataagcagtgcaaccacagccactacgacatcatcggctagcaacagttcgacgactaccggggccaaaatctga

SEQ ID NO: 13691 - RNA, 1329 nt, synthetic construct
  source 1..1329: mol_type = other RNA
atgtctgaagacacgcttgagagtgaggaggctcctgctgcagtagacccagccgcacctcctactgctaggtggccagatattgccgctgctggaggtatccagccatgggtgttggcggaactgcgaagaagggatcttgtggatgaaggtgttgacacatctcggctcagtgccaaagagaaaaagcgttttaaggcaaggagagaggaagagcgacgggtccgccgactgctgaaaaaacatgcctgggccgaatatcgccgggcacacttggtccatgttggcgtcggcgtgttccaccatgacaccgccgatgtggacaaatacgacttgcccgaccccgacgcacgtagagctgagaatgatctacctccgctcaaagatcagcacgccctcgcagaggcacttgcgattgacattcctactctgcggtggctgtgctaccaccgggaagtcgatacgggcactcactaccggcggtggactatccctaaacgaagcggaggagaacgcttaatctccgctcccaagcctaccctcatgagatgtcagagatggatcgcccagcatgttacagaaaggctgccaatccatggagctgctcatggtttcgtccccgggcgtggcacactgactaacgctgccgcacacgccggtgcaaagacagtggttaagctcgatctgaaggacttttatccaacattgacgcttccgagagtaaagggccttttccgcaaggccggctacggcgaacagacagcgacactgctggccctgctttgtaccgaggccccaagggaggagatggtgattcgcggagagcgacgctatgtggccataggagacaggagcctgccccaaggggctccaactagcccctccatcactaacgcgatatgcctgaggctagacgcgaggctcaccgggttggccaagaagctcggcttcacctacaccaggtacgctgatgacttagctttttcctcagatcggcggaaggctgccgtgggaaagctggtcgatgccgtctatagaattaccgccgacgaagggtttagggttcaccccaagaagacccgggtgatgagagaggggcgcaggcaacagatcaccgggctggtggtgaatggccaaggtgaggggccgcctgcaagagtaccccgtaaattggtgcggcagctacgcgcagccatacaccaccgtgagaacggcagaccaggaaaaggcgaatcactcgagcagctgcgagggtgggcggcatatgtgtacatgtgcgatcccgataaaggtagagccttcttagaccgcctcgccaaactgcagtga

SEQ ID NO: 13692 - RNA, 1338 nt, synthetic construct
  source 1..1338: mol_type = other RNA
atgaccgatgcttcaccggaacgcgcattgcccccttgggcagaaatcgctgaggctgggggcatcgacgcatgggttgtggccgagcttaaggctcgcgggctatgggaggagggtgtggatacgagctccttaggcgacagagaaaggaagaaattcaaggctcgccgcgaagaagagagacgagtgcgtaaacagctccggagacatgcctggagtgagtttaggcggaatcacctggtgcacgttggggcaggcgtgttctatcacgacaccgccgatgttgaccggtatgatataggggaccctgaaactcggagacaggacaatgcgctgccaaagctggctcatgctggcgatcttgccaaggagattggcctcactgtgcccaggctgaggtggctcgtgttccacagagaagtggatacgggaacccactatcatcgctggcacgtgccaaaacgggatggttccctgagattgattagtgcccccaagcctcaactcaaggcggcccagcggtggatagcgcgtaatatcaccgagcacttgccggtacatggagccgcccacggctttgtacctggcaggtctacggtcactaacgctgcagttcacgcaggcgccgaggtggtcatcaaattggatctgcaagggttttacccaaccatcaccatgccgcgtgtgaaaggacttatgcgcaaggctgggtacggcgagcaggtagctactattcttgccctgctgtgtacagagtcacctcgggagatcattgagctgaacggtaaagcccatcatgtcgccataggtccccggtcccttccacaaggagcgccaacatctccctctatcactaacgccctctgcttaaggctggacaggcggatgcagggtctagccacaaagctcgggttcagatactcgaggtatgctgacgatctgaccttttcatggcatcaagctgacgctgacgcccccgtcggaaaactgctgcaccgagttcgcagcattgtcggtgcggagggctttgcagttcaccccgcgaagacacgggtaatgcgctccgggcgtagacagaaagtgactggattggtcgtgaacggagtcagcgcagccgaaggagcccctgaagtacctcccgcccgagtgccacgcaaactgaggaggatgctgagagccgccctccacaatagaacacaggggaaggacggccctgaaagcctcgaccgactgcatggattcgctgcatacgtgtacatgacagatccaaggcagggacaggcactactggagcgagccgctgcattacgagaaggcgccgcaggcgggaccacatga

SEQ ID NO: 13693 - RNA, 1017 nt, synthetic construct
  source 1..1017: mol_type = other RNA
atgacagatccagcggctacacgcccgcttcctccttggagcgaaattgcagaagccgggggcgtagacgcttggattgtggctgaactgcgggcaagggggctatgggaagagggggtggacacttctactctgagtgaccgggacaggaaaaagtataaggcacgacgggaagaggagagacgcgttcggagagaattacgcagacacgcgtgggccgagtttcgtaggaacaacttagtccatataggagcaggcatcttctatcacgacacggccgacgttgatcgctttgatattaaagatcctgatgcacgtcggcaggacaacgctctgcccaaactccccgacaccgcagcacttgccaaagcccttgggctggggatgcctagactgcgctggctggtctttcatagacaagtggatcgcggcacacattaccacaggtggcacgtgccgaagagggatggaggattgaggctcatatcagctccaaaaccagatctcaaggccgcccagcgatggattgccagaaatattaccgagcacctgcccgttcatggtgcggctcatggatttgtaccggggcggtcaactgtcacaaatgcccaggttcatgcaggcgctcgagtcgtgatcaagctggacttgcagaatttctacccaaccatcacccagcccagagtgaagggcctgttgcgtaaagccggatatggcgagcaggtggctacggtgctgtccatgctctgcaccgagagccctcgagaggtgatcgagttgagaggtactccacaccacgtagccatcggccccaggagtctccctcaaggtgctcccaccagcccctcgatcactaacgccctgtgtcttcgcctcgatcgaaggatgcagggtctagcgggcacactgggattccggtactcccggtacgccgacgacctgaccttctcttggcacgccgatggagaagctccagtcgggaagctcttacacagggtgagatccatcgtgggctga

SEQ ID NO: 13694 - RNA, 1458 nt, synthetic construct
  source 1..1458: mol_type = other RNA
atgactgcaaaactagaatcatttgttcctgccgcccccccccaagctgtaccagaagtacctcccgctgctgctgctagcaataccgcaatcgcatctaagagagaggccaggcgcgccgcacacgatgtgttgctggctagatggaaggccataaccgaggccggcggaaccgaagaatgggtccaggcccagctgctcagcaaaggagccctcgcagatgaagttgacttcagtagtctgaaggagaaagaaaagaatgcctggaaagagaaaaaaaaggccgaggcagtagagcgccgagccttaggacgccaggcccatgaggcgtggaaggctacgcacatcaaccatcttggcgtaggcattcactggagtgaagcgcctggtcccgaccgatttgacttggaacaccgggaagaaagagcccgtgtgaatggccttccagccctggacaccgccgaagcacttgcaaaagcattggatatctctgttagcaaactgcggggattcgccttccacagagatgtggacaccggatccaactatgtctcatggcggatcccgaaaagagacggtagcgagaggactataacctctccaaaaccagagcttaaggaagcccaacggtgggtgctctcgaacgtggtggagcggctacctgtgcatggcgctgcgcatggcttcgttgcaggcagatccattctgacaaacgccctggctcaccagggtgcagatgtggtggtcaaggtggacttgaaggacttctttcccacagtgacgtggcgtcgcgtgaaggggctgctcagaaaaggagggctgccggagggaacttccacactactggcactgatgtccacggaagcccctcgcgagctccttagtttccgggggaaaaccctgcacgtggcaaagggacccagggctttaccgcaaggggcacctacatcacccggcattactaatgctctctgcctgcgcatggacaagaggttgagcgccttatcacggaagctgggctttacatacacacggtatgcggatgatctcactttcagctggaccaaagccaaggccccaagggctaggagagctcagggtgctcccgtggctgtgctgctagcgagggttaaggatgtcgtcgaggccgaagggtttactgttcaccccaataagacccgagtggcaaggaaggggtctaggcagcgtgtcaccggccttgtggtcaacgaggcgaaggatggtacacctgccgcccgagtacctcgagatgtcgtcaggcgcctccgcgctgctatccataacagacagaaaggcaagccaggcagagagggggagtccctggagcagcttaaggggatggccgcctttctgtacatgactgacccagttaaaggtcgggcgtacctcgaccaattggcaaagctggaggccaccgagacaccagctcaggcttga

SEQ ID NO: 13695 - RNA, 1461 nt, synthetic construct
  source 1..1461: mol_type = other RNA
atgaccgcacggctagagtcctttgttccagccgctgcaccacaggcagttgctaccccagcacctcaggcacccagtgccaatacagtggcccaacgcgaggctagacgggctgctcacgaggctctgcttgccagatggaaagctattgtcgaggctggaggcgccgatgaatgggcccaagcccaactcgtctctagggggcttgccgtgggcgagctcgacttctctagcgcctctgagaaggagaaaaccgcatggaaggaaaagaaaaaggccgaagcagcagaacggcgcgctcttggtaggcaggcgcacgaagcctggaaagcgacgcacgttggccatctgggcgcaggagtccattgggaagaagagggaggatcagacaagttcgatatagctcatagggaagagcgagcccgggccaacggattgcctgagctgggttctgcggaagtgctggcaaaggccttgggtctatccgtgtctaaactccgatggtttgcttttcacagggaggtggacactggaagccattatatctcatggggcattccaaagagagacggggggacacgcactatcacttctccgaagcccgaactgaaggaagcgcagcgctgggtcctcagtaacgtcgtggaaagactccctgtacacggcgctgcacatggcttcgtggctggcaggtccattctcaccaatgcgctggcccaccatagcgccgatgtcgtagtcaaggtggacctgaaagacttctttccctcagtgacttggaggcgggtcaaagggttgttgagaaagggggggttacccgaaaacactagtacactgctcgccttgatgagcactgaggcaccccgggaggctgttcagttccgtgggaagaccctttatgtcgccaaaggaccgagaagccttccacagggcgctccaacaagcccaggcatcaccaatgccctgtgcctgaagctggataagcgcctgtcggccctttcaaaaaaactggggtttgtatacacgcgttacgccgacgacctgaccttttcctggacaaagacaaaacagcccaaagcacggagggcacaaggtgcccctgttgccgtgctgttagctcgcgtgaaagacgtcgtggaaagtgagggtttccgtgtacaccctgagaaaacacgagtgagccgaaaagggacccgacagcaggtaaccggactagtggtgaacagggccagagatggcgtggctagtgctagggtgccccgggatgttgttcgcagactccgggccgccatccacaatcgtcagaagggcaagcccggcagagagggtgagtccttggagcagttaaagggaatggcagcgttcgtgtacatgacggatgagactaaggggcgcgcgttcctgaaatccctggagcagctcgaagccagggaaaaggaggctgcacctaaggccccttga

SEQ ID NO: 13696 - RNA, 1455 nt, synthetic construct
  source 1..1455: mol_type = other RNA
atgaccgctcggctggatccattcgtgcccgcagctagtccccaagccgtaccaactcctgaaccaactccgcctgctcccgatgctgctgcaaagcgcgaggcaaggaggctggcacatgaagccctgctcgccagagccaaagccattgacgaggcaggaggcgccgatgactgggtgcaagctcagctggtggccaaaggcctatccgtcgacgaccttgacttctctagtgcgagcgaaaaagataaaaaggcctggaaggagaagaaaaaagctgaggcggtcgagaggcgggccctcaaacgacaggcgcacgaagcctggaaggcaactcacgtggggcatctgggtgcaggggtacactggaccgaagacagacccgcagatgctttcgacgttcctaaccgtgaggagcgagcccgcgcaaatggcctcactgaactcgattctacggaggcccttgctaaggcgctgaagctgagtgtgccaaaactgaggtggttcgcctttcatcgcgaagtggacacagctactcactatgttagttggaccatacccaaacgggacggctcaaagcggactatcaccagccctaagccagagcttaaagaggcacagagatgggtgctgagcaatatcgtcgagcgattgcccgtgcacagcgcagcccatgggttcgtcgcagggagatccattttaacgaacgccctcgcccatcagggggctgatgtggtggtcaaggtggatctaaaggatttctttcccagcgtgacttggcgtagggttaaaggtctgctccggaaaggagggctggcagaaggctccgctaccttgctgtccctgatgtcgacagaggccccaagggaggccgttcaatttcgcggaaagctcctttacgtcgccaagggccccagaagcttaccgcagggagcaccaacctcacctggcatcaccaatgccctgtgcttgaagctggataaacgcttatctgccctggcgaagagaatgggatttacctacacgaggtatgctgacgatctcacattttcttggaccaaggccaaacaacctaaggctcggcgaacacagcgcccacctgtagccatgttgctgtcaagggtgcaggaagttgtggaagccgaggggttccgagtacacccggacaagacacgggtggctcgtaagggtacacgccagcgggtcaccggattggttgtcaacaccgctggaaaaaatgccccagccgctagagtcccgagagacgtggtgcgccagttgcgtgcggctatccacaacaggaaaaagggtaagcctggcagagaggatgaatccctagaacagcttaagggcatggccgcctttattcacatgacagaccccgctaaaggccgggctttcctggcccagcttgcagagctcgagtcagcagcacccgcgacacctgcgcagtga

SEQ ID NO: 13697 - RNA, 1458 nt, synthetic construct
  source 1..1458: mol_type = other RNA
atgacggcacggttagaaagctttgtccccgcagcctctccccagaccgtcagtactcccgcgccagctgcaccagcagctaatgcagcctctcagagagaagcacgccgcgctgcccatgaggccttgcttacacgttggaaggctattgtagagtctggcggcgcggacagttgggttcagggacaactcgtttcccgcggtctggctgtaggggacttggacttcgcgagggcttctgacaaagaaaaaacagcctggaaggagaaaaagaaggctgaggcagccgaacgacgggcattagagaggcaggcccacgaagcatggaaggccacacatgtggcgcacctaggagccggtgtgcattgggaggaggacgctgctggggataagtttgacatcgcagccagagaggagagagcccgggcgaatggccttccggagcttgatagcacagatgccctggccaaagctcttggtctttccgtttccaagctccgttggttcgcgttccaccgcgaggtagacactggcagccactatgtcagctggaaaatcccaaaaagggatggcggcagtcgaaccatcacgtcgcctaaacctgaactgaaggaagctcaacggtgggtcctggccaacgtggttgagaaactgccggtacacggagctgcacacggattcgtggccggcagatcaatcctgactaatgccctggctcaccagggagctgacgtcgtggtgaaagtcgacctcaaagatttttttcccagcgtcacatggcgcagggttaagggtctactgcgaaaaggtggattacccgagtctgcctcaactctgctggcactcatggccaccgaagcacctcgagaggctgtccagttccgtggcaagcttctgtatgtggcaaagggaccaagaagcctcccccagggagcacctacttccccaggcattacgaacgcactctgcttgaggctggacaagcgtctgtctgccctgtccaagcggctggggttcacctacaccagatacgccgatgatctcactttctcgtggaccaaggctaagcagcctaaagctaagcgatcccaacggccgcccgttgcggtgttgctaagtcgggtgcagtcagtggtcgaagcagaagggtttagggtgcatcctgataagacacgcgttgcccggaagggcaccagacagagggtgaccgggttggtggtgaacgaggccgccaatgggaaaccagctgccagggtgcctcgcgatgtggtacgcaggctcagagcggccatacataaccgggaacaggggaaacccggcagagagggcgagagcctggatcaactcaagggaatggccgcctttattcacatgacagacccagtgaaggggagggccttcctggaacagttagccaaactggaggccaaggaacagcaatcacctcccgctgcttga

SEQ ID NO: 13698 - RNA, 1461 nt, synthetic construct
  source 1..1461: mol_type = other RNA
atgactgggcggttggagagctttgttccagccgccgcccctcagacagtgcctactcctgcccctcaagctgcgacagccacggctctggtgcaaagggaggcccgtcgagtggcatatgaagccctggtaacccgttggaaggctatagtcgaagcaggcggcgctgatgcttgggtacaggctcagcttgtctctcggggactggctgtgggggatctggagtcaggggttacagagaaagaaaagacagcatggaaagagaagaagaaagcagaggccacggagcgcagggcattgctacgccagacgcacgaagcctggaaagcaacacacgtcggacatcttggtcctaacatccattgggaggaaaaggacgggggctcagacaaattcgacatcccccatagagaggagcgagctcgcgccaatggtatgccggaactcggctcggcagaagcgctagcgaaggccttggggctgagtatatccaaactgagagggttcgcctttcaccgcgaggtcgataccggaagcaactacgtgagctgggggatcccaaagagagatggcggaacacgaacaatcacttcaccaaagccagagctgaaagaggcacagaggtgggtgctcgccaatgtggtcgaacggttgccagtacacggcgccgctcatggctttgtggcgggtagatccattctcacgaatgccctagctcaccagggcgctgatgtcgtggtgaaggtggacgttaaagacttcttcccctccgtaacatggaggagggtgaaaggcctcttacggaaaggcggtctgccagagaacgcctctactctgctcgccctgatgtctaccgaggcccctcgcgaaaccgtgcagttcagggggaagacactccacgtcgcaaagggacccagagcgctgcctcaaggagcaccaaccagcccgggcattaccaatgccttgtgcctgaaacttgacaagcggctcagcgccctcagtaaacggctggggttcacctacacccggtatgcagacgatcttaccttctcctggactaaggctaagcagcccaaggcaagacgcgctcagggagctcccgttgctgtcttactgacccgggtgaaggacgttgttgaggcagagggctttcgactccaccccgaaaagacccgtgtgagtagaaaaggtactcgacagcaggttaccggtcttgtggtcaatcaagccaggaacggagtgcccgctgccagggtacctagagacgtagtccgccgtctgagggctgccattcataacagagaacaaggaaagcccggccgcgagggggaatccttggaacagttaaagggcatggccgcatttgtgtttatgacagatgctgccaaaggaagggcgttcctggattctctggcgagacttgaagcacgggagactcccgaggccccgaaagtgacttga

SEQ ID NO: 13699 - RNA, 1452 nt, synthetic construct
  source 1..1452: mol_type = other RNA
atgactgccaaactggaatcttttgttccggccgctcccccccaagcaattgctacgccaacacccgtcacccctacagcacaggcactggtgcagagagagactagacaagcagcccgagccgcggtactagcaaggtggaaggcaatcacagaggcgggaggacaggacgagtgggtgcaccagcagcttgtggctcgtggcgcactggctgaagaggtcgatttcagctcactcaaagagaaggaaaagacggcttggaaagagaaaaagaaggcagaagcgactgaacgccgtgctctgaagcgcctcgcttacgaggcttggaaggccactcatataggtcatcttggcgctggaatccactggaatgaagaaggcggggccgacgcctttgacatcccacaccgggaggagagggcaaagtccaatggcctgcccgagtttaccagtgccgaagacgtggccaaagctctgggtttgggggtgtctaagctgcgctggtttgccttccacagggaggtggatacagccactcactacaccagctggagaatccccaaaagggacggcgggagtaggaccattacgagcccaaaaacagaacttaaagccgcccagcggtgggtgctgagcaatatagttgaacggctgcccgtgcatggtgccgcacatggattcgtcgcgggcaggtccatcctgaccaacgctttagcacaccggggggccgatgtggttgtgaaagtggatgtcaaggatttcttcccatcggtgacctggcccagggtgaaaggactcctgcggaagggcggactgcctgagaacattgcaacgctgctcgccctactcgctacagaggcacctcgggaagccgtgtcctttcggggcaagacactgtatgtggcacaaggtccacgagcactccctcaaggggccccaaccagtccgggaattactaacgctttgtgcctccgcctggacaagagactgagcgctttgtcaaggaagcttggcttcgtctatactcgctacgccgatgacctaacattctcttggaccaaggctaaagccccgaaagctaggagggcgcagggagctcctgtagccgtgttattggcccgcgtgcaggaagtagtcgaggcggagggctttcgtctgcatcctgataagactagagttgcccgtaagggatcacgacagagagtcaccgggttggtcgttaacgacgccggtcctaaggtacctgccgctcgagttccacgcgacgttgtcagacgactcagagccgcccttcacaatagagaacagggcaaaccagggaaagagggggagtcccttgagcagctccagggcatggccgcttttatccacatgaccgatcccgctaaggggcgggcgttcatggaacggttagagaaattgtctgcacgccccgcaacaaccgccgcgtaa

SEQ ID NO: 13700 - RNA, 1425 nt, synthetic construct
  source 1..1425: mol_type = other RNA
atgactgctaagctggagacttttgttcctgcggcagcacctgtggtagtaccagctccagctcctgccgctcccagtgcaaatgtcgtggctcgccgggaagtcagccagagggaggaacaggcaagattagcacgctggaaagctatagaggaggcagggggacaggaggcatgggttgaggccgagctgaaggcgagaggactggctcccgaacatgaagatccctccggcctgtcggaaaaagagaagacagcctggaaggaaaaaaagaaggccgaagccgccgagcgaagagccctcaaacgccttgcctgggaggcttggcgtacagcccatatcaaccacttaggagcgggagttcactgggaggaagctgggggcccagacacttttgatctgaaggatcgtgaagaacgagccagggcaaatgggctgcctgagctcgaaagcgcccagaccctcgccaaggcactaggtctttccgtctctagactgcgatggtttgcctatcatagagaggtggataccgggacccactacagaagctgggaaatccctaagcgggatggtggcaaacgaacaattacctcccctaaaaaagagctgaaggaggcccagcgctgggttctggcgaacgtggttgaacgcctgccagtccacggagctgctcatgggtttgttgccggtcggagcatcgtcacaaacgccatggcgcacaagggagcagacgtggtggtgaagatggacattaaggattttttcccgtcagtcacctggcagcgggtcaagggactcctgcggaaaggcggtcttgccgaaggtaccgctaccctcctagccctgatggctacagaagcaccccgggaagttgtacagttcaggggcaaaactctgtacgtagctaaaggcccaagagctctcccccaaggagcgcctacttctcccggcatcacgaacgccttgtgcttgcggttggataaaaggctgtctgccttgtccagacgccttggattcgcctacacgaggtatgcagacgacatgaccttctcatggaaaaaaagtagggggaagacagaagctccggtggctgtcctgatagctcgcgtggagaaggtcttggaggcagaggggtttagagtgcacccagacaaaacccgtgtgatgcgtccgggcaatcggcaagtggtgacgggcctggtggtgaatgaggcggccaaaggtcaaccaggcgcacgagtgccaagggaggtagtgcgccagcttagggcagcactccataacagagaaaaaggcaagcccgggaaggagggcgagactctggaccagcttaagggcatggccgctttcattcacatgacagaccccgccaaggggagggccttcttagagaggctatcagccctcgagaagcgggaggcctga

SEQ ID NO: 13701 - RNA, 1446 nt, synthetic construct
  source 1..1446: mol_type = other RNA
atgacgtccaagctcgagagctacgttcctgccgctccacctcaaccggctacagctcctgcacccggctcaccatctcccgcaacacttgcccagcgtgaggcacggagacagcagcatgaggcacttctgactaggtggaaagctattcaggaggctggtggcgctgacgaatgggtgagagctcaactagtcgccaagggcgccgccgctgaagaagtcgactttgaggagttatcagagaagcagaaaagtgcctggaaggagaagaaaaaggcagaggccgtggagagacgagcgctggaaaggcaggcgtgggaagcttggaaggcaactcacattaaccatttgggcaccggggtccattgggacgaacagggaggccccgacaagttcgatgtgccaaaccgcgaagagcgcgccaaagctaatggtatgcccgagttggattctcctgaggcacttgccaaagccctgggcgtgactgtgtccagactgagatggttcgcatttcaccgcgaggtcgataccggaactcattaccaaagctggcgcatccctaagcgagatggcgggcagcgcactataaccgccccaaaaaaggagctgaaagccgctcagcggtgggttctcgccaacgtggtcgaacgactaccggtccacggtgctgcgcatgggtttgtggctggccggtccatcttgaccaatgcacttgcccaccgcggcgcagaagtgctggtgaaggtggacgtgaaggacttcttcccttccgtaacgtggcagagggtcaagggactgctgcgtaaaggaggccttcccgaaggcgccgctacgttgctgagcatgttgtctaccgaagcccccagggaggttatggagttccgggggaaaacactctacgtagccaaaggccctagggctctgccacaaggtgccccaaccagccccgcactgactaatgctctctgccttaaactggataaacgagtatctgccatggcgaaacggttggggtttacatatacaaggtatgccgacgacctgaccttctcgtggcgaagggctaagggagcgaaggggaaggcacaagccgatgcacctgtggcagtgctgttagcccgcgtaaagagtattctggaggcggagggattcacaatgcacccagaaaagacccgggtcctcaggaaagggacccagcagagagttaccggactagtcgtgaatgaggcaccagatggggtgcccgctgcacgtgttcctagggacgttgtgcggagactcagagctgccatccacaacagagaaaaggggaaaccaggtaaagaaggagaaactctcgagcagctgaagggaatggccgcctttatccacatgacagatcccgcgaaaggtcgggcctttctccagcgcttagaggccctggaaaagctcgagccgcccaagtga

SEQ ID NO: 13702 - RNA, 1428 nt, synthetic construct
  source 1..1428: mol_type = other RNA
atgactgctaagttggagccacacgtgcctgctgcaccaccagtcccaggggaagcaccagcacctacgaggcctgaccctgccaaacaggaggcccgaagagcacaccacgaggctctgcgacttaggtggaaggctatcgaggaggcgggaggcacagatgcctgggttcgtcagcaactggtggcaaagggcgtcgcggccgatgaggtggactttgaatctcttacagataaacagaaagcggcctggaaggagaaaaagaaagcagaagccacggagagacgcgcacagaagaggctggcttgggaggcctggaaagcaacacatatccaccacttgggagttggagtacactgggatgaagccgggggaccagacacttttgacgtggaaaaccgggaagagcgggctaaggcaaatgggcttcccgaaacactagacagcgccgaggctctggccaaggccttaggcatatccctgtctcgccttcgatggttctcgtttcatcgggaagtggacaccgggactcattaccagacttgggaaattccgaagcgggatggcggcaagagaaccttgacatctcccaaacgagaactgaaagccgtacagcgctgggtgctcgccaatgtcgtggagagactgcccgtacacggtgcggcacatgggttcgtagccggacgctcaatcctcaccaacgccctcgcacataggggcgctgacgtggtcgtgaaagtggatatgaaggacttcttccccagcgtgacctggcgcagagtgaagggactgctcaggaaaggtggactgaccgagaacctggcgactttactgtccctcctggcgaccgaagccccacgtgaagtggttagatttaggggccagactttgtatgtcgctcaggggccgcgggctttacctcaaggagctcccaccagtcccgcccttacaaacgccctgtgccttcgcctagacaagagagtcagcgccctgtcaaaacggttgggtttcacctatacaaggtacgccgatgatctgactttctcctggcgtagaacaaaagctcctggccaagctgatgcccccgttgccctgctcctggctagggttaagggcgtcctcgaggctgagggttttaccctgcaccccgataagaccagggtgcaacgcaaggggagtcgacagcgggttaccgggctcgtcgtgaatgaagcaccagaaggggctcccggtgccagagttccgagagacgtggtccgcaagttgcgcgcagcgattcacaatcgtgagcagggaaaacctggtcctgaaggcgagacgctagagcagctcaaaggcctggctgcctttgtgcatatgactgacgcagagaagggccgggcattcctgaggcggttagaggccctcgagcaacggcaggcccgatga

SEQ ID NO: 13703 - RNA, 1404 nt, synthetic construct
  source 1..1404: mol_type = other RNA
atgaccaatcggatcgacgatcatgtgtttgctgcaccccctgttctgaccacgagggctccaccgcgggtcaaacttacagccgccgaacgtgccgagagagagaggcaaaggactgcggccgaagccagatggctcgagattgaggccaaggggggcgttgacggttgggtacgcgcaaagttgatcgaggcgggacaccatcccgatgtggctggaccggcatctgaggacgaaaagaagactttcaaagagaaaaagacagctgagcgggccgaacgaaaagccctgagggctctcgcaaacgaagcaagacgattcggaaccgtcggctttctcgggaataccgtgcattgggatgacctgaagggccccgacgatttcgatctgaaggacagagcggcccgagctgaacgaaacgggctgcctccatgggagacggctacggaactggccgctgcaatggatctctccttgagtgagctgcggtggctaaccttccacagagaggtgtccacatcaacccactaccatagctggaaggtccctaaacgttccggcggtgaacgtactatcactgccccactgccaaagcttaaagcgctacagaggtgggcacttgaacactacttcgaaaagctgcccgtgcatgcggctgcccatggctttctgccagctcgcagcgtcttaacaaatgcccttgcccacgtaggtgccgacgtcgtcgtgaaattagatgtgaaagacttctttcctactgtgtcgtggaagcgcgttaagggcctattaaggaaagctggagctacggagcaggtcgcaacactgctggctctcctgtgcaccgaagccccgaggcagctcatcgagtttcgcgagcagacacttcacgtggccacaggtccaagagttttaccccaaggcgccccaaccagccctgcgataaccaatgcgctttgtctacgactggatcagcggctttctgcactggccagggccttgggctgcacctatacacgctatgcagacgacctcactttctctttcaaaaagactcccgagcggaagagactggccctggggattttggtggagacaaccaaggatatactgaaaagcgaaggctttgctctgcacgctaagaagacccaggttctcagacggggagcagcccagagggtaacagggctgactgttaacgaagcaggaccccaagtggcaaaggctagggtggcacgcgatgtggtacgcagactccgggctgccattcacaaccgtgctaaaggaaagccttaccgcgagggcgagagtcacgcccatctccaggggttggccgcatgggtgtttatgtcagaccccaaacggggggcccaactgttggagcaggtggctaaattgcctcagtga

SEQ ID NO: 13704 - RNA, 1437 nt, synthetic construct
  source 1..1437: mol_type = other RNA
atgaccgccagaatagatacttatgtcaaagccagtccagttagtgcagcgcagcccagacaggggcagctaagcgcagccgaaagggcacagagggagcaagaacgtgcagatcggcaggctcgctggttggccattagagaggccggcggcatcgacaagtggatagaccagcagctggcaagtcggggactggcgtctgatggcggtgacgaatcagccttgatcgagagggacaaagctgggtataaggccaaaaagaaagccgaggcggaggctcgtagggcattaaggcagaaagcgtggcaggcgtatcacgcgactcacattaatcatcttggagccggcattcactgggaggacgatccagatgtggacaggttcgacgtcgaaaaccgcagcgagagagcacgggataacgggcttcccgagatctcaacaccagagcagttagcgaaggctatgggcctctccatacccaagcttcggcagctgacataccaccgggaaaccgatacagggtcaaattattacagctttactatcccgaagagggatggctcccctagatccatctttgccccgaagcgagatctcaaggctgctcaaaggtggatgttacggcaagtggctgagcggcttcctgttcactccgctgcccatgggttcttacccgacagaagcatcctcacaaacgctctgcagcatgtgggagctcacaccctcgtgaaggtagacattagagatttctttcctactgtgacttggcgccgagttcgggggctgctgagaaaaggagggctgtccgaacaggcagccaccctcctgtctctactggccacggaggccccgagagaagtcgtacagttccggggaaagaccctgcatgtcgccaccggacctcgtgctctacctcaaggagcccccacctctcctgcactgacgaatgccctatgcatgagacttgacaggcggatgtctggcttggcacggctgctcggttgtcgctacacccgctacgccgacgacctgacgttctcgttttgccacgccgacggtcataccggtacaggccgagctccagtgggggcattgctgcgaggagtgggacaaatcttgacagcagaaggctttaaactgcaccctgacaaaactcgcgtcgtacgcgttggcgaacgccagcgtgtgactggactggtcattaatcaggtgccaaagggcgttacagctcccggtgctagggtgcccagggatgtgctccgaagactccgcgccgcactgcataaccgcgagcaaggcaagccaggtaaacctggggaaaccctcgatcagttgagcgggatggctgccttcgtccacatgaccgatccagccaggggccgagtgctccttgacagactggccgcactgaaagctaagcagcccgaggccacatga

SEQ ID NO: 13705 - RNA, 1440 nt, synthetic construct
  source 1..1440: mol_type = other RNA
atgaccgcaaagatcgaccccatcgtgcaagctgcccagcctgcaatcctgccggtaactaccgcgccttctgtgaaacctgccggcacacctgaagaacggcagcgagcccatgaggagagagtagctcggtggaaggctatcactgaggccggcggcatagatgcttgggtgcaggcggaattgaccagcaggggcctactcgtctcaggggaccctgctcggatgagtgagcgtgaacggagccagtggaaagagagaaaaaaggctgaagtcaaggagcgccggacactgagacggctagcctggaaggcatacctgggcacacatatcgcccacttagggcagggtgtgcattgggaggacaagaagggcgccgataaattcgatgtcccacagcgtgaggaaagggccaaagcattggggttgccccagcttgccggtgcggaagatctggcagccgggatggagttaagcgtggcccgactgaggtggctcgcattccatagagaagtggatacaggatcccactacagacgctggacgatccccaaacgggatgggtccgagagactgattactgcccccaagaaggagctcaagagggctcagcggtgggcgttgcgcaacgtattcgaaaaactcccagtgcacgggtccgctcacggatttctgtctgctagatccattgtcaccaatgcggccgtgcatgctggtgccgacgttgtgatcaagattgacatcaaggatttcttcccgaccgtaacgtggcgcagagtcaggggcctactgcgcaaagcagggcttgcagaaggccctgccaccctgcttgccctcatttctaccgaggctccccgtgaggtggttcagtttaggggaaaaaccctttacgttgcctcgggaccacgcgtgctgccacaaggagctcctaccagtccagcaattaccaacgctttatgcctgaggctcgacaggcggatggctggtctggcacgcaagttggggttgaggtatactcgctatgccgacgacctgacctttagttggaaaagcccagccacaggagaaacttcaagagaagttcccagggccagggcgcctattggaccccttctgcacggaacgcgagaaatactgggcgctgaggggttccggttgcacccaactaagactgcagttatgcgccgaggagatcagcaaaaagtcacaggcctggtggtgaatgctgccggtccgtcagtccctcccgtgagagtgccccgagagaaggtcagagagcttagagctgccatacgtaaccgagagctgggacgggagggcaaaggcgaaacactcgcccaactgaagggcctcgcagcatttgtgtttatggcggacccagttcgcgggcgggcctttttagaccgtctggcagccctcgagacaagggcaggtggctga

SEQ ID NO: 13706 - RNA, 1479 nt, synthetic construct
  source 1..1479: mol_type = other RNA
atgacagcaaagattgaccccatcgtgcaagctgccgcccctgttgttctgcccgtgactactgcccccgcggtgaaaccaactgagacggccgaggaaagacagcgcgcactggaagagagggtggctagatggaaggccattacggaggccgggggtatcgacagctgggttcaggccgaactgtcttctcgaggcctcctcgtgtccggggatcctgctaggatgtccgacagagagcgctctcaatggaaagagcggaagaaagccgaggttaaagagaggcggacattacggcggcaggcatggagtgcctacctgagcagccacatcgctcatctggggcagggcgtgcattgggaagagaagactggtgtggacaagtttgacgtggcccagagagaggagagagccagggctctcggcttgccagcaatcgcgagcgctgaagaactggccgccaagctggaaattcccgtcgctcggcttcggtggttggcctttcaccgtgaagtggacaccgggtcacactataaacgctggttcatcccaaaaagggatggaacccagagactgatcacatccccgaagcgtgatctgaagcgtgcccagcgctgggcccttaggcatgtgtttgagaagctaccggttcatggaacagcgcatgggttcctgagtgcaagatccattgtgaccaatgccgaagctcacgccggagccgacgtcgttgtcaaggttgatataaaagatttcttccccactgtgacgtggcgccgtgtacgaggtttgctaagaaaggctggcctcgctgaaggccccgctactttgttgtcattgttaagcaccgaagcccccagagacgtcgtccaatttaggggaaaaaccctgtacgtggcaaacggccccagggtattaccacagggcgcacctacctcaccagcaatcaccaatgctctatgcctgcggcttgacaggagaatgagtggactcgcccgcaagctgggtatgagatacacacggtatgccgatgatctcacctttagctggagggcacctgcagcggcggtagcttctgagacaggaaagaagggcaaaggcaaagccgatgctaaagcagctgagcctcgtcctcaagcccctgtgggggcacttctccgagcagcaagagacatactgggcggagagggatttcgcctgcacccgacaaagaccactgtgatgaggcggggggatcagcagaaggtgacaggccttgttgtcaacgccgctggatcgagtgtcccagcagtccgagtcccacgcgagagagtacgcgagctgagggctgccattcgaaaccgggagttaggccgcgaaggtaagggggaaaccctcgatcagctgaaagggcttgcggcattcgtgcacatggctgacccagtgcgaggcagggctttcctggagcggatagcggccctcgaatctcggtcctcaggttga

SEQ ID NO: 13707 - RNA, 1503 nt, synthetic construct
  source 1..1503: mol_type = other RNA
atgaccgccaagatagacgcaactgtgcaggcccgcgcaccagtggtcttacctattacaactcctcctgctcccggtggggctgctgcaagatttcacgcagccgctggggctgaagctaggagactagcgcatgaagagcgagtagcccggtggaaggctatcgacgaggctggcggcatcgatgcctgggtgtctgctgagctcacatcaaagggcgccctggccaccggagatccaaaagctatgtctgacagggagagggcccagtggaaggaacgtaaaaaagtcgaagcccgtgaacgccggagcttgcgcagacttgcctgggaagcatatgtggccactcacgttaaccacttaggcgccggagtgcattggtcggaccgggtagggcccgatagattggacgtccccggtctgagtgagcgagccagagcgcacggccttccagacttacctggggccgccgaacttgcttcagcgttgggactgtctattcctaggctgcgttggctggcctatcaccgggaggtggacaccgggacccattatcgccggtggcacatcccgaagcgggatggatcagccagaacgatcagctcccccaaaagggatctaaaaagggcacaacggtgggccctgaggaatcttttcgaaaaactcccggtccacgcagcagcccacggtttcttagcgtcccggagcattgtgactaacgcggctgcccatgccggagccgacacaatagttaaggtcgacattaaggatttcttcccaacgattacttggaggcgcgtacgcggtctgctccgcaaagctggcgtcgcagagggacctgccacccttgtggcactccttagcaccgaggcgccaagagatgtggtgcagttccgaggccagactctctacgtggccacaggccccagagtgttgcctcaaggggcccctaccagccctgcaatcacaaacgcaatttgcctgcgtctggatcgcagagcatcaggactggctcggaagctcggcctgcggtacaccagatacgcggacgatctcacattttccttccgagccaccgaggctcccggattagcaggtgcggctagacctagagcaccggttggcgctctgctcagaggcttgagggagatcctgtcctctgaggggtttcgcctgcaccccagtaaaaccgtggtgatgcggaaggggagtcgccagaaggttacaggcctggttgtgaatcatgcgtccgaaggtgctccagctgcccgagtgccaagggaaagggtacgagcactgcgtgctgcaatccggaatcgcgaactagggaggcccggcaagggtgagacgttggctcagttgaaggggctggccgcctttgtctacatgactgaccccgccaaaggacgcgcctttctgggacggatagaggccctcgagcgaaaccagccagctccagttggagaggctggcccgcatgatgcaaggcccgtcctgacatga

SEQ ID NO: 13708 - RNA, 1359 nt, synthetic construct
  source 1..1359: mol_type = other RNA
atgacggaggccgggggcatagatgcttgggtgtctgcgcagcttgctgccaaaggcctggccgtgacaggcgatccagcatctatgagcgatcgcgagagagggcagtacaaagaaaggaagaaggccgaagcgaaggaaagacgggcgctgcggaagcttgcatgggaggcttatcttgaaacccatgtgacacacctaggagcaggcgtgcactgggaggacgacgcaggtccagaccggttcgatgctcctaatagggaggagcgagcccgcctgattggcttgcctgccctggagacggccgatgctttggcaggagccctggaagtgcccgttgccaaactgcgctggctcgcgtatcacagggaggtggacaccggcagccattaccgtcggtggcagattcccaagagagatggcaccgcccggacaatcaccgcccctaagagagatctgaagcgggcacagaggtgggccctgcgtcatgtgtttgataaacttcccgtgcacggggccgcacacggctttttggcagaccgaagtattgtgactaacgcagttgcacatgctggcgcagatgtcgtggtcaaggtagacatcaaagactttttccccaccattacttggcgaagggtgcgaggcctgctcaggaaggctggtgtggccgaggctccagccacattgatcgcccgcctcagtactgagcccccgagagaagtggttcagttcagggggaagacgttacacgtcgcaaccgggccgagagtgctaccacagggagctcccacttcaccagccatcacaaatgcgatctgcctgaggctggaccggagaatgtccggcctcgccagaaagcttggattccgctacacacggtacgctgacgacctcacactctcctggagagctggtgggccaccagctgcacctccagctgctgctgctcctggacctggttctcctggaggtgcccggtcacaacgtcctcccatcggtagcttactgcgagggatcaaacagatactactgtcggagggatttcgcctgcatcccagcaagactgtggttatgcggcgcggcgatcgccagaaagtaaccggacttgtcgtaaaaggagctggcgattgggtcccacctgcccgtgttccgagggaaagagtacgcgagttgcgagccgcgattaaaaacagagagctgggaaggcccggcaagggcgaaaccctccaacagctgaaagggctcgcagcgttcgtttatatgaccgaccccgtccgcgggagggcctttttagaccggttggccgcactcgaagccctgcaagtcaagtccgggggagccggtgaacctactgggtga

SEQ ID NO: 13709 - RNA, 1455 nt, synthetic construct
  source 1..1455: mol_type = other RNA
atgacagcaaagattgacactagcgtgagggcagcccctcccgttgtccttcctatcacgacaacaccaccttctcctccgcgcgttagcgccgaagaacgggcacgagtgctggaagagagattgagcagatggaaagcgatctctgaagggggaggaatagatcagtgggtgagcgctcaactcactgccaagggcgcattggtcactggcgatcccagcaggatgagcgacaaggagcgggctcagtacaaagaaaggaaaaaggtagaggcgaaagaacgaaggtctttacgtaaactagcttgggaggcctacgctgcaacccacatctcccacctcggcgctggcatccattgggaggactcgactgacgccgacaagttcgatatagcaaatcgtgaagagcgcgcgaagaccattggccttccacctctggtcggggccgtggatctggctaaagcgctggatatacccataaccagactgaggtggatggcatttcaccgcgaggtggacaccggatcccactaccgacgatggctcatccctaaacgcgacgggtccagtcgtacaatcacagctccgaaacgggacctgaagagggctcagaggtgggcactacggaacgtgttcgatagactgcccgttcatggcgccgcgcatgggtttttgtctgcccgcagcattgtaactaatgccaaggctcacgctggtgccgatacagtggttaaggtggatatcaaagactttttcccaacagtcacttggcgtcgcgtgaggggccttctgcggaaagctgggatggccgagggtccagccaccttactcgcactactgtcaacggaggcccccagagaaatcgtgcagtttcggggaaagacactctatgtggccactggcccgagagtgctcccacaaggtgcccctaccagtcccgccattaccaatgctatttgccttcggctggaccgcagagtctccggactggctaagaagctcggcttccgctacacgcggtatgccgacgatctgacgctgtcatggcgtgcccccgttaagccggatgctggcacatccccaagagcccctatcggaactttattgcgggggctgaaggaaatcttgcagtcagagggtttcaggatgcatccaagtaaaaccgcaattatgagggctggaatgaggcagaaggtaaccgggcttgtgattaacaaggccggggagaacatcccagacgcgcgagttccccgcgacaccttaaggcggctgagagccgccattaagaaccgcgagttgggtagacccggtaaaggcgagtctctggcacagctgaaagggctggccgcttttgtctatatgacagatcccgtccggggaagatcacttctcgatcgaattgacatgctcgaggcaagaagtgaaggcggcggatcccctaccccagcaacctga

SEQ ID NO: 13710 - RNA, 1431 nt, synthetic construct
  source 1..1431: mol_type = other RNA
atggatccgtggataacggcccagctgaaggctaagggcctgcttacagaagatttgtcagatgaggaagatgaggacgaggatgagagtgatgatgacgacgacgaggacagcgatgatgaggattcaaatgacgaggacagcgacgacgaggactccgacgaggatgcacctccccggaaggcagctgctaagaaagctgtcgctaaagcagccccaaaggtgaagtctgacctcgggaagagagagtataaagaaaaaaaacaggcggaagccgtcgaacgtcgagtcctaaagaggctcgccagacaggcatataccgcagcccatatcgcacatctcggggctggcatcttttggcgcgatgacacaaggcgacccgacgccttcgaccaccctcagagggagacgagggctcaggagctgaaacttgagcttactgatgcaaagcaattagctggcgcactcggactgactatccctgccctgcggtggctctcctttcatcgggaggttgataccggcacccactaccgaagttggcaaatacccaaacgtgatggcaagtctacccgcaccattagctccccaaagaagcagctaaagaccgcacagagatggttgttaagaaacgtcttagaaaagctgcccgtgcacggtgctgcccacggattcctatccgcccggagcattgtcacaaacgcccaggtacacgccggtgcggaagtggtgattaaagtggacatcaaggatttcttcccctccattacctggaaaagggtgaaaggtctgctgcgcaaacacggactgccagaaggggtggctactctgttgtctctcctctcaactgaggccccgcgagacgtagtgcagttcaggggcaagacactgtacgttgcaaagggacctagggctctgccacaaggtgccccaactagtccggcgcttacaaatgccatctgcctgagacttgaccgccgactctctggcctggctaggagcttgggctttcgctacacacgctatgccgacgacctcaccttcagctggcatccagaacctgttttacccggtacttcgccccaaccaggaacgggggccttgctgagagggattggccagattctggaaggggaaggcttttcactcaaccaagcaaaaacccgcataatgcgggacggaactcggcaggccattacagggctgatcgtgaacggagcccctggcaaagccaccgctagagtgcctcgggagacacttcgtcagctgcgggccgcaatccacaatcgcgaagcgggtaaacccggaaggcctggcgagggactggaacagctgagaggcatggctgcctttgttcatatgaccgatgcggccagggggaaggcattgttggctcggatcgacgctcttgcggccagagataaggggtga

SEQ ID NO: 13711 - RNA, 1413 nt, synthetic construct
  source 1..1413: mol_type = other RNA
atgacggccccgttcgatccccatcttcctgccgacagtcccgtaagggcggaacccaggtctactacccgacgctcccccgaggaaactgcaaagcttgccgccgttagagctgagagagtggccctctggaaggccatcgaggaagcaggcgggatagcagcctgggtcagggctgaaattgcgaaaaaaggaatcagtacagacggggtggacccctcaacattgagcgatcggcagaaatcatccttcaaagacaagaaacgggcggagagcgaggcaagacgtacctttaagcgcctggcatgggacgcctacaaggagacgcacatcacacacctgggtggaatttactgggatgaagacgcttcccccgataaatttgatatagacgggcgggaggaaagggcaaaagacaacatactcacagatatccagtcaccaggtgctcttgctcaggccttaggcctgaccgtggccaagctgcgctggcttacatttcatcgcgatgtggacagcggaacacactataggcgttggcagataccaaaacgggacggaagtatgcgcactattaccgcccccaaactgcacatgaagactgcccagagatgggccctacgtaacgtattcgataagctgccggtccatggcgctgcacacggatttctcgccgcaaggtctattgttacaaacgcctccgtgcatgccggggccgatgttgtcgtaaaaatcgacatcgaggagttcttccctactatcacctttaggcgggtgaagggcctcctacgcaaagcgggcctctcagagcaggctgctaccttgatcgccctgctgtgtaccgagccacccagggagtcggtcaactttcggggcaaaacggtgtacgttgcttctggtccacgtgcactccctcagggagcaccaacttctcctgctattaccaatgctctgtgccgaagaatggatctgcgattgagcgggctggcaagactgctaggcctgaagtacaccagatatgctgacgatctgactttttcttggaagtgcccaacaccgggagctaaggctcctctgggggtgctgctgaggggtgtgaccacaattcttaagagcgaagggttcagaattcacaagaaaaagacctccattatgagaaaaggggcacggcaagccgtcactggcttgatcatcaatagcgaagttggcgccgcgagtgctcgagtgccacgagatgtgatcagaaatttacgggccgccattaagaatcgggaactcggcaggcctggaaaggagggcgaaacgctcgcccaactccagggtttggcggccttcgtctatatgtccgaccctgtgaaaggtcgcactttcttagaccgcatcgcaaagttgcaagctcctacaaagacctga

SEQ ID NO: 13712 - RNA, 1407 nt, synthetic construct
  source 1..1407: mol_type = other RNA
atggcctctaagctcgaaacaatggtgagtgcagctgctccagtggaaaaggaacagccagctcccaagtcggctcccactgaagagcagcttgctgcgagggcaaaagcacacgaggagcgggttctgaggtggaaacaggtccaggaagcgggcggagcggatgaatggatcagaggggagttgcgcaagaagggactgctggttgaatcagacccctcccgactcggcgatcgagaaaagggatctttcaaggagcaaaaaaaagccgaagcagcggagcgcagggctctaaaaaagcttgtgtgggatgcttatagagctacccatgtcgtgcacctgggtgtcggcgtccattggagcgaccacttcgaggctgaccgattcgatatcgagaggagggaagaccggctgaaggccaatgatttaccagagtataaggacgcggagggtttggccaaggcgatggggattgatgttcctacactgagatggttcagctaccaccgtgatgtggacgcagggactcattaccgccgctggcagatacccaaaagaaccggcgggtccagaacgattacggcacccaaacgaggtctgaaggcagcccagaggtgggtgctccgcaatatcgccgagaagctgcctgtgcacggagctgcacacggcttcctctctgcccgctcaatagtgacaaatgcccaagtgcatgccggcgctgacgttgtagtaaaagttgacgtcaaggatttttttccaactgtcacctggcgccgtgtgaagggcctcttcaggaaggcaggtttaaacgaggcaaccgccacaatgctggccatggtgtgcactgaagccccgagagatgtggttgagttccggggccggaccttgtatgttgccagcggccctcgtgccttacctcaaggagcccctacctccccagcaatcactaacgctatctgtctgaggctggatagaagactgagcggcctggctcgggtgctagggatggtatacacccgttacgcagacgatctcacattctcctggcggaagagtgacgatagggccaaggctcctgtgggggctttgctcggcggagtcaagaaaattctgagagcagagggatttgtgttgcatcccgacaaaactacggtgatgcgggatggcgacaggcagaaagtcacagggctagtcgtgaacaaagccgaaggtcaaccagctgcacgcgtaccgagagagacactgcgcaaacttcgggccgccatcaagaaccgggagctcggtcgacccggaaaaggcgacgaaaccattgaccagcttaagggaatggccgcctttgtatttatgtgcgacgccaaaaaagggcaggcctttcttgaccgaattgccaagctggaggggaaatga

SEQ ID NO: 13713 - RNA, 1305 nt, synthetic construct
  source 1..1305: mol_type = other RNA
atgtccgagacaccacctacatgggaggagatagcccaggtgggagatatcgaaagatgggttgttgcacagttgcaacaacgcgggctgcttgacgaagtggcggatcccgccaagctgtctggcaatgctctgcggcagtttaaggcccgacgtgaagaggaacgaaaagtccgaaaactcttaaggcagcaggcctgggcagcatatcggaaggcccacctggtgcaccttggcgctgacgtgttccaccacgacacccctgaccaggaccggtacgacctgccagaccccgaaacacgcagggagacaaatggcttgccagctctgaaggatgtgcaagctctggcgaaagctctcgacctcactatccctcagctgcgttggcttgccttccatagggaggtggactccgggagccactaccagtattggaccattccaaaacgcgatggaggccagagattgatctccagtcctaaaccgacactgaaaaagacccagcgctggatccttcggcagatggcggagagattgccggttcatggcgctgcacacggatttctcccaggaaggagcattttttccaacgcagctgtccatgccggcgcacgtctgttagtcaagctcgatattcgcaacttctacccaaccgtgacctggcggagagtcaagggtctatttcgaaagggaggttacggggagcaggttgcgactgtactggccctcctttgtaccgaagccccaagagagctactgcagttggacgggaagccctaccatgtcgcaagcgggcctagagcacttcctcaaggtgcccccacttctcctgccctctcgaataccgtatgcctgcggctggattgtagattatctggcttaagtcaaaaactgggattccggtatacgagatatgcagacgacctgactttctcatggcatgaacacagccctccgcccctgggtaggttactcaggtgcgccaggctgatcctgcagacggagggttttgtgccacaccccgaaaaaacgcgcattctcaggcggtcacgaagacaaactgtgaccgggctagtggtaaacgctgcccccgatcatagttcaccagcgcgcgttccccgcctcaagatacgcgaactcagggctgccctgcataatagactgcggggcaaacccggaaaggctggggagactcttgcccagctgaggggctgggtggcctacctacacatgacagatcccgataaggcaaagcctttcttggcccagttgaaccagctggaggctcgtggcgctgatgagtga

SEQ ID NO: 13714 - RNA, 1302 nt, synthetic construct
  source 1..1302: mol_type = other RNA
atgagtgagactccacctacatgggaggatatcgcacaggttggtgacattgagcgatgggtcgtaacgcgacttaggcaactggacctcttggatgaagtaaccgaccccggcaagctgacctcggcagcattgcatcaatacaaagccagaagagaggaggaacggcgcgtgaggaagcagttgaggcagcagggatgggcagcgttcaggcaggcacacctggtctacctaggcgccgatgtcttccaccacgacacccctgaccaggaccgctacgacttaccagatccagaaacacgcagagaagtgaacgcactgccggcccttaaggatgtgcaggcccttgccaaggcgttggacctgagcatccctcgactgcggtggctcgccttccacagagaggtcgatagtgggagtcattatcaatattggacaattcccaagcgcgatggtggggcccggcttatctcagcccctaaaccaaccctcaaaaaaacccagcggtggattctcagacagatcgctgagcgccttccggttcacggtgctgcgcatggcttcctgcctgggagatctattttttctaatgccgctgtccacgccggggcacatacgatcgtgaagctggacatccggcacttttaccccactgtcacctggcgcagggtaaagggcctgttcagaaaagggggatatggcgagcaagtggccaccgtgcttgccctcctatgtaccgaggctccccgggagttactcccactcgatggccagcatgtgcacgtggcgagcggaccacgtgccttacctcagggcgcaccaacatcacccgctctgtcaaacacagtgtgtctgcggctggactgccgcctttccggattatcccagaagttgggctttaggtatactcgatacgctgatgacctaactttttcttggcacgactcctccccacctcctctgggacgactgctgcgctgcgtgcatgctatactgaaagccgaaggttttgttccacaccccaagaaaacgcggatactcaggcgtggtcgcaggcaaaccgtcactggactggtggtgaacgagacacccgcaggaagccccgctagagttcctcgggcccaggttagaagactccgggccgctctgcacaataggctgcatgggaagcccggaaaagaaggggaaagcctggcacagctgaggggctgggtggcttttctacatatgacagatcccgaacgtgccaaaccgttcttggctcaattgaagcagctcgaagagcgtggcactgatgagtga

SEQ ID NO: 13715 - RNA, 1587 nt, synthetic construct
  source 1..1587: mol_type = other RNA
atgggtctgttcgactggatgttcaggcgaggtcgtaagagcgaccccgagccgattgctccttcgcctgtgtctcccccccctccatctgaggcacctggacgtcctgcccccaaagccgaacctcagccagaggcaacaggcgatccctatgccgccactgaatttttgcccgtaagtaggcaggaaatcgtggatgcagctaaggggggaaacctcctgagtacagcctttcagttcggacgtcagagcataattccacccgctagtgatccaagaacacagctcatcgacagggcaatggttacacacggcttactatccccagaagaactcaatgagattcaccgcgtcggggaggagtacgaccgcgtaaagcctactgatgccaatctagctgctgccgcaggacttgcgggtgcagctgctgtcaaagcatacagggaatccaaggaacgcgaaaaggagagaaaaaaggcagaatccgcggcgcggaaaaaagccagggccgatgccatccgccacagaagagcctcagatattatttttctcggcaggggggtatcgggcagactgcacttgaggatgtcagaccaacagcgcctcgccgcccacgaattacccgtgatgcataccccggctgatgtggcaggggcacttggtctgagcatcaaacagctacggtggttggcctatcacagcgaggccgctacgcgtacgcactacgtgaagttccaggttccaaagaaatcaggaggtatgcggacgttagctgccccgcataagacactgaagggggcacagcattgggtgcttgccaatgtcctgaataaattacctgtcactgaggctgcccatggtttcgttgccggcaggggcatcgtcagtaacgccaaccctcacgtgggcaaggctgttgtggtcaatctggacctcagcgacttttttcctacaataacctttcatcgcgtgcgggccgttttcgagcggtacggttatagcgggtccgtggcatctgtactggcccttctgtgcactgaatgtccacgggcaaccgttacctatgctggcactaagtatgaagctgctaccggaccacgaggattgccgcaaggagcccccacttctcccggactttccaaccaggttgcccggaaactggataaacgcttgctgggcgtggcagccaaactggggctcacctacacacgctacgccgacgacctgaccttctcaggcggaccagaattggcggggaagattggctggcttctggcgaaagtccggaacatagcccgggaggagggcttcgcagtgaacgagaaaaagacacgagtgatgcgccgatctaccgctcaaaccgtaactggcgtggtggtgaacgataagccctccgtcagcagagaggagctgagacgactgagggctatcctgcatcgagctaagaccgagggcctggaggctcaaaatagagagggcagacccaactttcggtcttggctggcgggaaaaatcgccttcgtcaatatggtgaggccagacgcaggggcgaagctcaaggcagcgtttgacgccctcgggagatga

SEQ ID NO: 13716 - RNA, 1572 nt, synthetic construct
  source 1..1572: mol_type = other RNA
atgggcctcttcgattggatgttccgccggggtagaaaggtcgaacctgacccggtagccccaccttccactgacgctagtctgaggggagccgccaagcctgctgaacctgcaccacctcccccacctgcggatcaatacgcggctacagactttctgcccataacgcgcgaggagatcgtggacgctgcaaaggaacacggccgattgttatggaccgcatttcagttcgggaggccctcccaaattcctccgacatctgatcctaggactcagatcatcgatagagcactggttacacacggcctgctgacccctgaagatctgacggagattcataccgtgggagctgagtatgacgaggttaaacccacagagatggctatcgccgcagccgcaggtttagcggggaatgccgcagtccaggagtatcgagaagccaaagaacgagagaaggctcgtaaaaaggctgagtctgccgcccgaaaaaaggctagagcggccgaggtgaagagaagacgcgacacagacataatttttttggggcgtggcgtctccggcagactgcatatgagactttcggatgaggctagccttactgcacgggggcttccagtgctgcatgctccagccgacgtcgcgaaggctttgggcctaacaatcaagcagctccggtggctggcttaccacacagaggcagcgacgcgaacccactacgtgaagtttgaaatcccaaaaaaatccggaggaatgagaacccttgccgcaccccataaacggctcaaagccgcccagcactgggtgctcgcaaacgtagtgaataagctcccgacgaccgatgctgcacatggattcgtgccagggcggggcattgtgtctaatgccaacccccacgttggcaaggccgtggttgtgaatctcgacctgagtgatttcttccccactattacctttttccgggtccgggcagttttcgaacgctatgggtacagcggcagcgttgctagcgtattagccctgctggccacagaatgtcccagggcctcagtgacttacgccggcaccaagtacgaggcggcaacaggaccgcgtggtctaccccagggtgctccaactagccccggcctatctaaccaggtggcgaggaaattggataagcgcctgcttggcgtggctaccaaactgggactgacttatactcgttatgccgatgacctcactttttcaggtgggccagagctggccggtaagatcgggtggctcctcgccaaagttcggcacgtcgccaaagaagaagggttcgctgtgaatgagaagaaaaccagggtaatgagacgctcagctgcccaaatggtaacaggagtcgtggtcaatgataagcctagtgtgtccagggacgagttacgcaggctgcgggccatactgcacagggctaagagcgaaggacttgacgcccagaaccgcgaaaaccgccccaactttaccgagtggttgagaggcaagattgcatttgtgtcaatggtcaggcctgacaccggggccaaactgaaagccgcattcgatgcattgtga

SEQ ID NO: 13717 - RNA, 1569 nt, synthetic construct
  source 1..1569: mol_type = other RNA
atgtctgcgttcgactggctcttcaggagaacccggaagccggatccagaaccgccagcacctccacccccattgcctcctccagtggccgatgctcctggttccccgagtccaccccctcctgtcgctgatccgtatggaagcgaattcctccccgtcactcggggggagatagtggctgccgcaaagtccggaaacctgctgagtacagcattccagtttggcagaccctcagtgataccccctaccagcgacccccgcacacagcttattgatcgcgccatggtgactgccggcctgctctctccagaggagctagccgaaatccatagagtgggcgaagagtacgaaaaggccaagccaacagaggcaaacttggctgccgctgcaggtttggccggagatgcagcagtccgggcctatcgggctgagaaggaaaggcgaaaggctcaaaaaaaggcggagagcgctgcccgcaaaaaagaccgtgccgaggctgtagccactagacgggctacagacatcatcttcctggggagatgcgtgagcggaaagctccatttacgcctcagcgacgagacaagactggcggagttcggccttccagtcctccatacccccgctgacgtggccaaagccctaggactcaccattacccagctgaggtggctggcctttcataccgatgtagccaccaggacgcactacgtgaaattccaagtgagcaaaaagtcgggcggtacacgaaccttggctgctccccacaagacgctcaaagcggctcagcgatgggtcctggccaacgtagccgcgaagttcccagttactgaagcggcacacggttttgtggcgggaaggggcattgtgtccaatgcagggcctcacgtgggcaaagccgttgtagtcaacttagacctctctgatttttttccgtcagtcgtgtttgccagagtcagggccgttttcgaacggtacggctattctggtgcagttgcgacggtgctggccctgctgtgtacggagtgcccaagagcagccgttacttatgccggcactaaatacgaggccgcaacaggtccccgagctcttcctcagggagcccctacatcacctgctctgagtaatcaagtagcccggaagcttgaccgacggctgttaggagtggcccggaaactaggcctgacttacaccaggtacgcagatgacctgacattttcaggggggcccgagcttaatgaaaaagtggggtggctgctggcaaaggtccgcaacgtcgctagagaggagggcttcgccgttaatgagcccaagacccgtgtgatgcgacgctccgcagctcagactgtcaccggggtggtggttaatgacaagccctccgtggatagggcagaacttagacgtctgcgcgctatcttgcaccgcgcaaaggcagaaggactggcggctcagaaccgcgatgggaggcctgactttcgggcttggctcgtggggaaaatcgcctttgtacgtatggttaggcccgacgctggcgcaaagctgaaagccgccttggatgccttaccaggatga

SEQ ID NO: 13718 - RNA, 1599 nt, synthetic construct
  source 1..1599: mol_type = other RNA
atgtctatgttcgattggatctttcgtcggaaaagggacgtcaccccttcagccgaatcagcacccccctctgttcctccaccccctgacccaaggccgcaacagcaggcaccgaaagctgaacctcaggctgaggctgttggcgacccctacagcgcctctgaatttcttccgatctccagacaagagatcgtggacgccgctcagaagcacgggaggctactcgctactgcttttcagttcgggagacagagcataatcccccccgtatccgaccctaggactgaaataatcgatcgcgccctcgtgaccaatgggctgctgagccctgaggagcttaatgagatacatagagttggagaggagtatgagaaggtccgacctaccgaacagggtatggctgcggcagcgggtctagcagggaatgcagctgtgaaggcttaccgcgaagcgaaggagcgggctaaagcaagaaagaaagcggagagtgccgagaggaaaaaggcccgggcagaagcagtgcgaagacgaagggccaccgacgtgatctttctggggcggggtgtctctggccgacttcacctccgcatgtccgatgaggcaaagctgaccgcactcggcctacccgtgttacacgctcctgccgatgtggccaaagccctcggactcacaatcaaacaactgcggtggctctctttccacaccgaagtggccactcgcactcactacgttaagttccaggttcccaagaaatcggggggcgttagaacgcttgccgcacctcataaaaagctgaaggccgcccagcactggattctgggaaacgtgattaacaagttcccagtgacagaagccgcccatggttttgtagccggccgcggaattgtgaccaatgctaatccgcatgtcaataaagcagtagtggtaaaccttgacctgagtgattttttccccagcatcgctttcttccgggtgagagccgtgtatgagagatacggatacagcggctccgtagccactgtcctggcactgctgtgcacagaatgcccacggaccgccgtgacgtatgctgggacaaagtatgaagccgccactggtccacgtgggttgccacaaggcgcaccaaccagtcccggattgtccaaccaggtcgctcggaagctggataaacgtctgttgggcgtggcggctaagctgggactcacctacacacgatatgctgacgacttaacgttctctggcggagctgagctggcgggcaagattggctggctgttggcgaaagtccgcaacatctgtcgagaggagggttttgccgttaacgaaaaaaagacaagggtgatgcgtaggagtgccgcccaggtggtcacaggagtcgtggtcaatgataagccatccgtgtcaagagacgaaattcgcagactcagggcaattctgcatcgcgccaaaagcgaggggctggatgcccagaacagagaggggcgggagaatttcagggaatggttagcgggaaagattgcctttgtgaacatggttcgcccagacgtcggcgctaaacttaagactgcattggattcattgggcgagcggcctgcctga

SEQ ID NO: 13719 - RNA, 1611 nt, synthetic construct
  source 1..1611: mol_type = other RNA
atgagcttgttcgactgggtgttcaggaggaagagagacgcagatactccccctgctccaccacctgctgcacccactgctccagcctcatcagataaagcgccctctggtaacacaacgtcaggtaccccaggggctaacgcccctcggagttctgaagggtccgaggaccagtacgcagccaatgactttctccccatcagtcggcaggaaattgtcgatgccgccaagaagcacgggcgactgctcgcaaccgcctttcagtttgggcgtcagagcattatccctccagtatcggaccctaggacggaaatcatcgatagggcgctggtgactcacggactgttgacaccagaggagctgaatgagatccatagggtaggggaggagtatgaaaaggtccggccaactgaacagggcattgctgctgccgctggcttagctggcacagccgctgtacaagcatatcgcgccgcaaaggaagccgagaaggagagaaaaaagcgtgaggccgaactccggaagaaagttcgggcggaagctgtgtggcgacggcgaacaactgacataattttcctcggccgcggtgtgagtggcagattacatctaaggctctctgacgagggtaggctgacggagctcggactgcctgtgatgcacacccccgcagatgttgccaatgccctggggctcactgttccgcgccttcgttggttggcgtttcacacagatgtggcgacaaggacccattatgtgaagttcagcgtccctaagaagtctggcggaacaagacagctggctgccccccataaatccctgaaagccgcccagcactggatcctcgccaacgtggtcaataaattacctgtgacagaggccgcacacgggttcgtagccgatcgtgggatcgttactaacgccaacccgcatgtgtgcaaagctttcgtggtgaaccttgatctgtccgacttctttcccagcattgcgttcccacgcgtaaggtccgcctttgaacgatacggatactcgggctgcgtggcgaccatattagcccttctgtgcaccgagtgtcctagggctgccgtgacctacgcaggcaccaagtatgaagctgcaactggaccccgaggcttgccgcaaggagcacctaccagccccggactgtctaaccaagtggcccgcaaattggataagcggcttctgggcgtggccacaaagctcggcctgacctacacaagatacgccgatgacctcacgttttccggagatgcagacgctgctgccaagatcggctggttgctgaccaaggtgcgacacattgcctctgaggaaggtttcgctgtcaacgagaaaaaaactagagttatgagacggagcgcagcacagatggtgaccggagtcgtcgtcaatgacaaacccagcgtctgtagagacgagcttagacgccttcgggcaattctgcaccgcgctaagagtgagggtctggatgcacaaaatagagaaaaactaccgaatttccgcgaatggctacgggggaagatagcttttgtttccatggtccgcccagacgcgggcgcaaaactgaaagctcagctggacgccgtttcatga

SEQ ID NO: 13720 - RNA, 1587 nt, synthetic construct
  source 1..1587: mol_type = other RNA
atgagcttattcgattggatgttcagacgccggcgtacttccgaacctgagccagtgcagcccccggtaccagtggaacctcccgttcccgcagttccaccagttacagccgctcccgagacgacaaagacagaaccagcaggcgacccctacgccagcgctgaatttcttccggtgtctcgccaggaaatagtcgacgcggccaggggcggaaatctgctgagtacggcattccagttcggccgatcctctactatacccccagcatctgatcctcggacacaactgattgaccgcgccatggtcacccatggcctgctgtcacccgaggagctcaatgaaatccatagggtcggcgatgagtatgatactgtgaagcccacagatcagtccatggcggcagctgcaggattggctggagcagccgctgtgagggcgtttagggaagccaaagagcgtgagaaagcccgcaagaaagccgaaagcgctgctaggcaaaaagctcgtgccgaggccgtcaaaagacgacgggccaccgagatcattttcctagggagaggcgtctcaggcaggctgcacttgaagcttagcgacgaactgaggctggtggcaaacggacttccggtactgcactctcccacggacgtggctcatgccctgggcttgaccatcaaacagctcagatggctggcatttcacaccgaggttgcaaccaagacccactacgtgacatttcaggttcccaagaagtcaggtgggatgcgaaccctggcagctccacataaagccttaaaggccgctcagcatcgcttgctcgagacagtggtggcgagactgcctgtgacagaagctgcccatggctttgttgccgggcgaggtatcgtcactaacgccggacctcacgtggggaaggaggtagtggtgaatttggacttgtctgattttttcccatccattactttcccccgcgtcagggctgtgttcgagcgctatgggtactcagggagcgtagctacggtcctggccctcctctgcaccgagtgtcctcggcaggcagtgacctacgcaggtactaagtatgagagtgctactggtccacggggactacctcagggagcaccgacatcccctgggctcagcaaccaggtagcccgtaagcttgacaagcgcctactcggcgtggccgctaagttagggctgacttacacccggtatgccgacgacttaaccttctcgggcggtcccgagcttgccagcaagattggttggctcctggctaaggttcggcacgtcgcacaagaggagggctttgccgtgaacgaaaaaaagactcgggtcatgcgccggagtatggcccaaaccgtaaccggggtggtggtcaatgataaaccttccatcgatagagacgaactgagaaggctccgagcgatcctgcacagagccaaaacagagggacttgatgctcagaatcacgaagggaggccaaactttagagcctggctcgccggaaaaattgcgttcgtgcacatggttagacctgacgccggcgcaaagctgaaagcggcgcttgacgctctggatagttga

SEQ ID NO: 13721 - RNA, 1587 nt, synthetic construct
  source 1..1587: mol_type = other RNA
atgtctgctttcgactggttatttcgcaggaagagaactccggagtcagaacctcccgcacaggctcctccagcagctcctgcaccagctaccccagtggcaacccctccagctgcctctgcacctgctcctcccaaggctccagcagccgatcccatgagctcagagttcctgcctgtgacccgagccgagatcgtggatgctgccgggaaaggcaacctgctttccaccgcattccagttcggcagaccctccattatccctccggcctctgatcccaggacgcaactcatagatagagccctggtcacaaatggcctcctcagtagtgaagagctgactgaaattcacagggtcggggatgaatacgaagccgtcaaaccaactgaggctggaatggccgccgctgcaggacttgctggagaagccgccgtgaaggcgtatagagaggataagggacgcagaaaagcgcaaaagaaagctgaaagtgccgaacgaaaaaagcagcgcgcggaagccgtaaaactgcggcgcgagacggatattatctttctcgggcggggggtcagcggcaagttgcatctcagactgagtgacgagtccaaactggctgagcggggcctcccagtgatgcatacacccgcggacgtcgctaagtttctgaacctgaccattaagcagttgcggtggctggcctttcataccgacgtggccacacggacacactacgtaaagttccaggtgcccaaaaaaagcggcggtgtgcgtaccttagcagcccctcatcagaagttgaaggctgcccagcacgcgatcctggcaaatatcgcgtcacgtttccccgttacagaggccgctcacggtttcgtggctggacgaggcatagtgaccaacgcttcgccccacgtagggaaggtggcagttgtgaacctcgacctggaaaactttttcccaaccgtggtttttcctagagtgcgcgccgttttcgaacgttatggctactccggatctgtggccactgtgctggcactcctgtgcaccgaaagcccacgcgcctccgttacgtatgcgggtgtcaagtacgaggcagcaactggtccgcgcggacttccgcaaggagcaccaacaagccccgcactctcaaatcaggtcgccaggaagttggatagacgactgcttggcgtcgccgccaagctagggcttacttacacgaggtatgccgacgatctaacattttccggcggggaggagttaactagcaaaaccggctggctcctggccagagtgaggcatgtagctcaggaagagggcttcacagtgaacgagaaaaaaacacgggttatgaggcgtggtgccgcccagatggtcactggagtggtggttaatgacaaaccctctattgacagggatgagctgcgaaggttgcgggcgatcctacaccgggcaaaaaccgaggggttagacgcccaaaatcgggagggccgccccaattttagagcttggctggtcgggaagatcgcttttgttcgcatggtaaggcctgacgcgggtgcaaagcttatggccgccttggacgccctggggtga

SEQ ID NO: 13722 - RNA, 1575 nt, synthetic construct
  source 1..1575: mol_type = other RNA
atgagcatgttcgattggctatttcgtcgcaaccgcaagaccgaaaatgtgccgcttgttcctccaccagctccagcccccgttgccgatgtaccaagggccgaagccaagccacaggccgctacaccctcaccagtggacccctacggttctgaattcctcccaatcacccggggcgaaattatagacgccagtaagaaagggaatctgctctctaccgcattccagttcggacgcccttccgtcattcctccggcagcagaccccagaacacacctcattgatagagcacttgtcaccaacggcttgctgactcccgaagacctgaccgaaatacatagagtaggggacgagtatgagaaagtgaaacccaccgagatcggaatggcagccgccgcaggtttggcaggagatgccgctgtgaaggcatataaggccgacaaagaaagacgaaaagctcagaagaaggcagagtccgccgccaggaaggctgcaagaatcgaggctgtcaaggctagacgggctacggatatcatttttttaggaaggggtgtttcaggcaagctgcacctgaggctgtcagatgaagcccggctagccgagcgcgagctacctgtaatgcacacacctgcggacgtggccaaattgctcgggctgtcgatcaaagaactgcgatggctagcctttcacacagaagtggccacacgcacacactatgtgaaatttcagatcccaaagaagtccggcggaatgagaactttggctgcgccccacaaaaaactcaaggccgcccagcattcaatattatccaacatcgtcagccgcttaccggtcactgaggctgcacatggatttgtggccggccgaggaatcgtgagcaatgctaacccccacgtggggaagaccgttgtggtgaatctggacctggaaaattttttccctactgtcgtatttccccgtgtgaggagcgtgttcgagagatatgggtacagcggcagtgttgccacgatcttggctctcctttgcactgagtgtccgcgggccacagtcacctacgctggtgtgcagtacgaggcctctaccgggccaaggggacttcctcaaggtgcccctacaagccctggcattagcaaccaagtggctcgaaagctggataaacggctgctcggcgtagcagcgaaactgggcctgacgtacacaaggtacgctgatgacttaactttcagtggcggcgaggccctgaactccaaaaccggctggcttctcgcgaaggtgcgccatatcgcacaagaggagggattcgcggtgaatgagaagaaaactagagtcatgcgtcgttctgccgcgcagctggtcactggtgttgtggttaacgagaagccctctatatcgcgggatgaactgaggcggctgagggctattctccatcgcgcaaagaccgaggggctggaagcacagaaccgggagggaaggcctaattttcgagattggctgattggcaagattgccttcgttagtatggtgcggcccgacgtcggggggaaacttaaggcggctctcgacgctttgtcctga

SEQ ID NO: 13723 - RNA, 1644 nt, synthetic construct
  source 1..1644: mol_type = other RNA
atgtccctatacgactggctgttccgacgcacccccaaacctgatcctgagccgacccctgaagccagaggtgccgatgcccctaggagtcctagtcctcctccacccccccaacccgcacaacagggtgtcaatgcaccaagatctcctcagcccccaacaactcccgagccgcaaccggtgactgatccgtatgccgcctcggactttttaccaatcactcggggcgaattgctcaagagtgcccaggctgatggcaatctcatgaggaacgcatggcagaccggccgaaccagcattattcctgatgctaacgaccctagaacgaagctgatagatagggccctggtcgcacacgggctgttaacacctgagcagctgatcgaaattcatcgagttggcgatgaatatgctcgcgctaagccggaaggcgaccccatcgctaggttcgcggggatggctggagaggcagcagtacaggcctaccgagaggccaaggccagactcaaagagcagaagaaagccgaagctaaggcacgcgaagaacgccgggccgaagaggttaaacaccggcgcgcaactgacatagtgtttctgggtcgaggagtgagcgggcggttgcaccttcgcctctctgacgaggcccgtcttgccgactttgggctgcccgtcctgcataccccagcagacgtggcttctgcactgggcctttctatccagcagctgcgttggttggctttccacacagaggctgctaccaggacccactatgtgaagtttgaagtgccaaagcgttccggaggcatgcgcgttctctctgcacctcacaaaaccttgaaggccgcccaacggtggattctagccaacgtggtaagcagattcccagtgcccgtcgcagcccatggttttgtagccggtaggggaatagtttcaaacgctggaccacacgtggggaaggcggtggtgctcaacatggacctggaaaacttttttccctcaatcccattcccaagagtaagggcggctttcgaacgacatggatattccgggagcgttgccaccgtctttgccctgttatgtaccgagtgcccccggacgactgcgacatacgcaggtgtgaaatacgaggtggcaacagggccacgtggactgccacaaggagcccctacttcaccagccctgtcaaatcaggtcgcgagaaagcttgatgctaggctgctcggcctcgcagccaaacttggccttgcctacactagatatgccgatgacctcacattctctgggggccccgagttccaggagaaagtgggctacttgatggcacgggtcagacacctggctgcggatgaggggtttacagtgaacgagaaaaagtcccgggtgatgaggagaagtattgcgcagtccgtcacgggagtagtcgtgaatgacaagcccagcatctgcagggacgaactgaggcgcctgagggctgtgttgcatcgcgccaaagctgagggcctagacgctcagaatcgggatggccgggagaatttccgggcttggctcgagggcatgattgcgtacgttagcatggttagacccgacgtcggagccaaattaaaggccgagttcgatcgcctgatcggggcatccaagacatga

SEQ ID NO: 13724 - RNA, 1473 nt, synthetic construct
  source 1..1473: mol_type = other RNA
atgcagcccttgccccctgccgatccatatgcagccccagattttctgcccatcgctagaggggaaattgtgtccgccgccgcaggtaaaaacctcatggccaatgcctggcaaaccggccgcacttccataatcccccccgcagatgaccctcgaacacgtttgatcgacagggcattggtgacccacgggctgctcactccggaggatcttgctgaaattcacagggtgggcgccgagtacgcacggctaaaaccttcactggagaatgtcgccctgcaagccggtttcgccggagaagcggccgtacaagcctatagagaggccaaggaacggctgaagcagcttaagcgggaggaggcagcccgacgcaagaatgaaagggctgaggccgtgcagaggaggcgcgataccgacgtcatatttttgggacgcggcgtctctgggcggctacacttacggctgagcgaccctgacagactcgccgagtatgggctgcccgtcttgcatgccccagctgaggtggctgcagcgttgggactgtctattaagcagctcaggtggcttgcttttcatacggaagcagccaccagaacccattacgtaaaattccaggtgcctaagcgtagtgggggtgtacgaacgctggccgcacctcacgccacactcaaaagagttcagcactggatcctggaacatgtggtgtcgaaattcccagtcacagagcctgcccacggatttgttccaggccgaggcatcttaagcaatgcgacaccccacgtgggaaaagctgttgttgtgaatctcgacctgagcgacttttttccaagcgtgacctttcccagagtgagagcagtattcgagaggcatggctatagtggtagtgttgctaccgtattcgctctgctctgcactgaatgtccaaggacttcagctacttacgctgggactccgtacgaggtggctattggcccacgaggactgccacagggagcacctacaagcccgggcctgtctaaccaggttgctcggagactcgacaagcggctgactggccttgcggcgaagttaggcttcgccttcacaaggtacgctgacgatttaaccttctccggagatcccgaacaggccgagaaagtcggttatctgctgtccagagtgcggcatctcgccgcagaagaagggttcaccgtgaacgagaagaagacccgcgtcatgaggcggaacgcagcccagacggtgacagggatcgtggtcaacgacaaaccttctgtgtcccgcgagctactccgtcagcttcgcgctattcttcaccgagcaagagctgaaggcctggatgcacaaaatcgcgcgggaagggaaaacttccgcgcctggctggacgggacaatctcatttgtcgctatggttcggcccgatgtcggcgcgaagcttcgtgctgagtacaacgctctgagtgagagaagctcatga

SEQ ID NO: 13725 - RNA, 1602 nt, synthetic construct
  source 1..1602: mol_type = other RNA
atggggctcttcgactggctcttcgggaggcccggtgctaaacaaccacctgctcccgctccagcccctcaagcagcagcttccgcagcagcccctggagcagctaaacctcaaaccaccgaaacaaagggtccgaagccccagccagctaaggcaccaaacctgtctgcctcggattttctgcctatcactaggattgacctgaaggagagcgcggagcagattgagagatggggaccctggttcggacggcgagatctgataccccccgccgataaccccaggacgaaactgattgatcgtggcctggtcacacagggactgatgacacctgaacagcttgtagaaatccacgaagttggagccgcaatggacagagtgcggcccatacagttccagatccaggctcagatagcgcaatcaggccaggccgcaatcgaagccaatcggcaaagaaaagccgagattaaggcccagaagaaagcggcaagtgccgaacggaagaaaaaacggtctgaggccattgcgcagcgtcgtgccaccgatatcttttttcttggcaggggcgtcagcggtagactgggtgagcgcaccagcgacgaaacgaagttgacccaattgggtctaccggtactggcaactccagccgatctcgcgcaggcccttggcttacctatccccaaactgcgctggctagcctttcacactgaagtcgccagcagggtccattacgtttgtttcactgtccccaagaaatctggagggacccgactgctgagcgcacctcacaggacactggccgctgctcagcagtggatcttcgctaatatcgtggggaaactgccggtggagccacctgcccatgggtttactccaggaaggtcaattctgacaaatgcacagccccacgtcgggaagaatgtggttgtcaatctcgacctcgagggcttcttcccgtccatcacttttccacgaattaggtccgtgtttttccggctcgggtatagtcctgcggttgctaccattctcgccttactttgcacggagtgcccgcgcaaacaagtaacatataacggcaagatctaccatgtagcgttaggtcccaggggacttccacagggcgcttgtacatcaccaggcttatctaaccaggctaccagaagactggacaagagattggcagggctcgccaagaagctgggcctgacatacaccagatatgccgacgacatcacctttagtggcaacgaggaactcaaagacaaggtggggtacttgatggcccgcatcagacacatagctgaggctgaagggttcgctattaatgaaaacaaatcacgcgtgctgcgtcgaaacgcagcccagactgtgaccggcatagtggttaatgatcgacctggagtgtcccggaaggatctccggcgcttgagggccattctacaccgcgctcgccatgagggtttggaggcccagaaccgcgccaagcggccaaattttcgagcctggcttgagggcatgatcgcttatgtgtccatggtgaggcccgaggtgggcaagagattgcgggaccagcttgctgccctggcacctaaaggagcatga

SEQ ID NO: 13726 - RNA, 1599 nt, synthetic construct
  source 1..1599: mol_type = other RNA
atgaatcccttagagcgtctgttggagtttctgggctttacaaagactgaggccgacacatccaagcctgctaaggggaaacccgcacctgctgatgccaaatctgccgcaggaggcagcgatgcttcgggtgctaaaaaaccgagcggacccgccgttgccaaaaccttcaatcttgatgcaagtgatctgctgccgataacctctgaagagctgaagtccggtttacgcaagttactgagatctggtggattcaggttcgtgggtcgtggcatgattccccacggagacgagcgaacccggctgatcaatagagcactcctctcagaggggttcctaaccgcagaacagcttgaggcaatcacccaggtggcggtggaatttgaagagttgcagaaggccttggcgagaatcgagggccaggtgaacaagtccgccaagaaagccgttgaggctgacaaggaggagaaggcccgaatcaaggcacaaaaaaaggctgaggctctggccaaaaagcaaaaacacgctgccgacgtcgcccaccggagagaaacggacataatatttctcggcagaaaagtcagtgccaagctgaacgaccggaagggcaacgcggaactacttgctgggtatggactgccagctatcagtactcctgccgaattagcagccgctttagggctctctgtggccaagctgcgctggctggccttccatacggaagtcgccacaagaatgcactacgtgcagtttcaaattccaaagaaatcaggcggtacacggctcctaagcgcacctcatcagtcccttgccgctgcccaagagtggatctatcgagagattattcagaagattccagtggagactcctgcacatgggttcgttaccggaaggtctatcgtgactaatgcccaaccccacgtgggtaatcctgtgctcatcaacatggatctggaggcatttttccccacaattacgtggcagagggtccggagtgtcttccaccgagctggctactccccatcagtcgcaacaattctggctctgatctgtacagagtgcccccgcgataccgtagagtacgcgggaaaaacttactacgttgctaccggaccaagaggactgccgcagggcgcttgtacttcacctggcctgagcaatctggtggcccgtcggctcgacaaaagactaggcggcttgtgcgggaaactgggactcacatataccaggtatgctgacgatctctccgtaagcgggcccgccgaaatcaacgaaaaggttgggtacttgatggcccgcattcgccacatcgcggaagcagagggtttccaagtaaatccaaagaaaacccgagttttgaggcccaacaccgcgcagcttgtgactggcatagtagtcaacgcaaaacctagcctgccaaaaaaagaactgaggcgcctgagggccattttgcatcaggctcagaagaatgggctggacgcgcagaaccgggaacagatcccacattttcgcgcatggctcgccgggaagataagcttcgtgcggatggtgaggcctgaacttggcgctaagctccaggcccagtttgatgcactttga

SEQ ID NO: 13727 - RNA, 1611 nt, synthetic construct
  source 1..1611: mol_type = other RNA
atggggttctgggacttcctgcccaagttgtttaagccagtgccctcggaaagtccaccgccgtccccttccccaatccctgctgagcccgtggcagaaacatttgtgcctgtgcctccaatgcctgtggctgaacctccagctgcaccccctccaggtcccatagcagtcgcaccaccaccagccgccccttctttccttccgatcacccgcgatgatctcctgaaacaaggtgaggaggtcaggagaacaactggatggatgttctttggccggcgcgacttgattccccctacttcagatcctcgcaccttgctgatcgatcgcgggatggtcactcagggactgctgacacccgatgagctcgcagagatgcaccgggtaggagacgaacatgctaagcacgccgataggtttaggcagatcactatcaaagctgggcagacggctgaccaagccgtagaggcagacagagccgctcgagttgccattaaagcccagaagaaggcagccgccgcagcgttcaaacagacccgcgctgatgcagtcgctgtcaggagggccaccgacattatctttgtgggccgcgacgtgtctgcgatgatgaacgatcgctccagcgatgccgagcgcctgaaagcagccggactacccgtcctgcatacgccaagtgatctcgccgccgccttggggttagcgattccacagcttcgatggttatgtttccacaccgaggttgccaccagacctcattatgtgcaatttgaagtgcccaaaaaggcaggaggcacacggacattggctgcaccacacgccaagcttgctgccgcgcaggagtgggtgcttgccaacgtattagctaaactccccactgaggaaccagcacatggcttcgtcccgggccgctctacagtcacgaatgccctcccccacgccggaagagacgtggttgtaaatgtggaccttgaaggctttttccccgcggtgcggtttccgagggtaaggcacctgttcagaaggctcgggtatagcggtgctgttgccacactgctcgctctgctgggcactgagtgcagccgaaaacgggttgtgtacgacaagcagacctatttcgtagccatcgggccacgttcattgccccagggggcttgcacctcacctgcagtgtccaaccagatagcacggaggctcgacagacgtcttgccggtttagctaagaaactggactgggcatacacccggtacgctgacgatctgacatttagcgcacctcctggccatcgagaacaggtgggctacctactagctcgggtgcgtcacatggccgccgctgaaggatttgctctgaacgcgaaaaagactagggtgcagcggcccgaaagtaggcaagccgtgaccggcctggtggttaatgccgctcctgcggttccgcgtgacgtggttagacgggtcagagccattctgcaccgagcaaagcacgagggtctggatgcgcagaacagaacaggacatcccaatttccgaggctgggtcgaggggatgatagcctacgttgctatggtcaagcccacccagggtgaggccctgagaaagcaatatactgctctctga

SEQ ID NO: 13728 - RNA, 1062 nt, synthetic construct
  source 1..1062: mol_type = other RNA
aaggcgacagatatcatgttcgctgggaagggcgtgtcagccttgctcggcgatagagcctctgacgccgacaaactcgctgccgcaggattgccggtcctgcatacaccttcggaccttgccgcagtgctcggcctgactatcccaatgctccgctggctgtgcttccataccgaagccgccacgaggatccactacatacaatttgaggtcccaaagaaaagtggggggaccaggaccttatcagccccccaccgtactcttgcagcagcacaggagtgggtcctaactaacatactgagcaaactgcctgcagaggaaccagcccatgggttcgtacccggaaggagcaccttgactaatgctgccccccacgctgttcgggacgttgtggtcaatttggacctggaagggttctttccgagcattggctttgcaagaatcaggcacgtgtttaggcgagtaggctattccggtgctgttgccacactgctggcactgctctgtactgagtgcccccgcaagcgggtagtttacgcaggaacgccctacttcgtggctaccggacctaggggcttaccacagggcgcgtgtaccagtccagccctatctaatcaggtggctagaaaactagaccggcgactcgccgggttagctcggaaactgggcctgacctatacgagatacgcggatgaccttaccctgtcctcaggccccgggtttcgcgatcgtgtcgcctatcttattgcccgcgtccgacacattgctgctgatgagggatttgtagtgaacgctaagaagactagagtcctgcggcccgagtctagacagctggtgacaggactggtggtgaacgccgctcctgcggtgcctagacatgtggttcggcgtctgagagcgatcttgcatagggctcgcacagaaggcctggccgcccaaaacagggatggacaccctaatttccgcggttgggtggagggtatgattgcatatattgccatggcacggccagacacaggtcgcatccttcgggccgctctcgaggaactccctcgatcctga

SEQ ID NO: 13729 - RNA, 1632 nt, synthetic construct
  source 1..1632: mol_type = other RNA
atgaatattttgagaaggctactggggtggattctgggacatacaattccacctgcgccaccatggccaaaggtgccagctccacctccgcctccatcaccagcatcgcctgaacggccttcagggccagagcctgagatgttaggggccgctggtccagccaaaccagtggagaaaaaggatcggccctatgggtctatccccgaggactaccgtccgatcagcagggaggaaatcctggaagcagccgcaggaagaagtctgttctccaacgtctggtttggccgcagagacagaatacctcccgctgacgatccgcgaacagcattgatcgatagagccatggctacccagggattcttgtcccccgaacagttggtggagattcacactgtcggtcacgagatggagagatttcggcccaccgtcgaggggatttcccaccaggctggattggctggagcagccgcagtggaagctgaccgagcagagagagctcgaataaaagctaggaaaaaagccgaagcggaggaaaggaaacgcctgagggccgaagggatcgcccttagaaagcgtgaggacatcacatttctcgggagacgggtgagtggtcggttaggtgagcggacctctcgcgtagaagatctcgaacgctcaggcctgcctatcctcgccactcctgcggaagtagcccgtgccatgggcctgagtgtgtctcgtcttagatggctcgccttccatgccgaggtggcttcacgcgtgcattatgtccagttcagagttccaaaaaaaagcgggggcgagaggatcttgagtgctccccataggagcctacgccttgcacaggaatggatccagctggaaatcctccgcaaactgcctgttggtcccgaggcccacggcttcgttccaggacgtagcatcctgaccaatgccacacctcacgccggaaaggcgctagtcgtcaacctagacctggaggggttttttccctccattggcttccccagggttcgcaaggtgttcgagcatctggggtattccggctccgtcgctaccattctggcacttctgtgcacggagtgccccaggaaggccgtgactctggatggagaaatgcttcacgttgccaccggccccaggggattacctcaaggtgcctgtacttctccagcgctgagcaaccaagtggctatacggctcgatcgccggcttgcaggaataagcgcaaagctgggatttacctttacgcggtacgccgacgacctcacattctctggcgatgcagaggtggaagcgaaggtgggctaccttcttgcccgagctaggcacattgccgagggcgaggggttcgcagtaaacgaaaagaagactcggatactcaggagaaacaatcgacaggaggtcacaggcctggtggtcaatgaacggccgggcgtgcccagagacgaagtacgtcgcctcagggcaatcctccaccatgctcgggccgaaggcctggatgcccaaaatcgggagaaccgacccgacttcagggcttggctgctcggcaagattgcctttgtgcgcatggtgcgacccgaggttggtgatcgcctgttggcggagctgagacagttagacgctagctga

SEQ ID NO: 13730 - RNA, 1611 nt, synthetic construct
  source 1..1611: mol_type = other RNA
atgaatgtttttaggcggctgttcggctggttgctcggcagacggttaaaacccgcccccagtcttcccgcaagtaggccagctgcacctggctccccacagtcacctatgaccgtggcacctacccccgctgaagtggtggcgaaaaaaggacgctcgtacgggctcgatgccggggattacctgccaatctctcgggaggagataaaggaagccgcccgaggacgctctctgttcgcaaacgcctggttcggcagacgggaccggattccccctgcagacgaccctcgtaccgctacgatcgatcgcgctatggctacacagggattcttgagcccggaagagctggctgagatccacgccgtgggcgaggaaatggaaagactaagaccaacagcagagcacgtcggtcaccaggcagcattggccggagttgctgccgtcgaggctgatagggctgagagagctcgaatcaaagctcagaggaaggcagaggccgccgaaaggaaaagactgcgggccgaagccattgccttacggagacgcgaagacatcgtattcctggggcgcaaagtgagcgctaggctgggtgagcgtgcttctcgtgtggacgatttacagcgggcaggcctgccagttctttctacgcctgccgagctggcgttggccatgagagtctcaatacctagacttcggtggctagcgtttcacgcagaggtggccactcgggtgcattatgtgcaatttagagtccctaagaagagcggaggcgagcgagtattgtccgctccgcgatcatccctgagacgtgtgcagcgctggattctggatcaggttctaaaaaacattccagccgggccccacgctcatgggtttgtagcggggcgcagcattctcacaaatgccactccccatgcggggaaagccgtggtggtcaatctggatctcgaagacttcttcccatctatcggctttccacgggttaggaaggtctttgagcaggccggatattcaggcgcggtcagtactatcctcgcgctcttatgcaccgaatgcccccgtaagaccgtgacatatcaaggagaaaccctccacgtagcaactggtccccgaggtctgccacaaggcgcctgtacctccccggtgctgagcaaccatgtcgccataaggctggacagaaggcttgctggggtggccacgaagctgggattcgcatacacccgatatgccgacgatcttacattctccggccctagcgaggtggatgctaaagtgggctacttgctcgccaaggttcgccacatcgcacaggaagaggggtttgctatcaacgccaagaagactagggtcttgcggaggaatgcacggcaggaggtgacaggcctcgttgtcaatgacagacccggagtgcggagagacgaaattcgcaggctccgagctattctgcaccgcgcacgcactgaaggcctggcttcccaaaaccgagaaggaaggccggactttagagcctggctgctgggtaagatagccttcgtaaggatggcgcgccctgaggttggtgagcgtcttcttgccgagtttcatgagatcgatagggggcgcagtgcatga

SEQ ID NO: 13731 - RNA, 1671 nt, synthetic construct
  source 1..1671: mol_type = other RNA
atgtccatttggcaacgcttcctgcagtttatctttggtgagagatccttcaggcccgccgagcctccacccactttttcccccgccgttcctccctcactggctgaacgtcccactacagccgaagctccgcggctcaccatccctgaagcttctgccgacccggatttcgcagcggatgctggaacccataaagatgggcaaccaaagctcgcaggaaaagccgttgatccactggatgcaggagcttatcttcctatttctagagaggagatcaaaagggaagcaaaggggaagaatttgtttaacaactttgccttcggcaataggagcataattcctcccgccgacgacctgagaactaaactgatcgaccgagcgatggtgacacatgggcttctgagcccggagcagctacacgaaattcacgcagtgggggcccgcatggatgagttgaggccaacgatggcagctgtggagcacaaagcagccaaggcaggagaagccgccgttgaggccgacagagaggcaagggcccgcttaaaggcacagaagaaggcggaggctatcgagcgaaaacggctcagagcagagggcatcgcataccgcagggctactgacattgtgttcctcggaaggggcgtgagcggccgtttaggtgaccggacctgcgacgcaagtaaactggaggctgccgacctccctgtgatcgcgacaccaaccgaactcgccgctgctctgggggtaagtgtcccacgcctgcgttggctggcctttcataacgaggccgcaactcgggttcattacgtccagttcacagtgccaaagaaatctggcggaacacggactctgtcagcccctcatcggagtttggcagaggctcaggactggatttttcgagaaatactggctagactgcccgtggaaccaccggctcacggatttgtgacagggaggtcgatcttgaccaacgcgtcaccccactgtggcaagagaatagtggtcaatatggatctggagggctttttcccttccattggcttcgcccgggtccgaagcgtgttccaaaggttggggtactctcctgccgccgccaccatcctgggacttctttgcaccgagagccctcggagatccgtagtgtatgacggggtggcataccacgtcgcaactggccccagaggcttaccccagggtgcctctacctcccccgctttgagcaatcaggttgctcgacgccttgatcggaggctgagcggcttatcgacccgtcttggactggcttatacgagatacgctgatgatctgacattcagtggtgatgaagcctttgaagggcgcgtcggctatctgatggccagggtacgccacttcgccgctgaggaggggttcgctgtcaacgaggccaagtcacggattctgcgccagggtactgcccaaaccgtcacgggacttgtggtgaatgacagaccaggcgttcgacgagaggaagtacggagactcagggctatattgcacagagcccgtaccgaagggctcgaagcccagaaccgcgaaggtcgccccgactttcttgcatggctcaggggcaaaatcgcgttcgtggccatggctcggccagagacaggtgcgctactcaaggcggaactcgaggcgctactggccggatga

SEQ ID NO: 13732 - RNA, 1536 nt, synthetic construct
  source 1..1536: mol_type = other RNA
atggcagccccacctcccacgcctgaagcatcgacagatccgtatttctccgcccgaaccgatcctacgaaggaagcgagccctaagaaagttgatcccctggacgccggggactatctgccaataactagggaggagattaaggaggaagccaaagggaagaatctgtttaatagcttcgctttcggccttagatcagtgattccacctgccgatgatctgcggaccaagctgatcgatcgtgccctagtcacccacggcctgctgtcacctgagcagcttcgggagatccacgacgttggggcccggatggaggctatgaagccaacaatggcggcagtggaacacagggctgctagggctggtgaggcagctgtcgctgcagatcgtgaggctcgagcgcggttaaaagcccagatgaaggccgaaagcgcagagcgcaaacgcattagggatgaggccatctctcagagaaaagctaccgacatcctttttttggggagaggcgtttcgtccagattgggagatcggactggtgacgcgtcaaagctggctgaggccgggttaccggtggtatctactcccgcagagctcgctgcagccttggggataagcgtgcccaagctcaggtggctcgccttccacaacgaggccgctacccgtgttcattacgttcagttcactgttccaaaaaagagcggtggcacaagaaccctttctgccccccatcgctctcttgccgaagcccagggctggatactccgggaagttctcgctaaactcccagtggaacccacagcccatggctttgtcacgggccgttctattctgaccaacgcctctccccactgccggaaacggttagtggtgaatatggacctcgagggatttttccctagcatcgggtttaggcgggtgcgcagtgtgttcggacgattgggctattcacctgccgtcgccactatcctagctctgctctgcaccgagtgtcctagaaggtccgtcgtctacgcgggcgaaacctatcacgtggctactggtccccgtggactgccccaaggagcatgtacatccccggcactctccaaccaagtaacccgcagactggatcgccgactgggcggtttggccagtaggctaggccttacatacagtcggtacgccgacgatctgacctttagcggagacgaggtgctcgaaggacgcgtcggctacttgatggcacgcgtgcggcatttggcaggtgacgagggcttcgccgtgaacgaggcaaaatccagggtcctgaggagggggactgcccagactgtgacagggctggtggtaaatgaccgcccaggagtccgcagaacagaggtgcgacgccttagagcgattctgcacagagcaagaagtgaaggactggcggcacagaacagagaaggccatcccgactttctggcttggctccgaggaaagatcgccttcgtagccatggcacgaccagacgtaggggctgctttaagggctgaactagaatccctgctggtgcggtga

SEQ ID NO: 13733 - RNA, 1938 nt, synthetic construct
  source 1..1938: mol_type = other RNA
atgctacgcagaagcgctgtggtggattctgctcctgagactgctagccccagagtgctgttcttttggcctggagcagtagccgttcgccgagctgagtccacagtggtgccaggagtgaggttacagccccgcgccagcgtcaatacgttgggacggcgctttgaggttggtcagcgccctgtccccgttctgccaacccctaaccctagcgcaggcgatatgaatctgtttcaccgactgcttcggttcctctttggatatgaaccccccgccagaagcgcttcccagcctagacctacaccagccccagcacctgcacccgaaccaccaacaacaccagacgccattgcagcgactctgactgaggccttcgggaaaactgctgaaaccacggcgcctgcattgcttcctgacgccacggccgatccatacttcgcagtgacagccgatgtgcagagtaccgcaactaaccagggtaagggcaatgggaagtcttctcttggcctagaagctaacgcatacctgcccatctccagggaggaaattaagaaaacggcgaagggtattgatcgttttgggaacccatggttcggaagacgtgacctgatccccccgaccgacgatccgaggacaaatctgatcgacagagcaatggttacacagggcctgctttccccgacccagttgcatgagatccacgacgtcggcgcaaggatggatcaaatacgtccctccttggcggcgatagaaagcagggccgctgtagatggagcagctgccgtagctgccgacagagaggccagggtgctgctcaaggccagaaaaaaagccgaagcagcccagcgaaagcaggagcgcattgaccaagtggctcaccgcaaggctaccgatattgtgttcttaggccggggggtcagtgccggcctgaatgatcgacaatcagatctcgatgcactgaccggagctggcctgcctttgttgtctaccccagcagatctggccgctgccctctctctctcaatctccaaactgaggtggctggcttttcacactgaggccgccaccagaacacattatgtgcagtttactgtcccgaagaaaagtggtggcctgcgaactctcagtgctccccacaggaccctagccgaagcccagcgatggatcttccaggagatcgtcgcaaaactgccagtggagtccgctgcccatggctttgtagccggccgtagcatcgtctcaaatgcggaggctcactgtcggagggcagttgttgtgaatatggacctcgaagcctttttcccgtcgataggatttcccagagtccggcgggtattccggaaattagggtacagccccgccgttgccacaatccttgcgctgctgacaaccgagtgcccccgcagaacagtggtgtacggtgggactacataccatgtggcgaccgggcctagaggactcccacaaggagcgtgcacctcaccagggctctctaatcaggtcgccatcaggctagacaggaggctcagcgggttggcccgcaagttcgacctctcatacactcgctatgcggacgatctgactctgtctggcgacgctaccttggaggccaaagtcggttatctgatggcacggcttaggcatattgccggcgaggagggcttcgctgtgaacgaagccaagagtcgcgtgcttcgacaagcaaccgcccagaccgtgacgggcctggttgtgaacgacagacccggtgtaagacgggcagaagtccggcggttacgcgccatattgcaccgtgccaagtcggaagggctcgcatcccagaaccgggacggacaccctaactttctggcttggcttcatgggaagattgctttcgtggctatggccaggcccgaattaggcgctgcactccgggctgagctggactcacttctgtga

SEQ ID NO: 13734 - RNA, 1575 nt, synthetic construct
  source 1..1575: mol_type = other RNA
atgggatttttctcacggctcatcgagcgcttgttcggcaagacagataccggagttattgtgcccaagcaggcagccccaggtgcaactgctggtgcagcacctcaagctgcgcctcctctggctaggcccctgaatctctctgcggataatttcctccccattgctcgggacgaactgaaggaagccgccaaggacgttaccagatgggggccctggttcggtagacgggacgtgataccacctgccgatgacccccggactaggctgatagatcggggtatggtggctaatggactcttgacccaggagcagctcgtcgaaatccaccaagtgggagcagagatggagaggctcagaccattacagtttggggtgtctaatctggctgctcaggccggagagtccgccgtacaagctgaacgcgctcgtcgcacggaaataaaaaaacagaagaaagccgaagccgcggacagaaagaagcgcagggccgaggcaatcgtacagcgccacgccaccgatattgtgttcttgggacggggcgtttctgctcggctgggagaacgcactagtgacggcgagaagctgaaaagcctggaccttccgatgcttcagacccccgctgaactggcgtccgccttagggattggcgtaccaagactgcgatggctggccttccatgcagaggtggccaggcgcgtgcactacgttggatttaccgtcccaaaaaagtcaggcggcacacggacactttctgccccgcacagaagcttagccgcagcgcaggagtggatccttcgaaatatcctggatagattgccagtagaggccagtgcgcatggttttgtgatcgggcgaggaaccttaacaaacgcaaacctccatgtgggccgagctattcttgtcaacatggacttgcaggacttctttcccagcatcggctttccacgagtccgtagcgtcttccagcgcctagggtactcccctgctgtggccaccgtactcgctctgctctgcactgagtgcccccgaagacctgtggagtacgatggccagtcgtatcatgttgctattgggcctagggggcttcctcagggtgcctgtacatccccagccttgtcaaaccaagtggcacgacgcctggatcgtaggctccatgggcttgctctgactctaggggtcacatatactagatatgcagatgacctgacgttttccggagctgcggaatttaatgcacgggtgggctatctgatggccagaatacggcacatcgcagaagacgagtgtttcgccgttaatgccaggaagagccgcgtcctgcggaggaacaccgcacagagggtcacgggtctggtggtgaacgacaaaccgggaatcggccggcaagaggtgaggagattgcgcgccatcctgcaccgtgccgctaaagaggggctcgaacagcagaacagagagggccgtcccaacttcacagcctggctgcacggcaagattgcatacgttagtatggtcaggcctgatctaggggcaaggtttcaagcccagcttcacgccattctgcagggcaaatga

SEQ ID NO: 13735 - RNA, 1938 nt, synthetic construct
  source 1..1938: mol_type = other RNA
atggctgataaggccacaactgagaagttcgagctgtacgtggtggaccttgttaagtcagggcaaacatttactgcatcagatgtggtcatcggagcccgagcccggggaattgacgttaggcacaacgagagcagagacattattcacgatttgcatcgaagaggggttcttggtcccgcttacagccgtaccaccgtgccccttactgactcaacccgtcccttcgtgtaccacccaacaaacatcaacccgagcgagtaccgaagcagcttcactgacgtctctagctccctgagatccgggcataggtcccagcctaagagaggcttcttagggcggctgatccagtccctgtttggcggaggcgatgatgagtccaagagtggtcgaaaacagcgctctggtgatcagcctgcaccagcggacctgtcatcaaacccgtccgtgccacctaagagcagtcgtaggatgccacagcggcgcaagaatgtaacccttgaccttgatgccaagagctttcttcccatagatagagatgaactgctgtcttctgctaagaaggtcaacctgtgggcttccccatggtttggcagacgggacctcattcctcctctggatgatccccgcacaaatctcattgatcgggggatggtcgcagaaggactcttaacctcagacgagttgagacgcattcacgaagtgggcgcggagatggacttctatcgccccgatgatctcctgctgaggcatcaagcccaacgcagcgccagtggagccatagaggctcagagacaggccagtgcagaacgaaaggccctgaaaaaggcggaagcagccgaacgtcggcaacagagagagaaggagattcagtatagacgggcaaatcagatcgattatctaggcaggcgggtcagtactcagctgcacctgtgccaatctgatgccgacaaactccaagctgtgaatctgccagtcttacatacgaccaaagacctcgcagacgccatgggcatcgaaattagtaggctcaggtggctggcctttcacgaagatgtagcaagccgcatacactacgtgtccttctctatacctaaacggtcggggggcaccaggacattatctgcccccttgcctagactcgcagccgcacagaggtggatttacgcgcagatcctacgagacttgccggtaggcgattgtgtccatggctttgttccagggaggggtatcgtctcaggtgcccagccgcatatcggtcaagaggttttgctcaacatggacttggaggacttctttcccactatcggcttcgctagagttcggcatgcttttcactggttggggtattcgcccgctgtgtccactgtgctcgctctactttgcacagaagcaccacgcagggaagtgtcctaccagggtacagcgtaccaggtagccacggggcctagggttcttccacagggcgcctgtacctctcctgccatttctaatctcgtgaccgagcgcttagaccgccgcgtgattgggtttgcgaataagttcggactgacctacacaaggtatgctgacgatatgacgctgagcggcggaactgacttcgccggacagatcggatatgccatcgctaaaatccggcacatagctgaagaggagggcttccgggtcaaaacatccaagacgcgggtactgaggcgaaatgccgcccagcgagtgactagtctggtcgtgaatgacaaagcaggagtggggaggagaaaactaagacaggtgcgtgcaatcctgcacaacgcttcgaaaaccggactgcaggctcagaaccgcgacaaccatcccaactaccgggcgagcctcgagggcatgattgcttatatcgctatgaccagacctgaccaagccgcaacaatgcgcgccaaactggacgccatcgcagattga

SEQ ID NO: 13736 - RNA, 1644 nt, synthetic construct
  source 1..1644: mol_type = other RNA
atgtcaatggctgataaggccacaaccgaggccgttgaaagattcgtgatcgaactggtgaactgcgatgaggcctttaccgcagccgacgtgacattaggggctcgggccgcaggaatacaggtccactattctgatagcagaaatatcttgcacgacctgcaccgacggggtatccttggaaccagctaccagagatcctccgtgcaactgactgacggcacgaagcccttcgtgtatcacccggtaggtttcacagctaatcattataggagcaaccagtcttcgctgatggcttccgatcacccagatcaggtaagccaacccaagcccgggctactggccaggttaaaacagttcttgttgggcaggggagactctgatcggagcgactccagcaaggatgctaggagtctggccaaccaggctcctgcaactcaggcaaccagagccgcacagagaaagaacgtcactctgaatctaaatgcaccatctctgctccctatctcccgcaaagagcttcttgcgggcgcaaaatccattaatctctggtcatcaccctggtttggacgccgggacgtgatacctcccatcgacgaccccaggacactcctcatcgaccgcgctatgatcaccgccgggctcataactccagaagagctggcacgcattcatgaggtcggcgctcagatggacaggtacagacccgacgagctgctgatgagacatcaggccaatcgagccggccgtgatgccgttgcagaggatagacgcgctaaggccgaacgaaaagccgctaagaaagccgagagcgaagccaagcggcaacggcgacgcgaagaaattgagatcagaagggccactcggatcgatttcttggggcggcgcgtgtccacgaaactccatctgtgcgagagtgatgaagaacgccttaatgcagccggacttcctattctccataccaccacagagctcgcggatgcgatggggattcagctcagccaactgaggtggctggccttccacgacgacgtcgcttcgtcaacgcactacgttgagtttgacatccctaagagagcgggcggcgtgagacgtctatctgccccattacctcgtctggccgaggcgcagcgatggatttactctcaaatcctgcggggaatgccagtggacgattgtgtgcacgggtttgtgccgggtcgtggtacagcaactggagccgctccacatgtggggcaggacgttatcttgaacatggaccttgaagacttctttccttctatcggattcgcacgtattaggcacacgtttgaaaggctgggctactccccagctgtgtcaacagtacttggtctgatttgcaccgaggcacctcgccggaaagtcagttttcagggcgccacctattatgtcgcaaccggtcagcgggtcttgccccaaggagcttgtacaagtccggcactctctaacctagttgcgggcaagctggaccggcgcatcttaggcttcgctaaatgtataggggccacttatacaaggtacgccgatgatctgactctgagtgggggtcaggatttggccaaccgaattggctacaccatagctaggtttgtaattagcgcgagaaccaaggctagtggctga

SEQ ID NO: 13737 - RNA, 1635 nt, synthetic construct
  source 1..1635: mol_type = other RNA
atggccgaccagtcccccaatcaagcttccaaccaacagcccgccagcccaaatcctaagctgggatggctgggtcggattttccggtccctattcggaggcccaaccagacgccccgacagaagctctgacagtttcgccgccatggcccaacagccaagaccccttcctcccaggcgtagggagaaggttacgctggacctggatgccaaagcattcttacccattgatcgcgacgaactgcttagcgatgcgaagcagataaatttgtgggcgtcaccctggtttggccggagggatctgatacccccagccgacgatccgcgaacctcgttgatcgatcgcggcatggtgacagaaggcctgttgacacctgacgagctgacacgcatccacgaagtaggggcggagatggactattataggccagccgaactgttcctcaggcatcaggctaggcaggcgggtcgtgatgctgtcgagctggatcgccaaacgagggccgagcggaaagcaaggaagcaggccgaggccgaagctaagagaatccggcggagagaacgagttgaaagacgctttgcaactcagatcgactttctcggacgcggcgtgagcacccagttacacttgtgcgagtcagatgtggatcgtctcaaggaggcaggcctccctgtgatccagaccactactgagttagcagacgcaatgggaattgaaattccacggcttagatggctcgcttttcactctcacgtcgccgaacgaagtcactacatatcattccgtattccaaagaaatcaggcggtacaaggactctgtccgcaccgcttcctcgccttgctgctgcacagcggtggatttactctcagatcctccgagagaggcctcatccagagtgtgtgagcgggtttgttccgggccgaagtatcttgaccggagcagcccctcacgtcggatctcagaccgtactgaatctcgatctggaggacttctttccgtcaatcggattcgcccgcatcagacacgccttccagtttatcggttattctccagcggtcgctactgtcctggctctcctgtgcagcgaagctccccgacgtaaagtacggttcaacggtggggagtactacgtggctactggccctagggtgctaccccagggcgcatgtacgtccccagccttatccaacctgattgccgcaaaactcgacagaagaattagcgggctcgcttctaagctgggagccacctatacccggtacgcggacgacctgacccttagtggcgacagagattttgatgataaagcagcattcgctatggcgtgcgtgcgccatattgccgaggatgaagggtttcgcgtcaaactgtccaaaacaagggtgctgagacaaaacgcagctcaacgggtgactgggcttgtggtcaatgacaaggccggagttgggaggaagaagctgcggttgataagagccatcctacacaatgctgagaaaacaggcctaaacgctcagaatcgagatcatcatcccaacttcagagccagcctggaagggacaatcgcctttgtggctatgagtaaccctgagcgcgcagccaagttgaggcggcagctcgacgccgttcctgactga

SEQ ID NO: 13738 - RNA, 1962 nt, synthetic construct
  source 1..1962: mol_type = other RNA
atggctgattcaaacgcgcagaagattgtcacggacattactcgcaggagagctgccgcgggtgagagcttttcagcttttgacatcaccacggaagctcgcagccagggagcctttattcggcacggagaggcccgcgaccttgtgcaagctctcttccagaacggatctatgggggccgattatcggagaactgtgctcgacctaggcggcggtgctagacccttcgtgtaccataggtttgacgctgatttgacaacatatcgatcgaccgcatctggagcagcacccgtatctcctccagcgaatcgaccaggacaggctacacctccggcggttggtcaggggagcacaagtgggagaagcggcggcctgattcgtagggtttggaacttcctgggcgggggcaccacatctgatgctggtaaccccactacggacgatgccacacactctggttctaagacccccagccctgccaatcctgacaatccaaagaccacggggactatccgcaaagtgcttaacttgacagcatccgcattcctgcctatccagcgcgatgacttaatacgccaggcaagtggactgagcctgtggagtaatatctggttcggtcggagagatatgataccgccagtcaacgaccctcggaccctgctgatagaccggggtatgctgtcagccggcatgctgtctgcagaggagctcgccgagatgcaccgtatcggagatttgtatgcaaagcattccggcgaggtaacaaggattaggtccgaaggggcactagcagggcaagccgctgtcgacgcagacagacaggccagagctgaagccaaagccaagaaaaaagccgaggccgctgagagaaaggctaagaggagggctgaaatcgagcatagacgtgcgaatgacattctcttcttggggaggggcgtatcccaaggccttgccgatcgaacaagtgatttggccaaattagagaagctggagctacccctggcatccaccccagccgaactggctgccgttatgggaactactgtttccaacctcaggtggctagcctttcatgccgatgtggcaactcgcacccattacgtgtcatttgagatcgccaaacgatccggcggagtgcggaaactcagtgctcctcacgtgagactggcagcagcccagcgctggatttacagtagcattctgaggggcgtgaaggtacatgatgccgcccatgggtttgtcccagagagaagcatagtgacctcggcaaagttacacgttggacaggccgtcctcatcaatgcagatctggaaaacttcttcccaagtatccactggacccggattcggaaagtcttccgttgcctcggatactcacccgctgtggccactatcctggctctcatctgcactgaatgtcctcgacgggaagtcgtgtacgacggtcagacctattacgtagcgacaggcccaagaggattgccgcaaggcgcttgtacttcccccgcgctgagcaatctggtggcaatgaggttagataggcgcctgtccggcctggccacaaaatttgacatcaggtacacccgctatgctgacgacattaccctttcaggaggcgacgagcttggccggcgattagggtacgtgatggctcgtttgcgccacattacggccgatgaggggttcgcgatcaacgaaaagaagacccgcgtgcaacgaaggcaccaagcccaggtggttaccgggctgatagtcaatgatcgggtgagcgtcacacggaaagagctgcggagacttcgttctatcctgcaccacgccgctaccgaaggcctcgactctcagaacaaacaccatcaccccaattttagggcgtatatgtccgggatgatcgcctatgttgctgcaactagacccgccctcgcccgagaaatgaagaagcagcttagccaggtgcggtcatga

SEQ ID NO: 13739 - RNA, 1932 nt, synthetic construct
  source 1..1932: mol_type = other RNA
atggacaacaacgcccggcagatagtaacgactatcactcgccgaagagcggccgctggggaatctttcaccgcctttgatattacaactgaggccaggggccaaggcgccttcgttccacatggggaagcacgggaccttgtccaagcactttttcagggaggcgaaatgggggctgcctaccgtcgcaccgttatcgacttgggtggcggcgctaggcctttcgtttaccaccgctttgacgtggacgcgaggacctatcagacgccttccggatcaagacctatcgtgccaactcccacacctgctgccccggttccaaatgctcctacagccgatacaagttcatctagcccccccacgaatcagggcggactgatccggcgtgtgatgaattttctcggtggatctgctcgaagcgatgttgccgccaacaaccccagtgcatccacatttggcggggctgcagccccaccaagtagaaggaagactctgaatctggatgcatcagctttcctgccgatcaccagggacgaaatgatgagagagtcccggacaagcctgttctggagcggggcttggtttggtcgtcttgatctgatccctccaaccacagaccgacgtactctgctcatcgaccgcgggatgatgtcggcgggcttactgtccgcggaacagctggccgagattcacaggataggggaactgtattccaaatatgcgaaggatctgcaggtgatccaacatgcagggcaggtggctggtcaagccgcggtagacgccgacagaaaggcccgagcggaagcacgccaaaagaaaaaagccgaggcccaggaaaagcgcgagaagcgacgagcggaaatagagcaccgcaaacgtaatgatatcgtctttctaggcagaagagtgtcaggcgggctcgccgacagagagtctgacgtgggtaagctccggagcctcgagcttccggtactctccacgcccgccgagttagcagccgctatggatctcgctattagtgacctgaggtggctggcatatcacgctgatgttgctacacggagtcactatgtatccttcgatatccagaaaaagagtggaggccttaggcggttgtccgcaccccataaacggttgaaagcagcccagtcttggattctcgagaatgtgctgggttctgctgttgtgcatgatgccgcacatgggtttgtgcccggaagatctaccataactggcgccaaggagcacattggacaagccattgtgttgaacgctgacttagagaattttttccccagcatccactggaccagagtgagaaaagtgttccagaccctgggatattcacccgctgtggcaacaattctggcactcgtctgcaccgagtgccctcggagagaggtgcagttcaacggtcaggctatgtacgtggcaacaggacccaggggattgccacaaggcgcttgtaccagtccaatgctcagcaacatggtcgccctgcgtttggatcgccggttagccgggctggcaaacaagttcgaaatgaagtacaccagatacgccgatgacctcacacttagcggcggcgatgaacttggacggcggctaggatacgtgatggctaggctgaggcacattgccgtcgatgaaggtttcgcaatcaatgagtcaaagacccgcgtccagcggagacaccaggcacagagcgtgaccggcctgattgtcaatgaccgagtaagcgtctctcgctccgagctaaggaggttgcgggccatcctgcattcagctaagtcgcagggactggaatcccagaacagggacgatcatcctgactaccgcgggtacctgactggcctactcgcctatgtcgcagccactcgccctgctttagccgcggagatgaaacgagagcttgacagcattaggaactga

SEQ ID NO: 13740 - RNA, 1935 nt, synthetic construct
  source 1..1935: mol_type = other RNA
atggccgacgcccagacaaacaatgcagtgcagcaggctgtcctggattttgtgcgctctatgactatgtttaccgcctacgacgttaccctggccgttcggaaccagggagttgtggcccggcacggtgaagtgcgagacgtcgtgcattccatgtttcaggacggcatactcggggcagcatggcaacggaccgctgtggatataggcacagatactcgccccctggtctatcaccacttcaatcaggaccctcgcacgtataaaagccctagcacagggtcagccgcaaaacccgcaactaactcgggccagtcaggttccccctctccaggctctgctgccagtggcagtgggaaggggtttttccagcgaattgtcggcgcattcttcggccaaggtagtagccctgtgactccgtctaatcatcccgcgagcggaggtgcgcaagtaccatcccaaccgctgagaaccccaaagcaaaggccccccattaccattgacctggacgcatcagcctatctccccattagccgaagtgatctactctccgaggcaaagaaaacgaacctgtggggatctccatggttcggaaggcgggatctcattcctcccgttgaagacgataggacaaaattgatcgacagggccatgctgacccaaggcttactgacgccggagcagctaacagaaatccaccgggtcggagcggagatggacaagtacagacccgatcagctactcatcaaccaaaaatcccaaaaggctgggcaggctgctgtggatgaggaacgtcagtcaaaggctgctctgaagaagcaaaagaaggaagaggctgccttacgtaagcagttgcatcggcaggctgtagcggacagaaaagccaatgacatcgtttttcttggtaggggcgtgagctccaggctgggagacaggacaagcgatgacaccaaactgcaggccgcagggttgccagtcatgagcacaccatctgatttggccaatgcattgagcatcactgtgccccagcttagatggctggccttccactccgatgtggcgtcacgcacgcactacgtgaacttcaccatccccagaaagtccgggggagtccgcattctctctgccccacatcagaggattgccgccgtgcaacagtggatacttgctgaggttgttagtcggttgcctgtggagggctgcgcccatggattcgttccaaatcgtagtatcctgactaacgctcgacctcacgtaggccagcaggtcgttctgaatatggatcttgagaacttcttccccggaattacctatccacgggtaaggaagatgttccagactatcggttattctggctccgtcgccacaatcctcgcactgctgtgtaccgaatgtccaaggagaactgtaacctggtcaggtgaggtgtttcacgtggcgtgtgggccgagaggactccctcaaggagcttgcacctcacctgcaatatctaatcaggtggtgaagcgccttgatcgccggcttcagggcctagcgcgcaaacacaacctggtgtttacacggtacgccgacgatttaacattttccggggggagtgactttgacactaatgtggcctgggtgatggcatgcgtgagacatatcgccgaagatgagggcttagtggtcaatgaaaaaaagaaccgcgtgctgagacgaaataccgcacagattgtcacagggttggtagtcaacgataaaccttcggtcagcaggaaaaagctgcggcagatacgcgccatcctccatcgagcccagcaggaaggccttgagtcccagaaccgtgacggccaccctaatttcagagcttacctcgacggatacattagctttatcagcatgaccagacctgagatcgccgctaggctgaaagagcagctggctaacgtttcgtga

SEQ ID NO: 13741 - RNA, 1941 nt, synthetic construct
  source 1..1941: mol_type = other RNA
atgaccgacagtactacccggcaggtagtgtctcagttagtgctcaatcaggtggccgccggggccatgttcactgcttatgacattaccctccaggctagaggccggggaatgcaactgaggcacggtgaaggccgcgacttagtccatgaactgttcaacaccgggagaatgggcacggactacacccgcacagtggtggatcttgggacggatgcaaatcccatggtatatcacaggcgaggggactctccccgtacataccaaagcggatctacaggagcaactgcggccagtgcaccaccaggtgccttacccacacagccttttccaccagccgctgcaccacctgccaacactccgggtctaattggacggctggtgaagggactgtttggaggagggaaagaccagcctatcgtcggcagagttgtcggagacgggggtaacgcggcctcaggtgatgatgtcggcgcattagcattgcggcccccagcgagcctggatcttgatgcctccgactttcttcctatctccagagatgacctaatgtccgctgctaaaaccaccactctctggggcaatccatggtttggtagacgtgacatcatccctcccatcggcgatcctagaactaaactcatagatagggccatggtggctcgaggaatcttgacacccgatcagctggctgagatacataggattggggctgacatggaccattacaggcccacccagattttgattgagagccaagctcattctgcaggcaggtccgcaatcgaggtggatgataagcgtaaggcggaagaaaaggcgaagaagaaggccgaagcgaaagagcggaaggagaaacgacaaagcgacatagctgaacggaaggccaccgacatcgtcttcctgggacggggcgtttcggggcagcttcacctgagagattcggatgcagagaaactggcagcagcagacctcccaattttgtctacaccagccgagctcgcctcagccttgggattaactatatccaagttgcggtggctcgccttccataacgatgtagccacaagaacccactatgtcaggttcgagatcccgaaacgcagtgggggcactcggcagctttcatctccacacaagctgctggctgagaagcagcggtggattctgaaagagatcctgaataaactgcccgtggaagattccgctcacggcttcgtcagggatcgggatattctaacaaatgccatacctcatgtgggcaaggacgtggttctgaatatggacttggagaacttcttccccagcatcgggtttccccgcgttaggcaggtttttaaaggactgggctactcaccggcggtggcaaccattctcgccctcctctgcactgaatctccccgtagagcggtgacgtatgccggccagccttacctggtggccagtggacctcgcggtctacctcagggggcctgtacaagccctgccatttccaatcaggtcgccaaacgacttgaccgcagggtgcaaggcctggccaccaagttcggcgtggcctttacgcgctacgctgacgacatgacagtgagtggcggagcagaaatgactaccaggataggctatatgatggctaagctccgccatatcgctgaggacgaggggtttgtcatcaacaggagcaagacaagagtactccggagaaacactgcacaaatcgtcacgggtcttgtagtgaatgacaagccgacagtgagccgcacccagctgcgaagaattcgagccatcctgcatcacgctcaccacgatgggctgtccgctcagaaccgtgaacagcacgctaactttcgagcctggatgcagggtatgattgccttcgttgctatgacccgccccgagctggcaaaagatttcctggcacagcttcaatcagttcgcgactga

SEQ ID NO: 13742 - RNA, 1569 nt, synthetic construct
  source 1..1569: mol_type = other RNA
atggccaacgggatgttgcagcaattgatagcacggatgggaagaatcttcggcagcattttttgctcatacaagaggagtccaggcactcagtcgagggccacgactgcacctgcacaagggcaggcggttaggcctgcgtcaaggccagaggctccacctttacctcccagggccaataagaccctcgatctcgcagctagccaatttctcccgataagccggagcgagttgctcgtggccgctaaaggtactcgactgtggggtaatgtgtggttcggaaggcgcgacttaatccccccagctgatgatgccaggacactgttggttgatagaggcatggtgaccgaggggctgattacccctgaagaactggccgagattcacagggttggcgccgagatggatctacatcggcctgcgcaggctgccatacagcatcagactcagaaggccggccaggctgccatcgacgaattgcgagctgaaaaggcccgcatcaaagctgaaaagaaggtcgaatctgcggcaaggaaagcagcacgccagagtgccattgatcagcgcagagctaacgacattgtgttcctcggcagaagagtttctggtaaactgggccaccgggaatccgaccctcaacgtctgcaacagcttaatctccccgtgcttcagacaccagcagacgtggccgtcgctctgcagatctccatcagccagctacggtggctggcctttcacgccgaagtggccgagagaactcattacgtctacttcgatgtcccgaagaaaacaggggggtttcgccggctttcctcaccgcacgccaagctcgccgctgtacaaagatggatcttagagcaagtccttaataaactgcctacacagccagcagcccacggattcatagcgggccggaacattttgtccaacgcaatgccccacgtgaaccagagcgtcctgatcaacatggatctcgagaatttttttcccaatatcacattcccccgtgtacgtgagatgttcgccagacttggctactccggggcagtgtctacagtgctggccctgctgtgtaccgaatgcccacggagagctgtgatctttcatggtgctacgtaccaggttgctaccggaccaaggggactgccccagggagcatgtactagtcctgctatctcaaaccaagtggctgtgaaactggacagacgactacagggactcgccagtaagatggagctgaattatacgcgatatgccgacgacctgaccctctctggaggggacgccttacgcgagagagtgggctatgtaatggctcgagtccgccactttgcggaggaagagggtttcagggtaaacaaccagaaatctcgcgtccagaggcggaattccgcacagattgtgaccggcctggtggtcaacgaacgtcccaccgttagccgagagaagattcgccgcattcgggcaatccttcaccgtgcccaaacagagggtctggaggcacagaatcggcagaaccatccctatttcagagcgtggctggaagggtacattgccttcatcgcttga

SEQ ID NO: 13743 - RNA, 1545 nt, synthetic construct
  source 1..1545: mol_type = other RNA
atggatgtggtgagtctccccgaccatcgcccagggagatcaccggtgagttcagtcgacaccagtaaaagccgtcgcagtgctccccctgccccattcagcttccttcccaagattaagagcgagcggaattttcttgacctgcgcggggccgccgatctttgggatagaggatgtgtcgttgggttctggggtcgattactgcggctgatattgggtcagaatgcagggagcggcttgaccgagcagctccaggcatcaggcactgctaagtcccggaacagatctagcgttttctttcccgcccaatccctgcaggctcctcagctgctcccaccagcttctgtcgccgagacagttgtaggtcccgttggcgcagaagggtcgcgcattaggagcaccctttccgtcgtggctcgcagggaggcacagcaacgtgccagagacaacgaacgacgtcgattacgtgaaattcgacggaccgatcggctgagtcgggacatcacatacctggggcgcggagtctccggatggctgaatgaacggattagcgatgtggcgcgcctccaatctgcgggtttgcctgtgctctccggacctgcggatgtggccaaagcactggggatatcgctgcagagcctgcgtggtctggcctttcacgccgaagtgacaagactgacgaactatctccgatttactgtgcccaaacggtccgggggccagagagagctgtctgtccctcataggcgactcgccgctgcccaacgatggattttgaggactatcctggaccgactcatcgtctctgagcaggcccacggcttcgtgtccggaagaggagtgctgacaaatgcccaacagcattgcggccaggcggtgctactgaacctggacgtgcagaacttcttcccatctatcagtttcgcaagggtgcggagggtttttatggctgctggatactcaaagtgcgtggccactatcttggctctcgtgtgcacggaatgtccccgcagggaggtggtatttgagggtagaagactctgggttgccacaggcatcaggggcctaccacagggtgcctgtacttcccccgccctgagcaatctcgtgtgtttaaggcttgatcggaggctacagggattggctatgaagttgggccttgtatactcccggtatgcagatgacttaaccttttctgggggcgcagatcttagacagagagcaggcgccgtgctgaagtcagtaggcgcgatccttggaagcgagggcctgcaggtacacccgtggaaaacacgcgtccagcctcgctctaccgcacaagtcgtaaccggactggttgtcaacgaccgtcctggcgtgtgcagaagagaggtgaggagggttagagcaatactgcacagggccgctaccgagggactagagcgccaaaatcgggacggccacccaaatttcgtcgcttggttgaacgggaggattgggtggatcggacagtcacgccctgaattaggccggaaactgatggaagaactgagggggctccggtga

SEQ ID NO: 13744 - RNA, 1407 nt, synthetic construct
  source 1..1407: mol_type = other RNA
atggccaccggattttgggggaggatcctgcgcgcgctgttaaaaagcgatgattctgaccagagtgcctctgcagccagcccaaacgtgacagccgccgactcagtggtaggtgaatccaccgttgcggctgccgcgggtttaaccaggcgagcattcgaagccccccacctgctccctgtcggcaagcaaagcgagtccgcagggagtggccgccaaacacagagcgacgatgcaagtggcagcagttcaggccgtacctccctggcagttgccgccagacgtgaagctaggcggagggctcgcgaaaacgaaaggttgcggcttcaagccattcgccggaccgaccgactgaaccgcgatataacctatctcggacagggggtgagcgggtggctaaatgagcgggtcagcgatgaagagaggctgcgacagtctggcctaccagtgctggccacaccggcagacgtagccagagctcttggaatttccttgcgctccttgcggggccttgcttttcatgctgaggtgactaggctgaataattacgtgcgcttcactatccccaagcgctctggcggcgttagagttctgcaggcaccacagcgacggctcgctgcagtacagcagtggatcctgagggaaatactggaccgtctgcccgtgtctgctcaggcacagggcttcgtacggggcagatcagtggtgacgaatgctgctctgcattgcggacaggccgtggtccttaacttagatgtgcaggagttctttccatccatccctttcgcgcgggtccgaagagtgttcatctcggctggctatagcaagtgcgtcgctacaatactggccctcgtctgcacagagtgtccccggcaagaacttacgtttgagggaagaagactctgggtggctagcggaccgaggggtcttcctcagggtgcctgtacctcaccagccctctccaatctcgtgtgcctgaggttagaccgtagactccaggggctctctgcaaggctggggctggtctactcccggtacgcagacgacctgacttttagtggaccagccgagctaagacagcgggtgggtgccgtgcttaaatcagtaacagggatcttgcaggcggagggcctgcaagttcaccctgggaaaacccgagtgcagcctcggtctactgcccaactggttactggcctagtcgtgaacgatagacccggagtcagacgcgatgaggttcggagaattagagctattttgcatagggccgcgagggagggtttgcaagcccagaaccgcgagggacaccccaacttccgcgcatggctctgtgggcgtattggctggatcggacagtcgcgacctgaactggggcagcagtttttgcagcaactgaatgccctccagtga

SEQ ID NO: 13745 - RNA, 1620 nt, synthetic construct
  source 1..1620: mol_type = other RNA
atgagtactcaggattccagggggttctttggctggctgcgccgtcttttatttggggacccgattcccgcccccaaacaggctgctgcctctgctgctacatctacacacgggacagccaagccggtgacaacggcccagaacccagcgcaacagcagaacgcaccttctctcaaggctggactggatgcgagttcttttttgccaattacgagagatgagatcatttcctccacccgtaccagatggctatggtccggggcattctggggcaggagggacttgatacctccagtttcagacactagaaccaagctgatagatcgcggcatgctgactcagggcatgctaaccgccgaacagctggctgaaatccatcgtgtaggcctggaaatggatgccgtgcgaccaagcatgaccctcatccggtcagaagcagaaaaagccggagccgaagcagtggttgcctctcgcgaggaacgcaagaagataaaagctcaaaaaaaggaggaggctgccagaagaaaagagcagcgtgcaagggatattgcggctcgattcgccactgacattacctacctcggacgaagagtctccggccggctcaatgaccggacatcagatgtggccaagcttgaggccgccgctctacccgtcctccaaacaccagctgatgtcgctggggcgttaggcctgacaatcccccagttgcgtgggctggcatttcacagcgaagtaactagcagatcgcactatatccagtttagtatccctaaaaagagtggcggtgtcaggttgctgtccgcccctcacagaaggctggccaactgccagagatggatccatacccagatcctttcaaagctggaggttgctgcacaagctcatggattcgtagtggcccggtcaaccgtaactaatgccactcctcattgtgggaaggcagtggtcttcaatacagatctggaaggcttctttccttccatcacgttcccccgagtgaggaaggtgttccaaaggctcgggtatagccccgcggtggcaaccattcttgctctcctgtgcacagaatgtccacggcggaccgtggaatttggtggccagacactgtttgtggcaactggtccccgagcattaccgcagggtgcatgcaccagccccgccttatcgaatcaggccgcgctccgcctggacagaaggtttcaaggactcgctacaaggatggggttgacgtacactcgctacgccgacgacattaccttctctggaaatgaggagctgaagagccggaccggctatctgatggcgcggatccggcatgtggtccaggacgagggattcagggtcaacgaggccaaaaccagagttcagcggcagagcacagcccagagtgtgaccggtctgatcgttaacgagaggcctggcgtgttgagaagcaaagtgcgacgccttcgcgcaattcttcaccaagccaaatcttccggactggaggctcagaaccgcgacaagcaccctaatttccgggcttgggtcgagggaatgattgcctatatagcaatgagcaggccagacactgcagaggttcttcgccagcagtacgcccaaatcagagagacgtga

SEQ ID NO: 13746 - RNA, 1614 nt, synthetic construct
  source 1..1614: mol_type = other RNA
atgctttttggaggttcaccccgaccgaggcctgctgcaaggactccagccagacctgcccctggaagggcagcatctcccggtggtagtcaaccgacagtgcagcccacagtgagtagcgcctccccacctaggcctagcggtcttggcaagcgactgcaagctcctgacttaaccccgctcgccgggtccgagttaaagcggtccctcagacagagaggtcagtcatcgtggtccatatttggaggggcctcctggtggggaaggagggatctggtgccacctagcactgatgaacgcaccaacctgatcgaccgagggatgatcggtcggggactcacctctgccgacgaggtagccgaactgcacagggtgggcgacgagatgctgcagagggaccccagaagagatggaggtgctgccgccggcgaaatagctgtgcaaaaagaccgggccgagagagcgcagcagaaacagcagaagagagaagctgctgcacagcggcgtgccgaacgagcagctgcagtagccgcgcgtagagctaatgatatcatttttttaggacgcggggtgtccaaagggcttgcggacaggacaggcgacgcgactagactcgtgggagcaggcctcccagttctggctactcccgcagatgttgccaccgctctggagctgcctattccaagactgcggtggctggcattccacgccgatgctaccgctcagccccattacgttcgcttctctgttcctaagcgctcaggcgggacacgcgacttagcagcgcctatgccccggctcaaggctacccaggactggatccttgctaacctactggccaaagtgcctacccacgccgcggctcatggatttgtcccaggccggtccacagtcagtaacgccgtgccccacctgcaagcactggcagtcattaattgcgacttgaaagatttcttccccaccatccatgtgcatagggtccgcgggtgctttgaggagttggggtatagcccggctgccgccactatccttgcactgctctgcactgaagccccacgacgcctggtggagtacgcaggaagacccttgcacgtcgccacaggcttgcgctgtcttcctcaaggggctccaacgtctcccgcgttgagcaacctaattgcccggaggctggatgcacgttgtctcggcatcgcccgtaagttggggttcacgtatagccggtacgccgacgatctcagcttttctacccatgaaccggcggccctcgctcgaatcggctatctacttgctcggattcgccacatagccagagatgaaggcttcgccgtgaatgagaaaaagacgagggtgttgcgaccctcaagttctcagagagtcaccgggatcgtggttaatggagccgagccccggattccacgcgctactgtaagacggctgcgcgcgattctgcaccaagccgaaaagacaggcctggaggctcagaaccgtgatggccacccagacttcgccaattacctcgcaggcatgctggcttgggtaaggatggtcagtccacagcaggctgagccactgctagccgcttggcgtcgcgttaggcggtcagcagcagattga

SEQ ID NO: 13747 - RNA, 1611 nt, synthetic construct
  source 1..1611: mol_type = other RNA
atgcaactcctctttggagctcccccacgacctaggccagctgcaagacctccagcacgaccagcccctgctgctcctaacgctgccgctcctacttcagcaagaccagaaccccgacctgctccgcccagacctgctgatgtgggccacaggctggaggcacccaacctcacacctctggccgcctccgagctgaaaaggtccctgcggcagcggggacagagttcttgggccatcttcggcggggcatcttggtggggacgtagggatctggttccgccatctacagacgagagaaccaacctgattgatcggggaatggtcgggcgggggttgactactgtcgacgagctggccgccatgcaccgtgtaggcgatgaaatgctgcggttggaccccagacgagatggaggtgccgcagcaggggaagcagccgtacaggctgacagagccgaacgcgcccgtgtcaaacagcagaagaaggaagaggctgcccgaaggagagcagaacgtgcagcagctgtagctgcccggagagcgaatgacatcgggtttctcggccggggagtgtccaagggtcttgccgacagaagcgctgatgccgctaggcttggcggagctggcctacctgtattggctaccccggctgacgtcgcagccgctttgcaactgccaatccctcagctgcgctggttagcattccacgcagaggccaccgagcggccacattatgtgcgctttaccgtgcccaagagatcaggtgggacacgggaccttgccgctccgatgcctagactacgcgcgacccaagactggattcttgccaatgttcttgccaaagtgcccacccatgccgcggcccatggctttgttcccggaaggagcactgtgtctaatgccgcaccccacttgaggccactagcggtggtgaactgtgaccttcaggacttcttcccgactatacacgttcaccgcgtgcgcgggtgtctggaagagctaggctactcatccgcggcggcaacgatcctggctctcctgtgtaccgaagctccccgccgcctcgtcgagtatgcaggacgacccttacacgttgccaccggcccacgttgcttaccacaaggcgctcctacgagccccgccttgagcaatctcatcgctcgaaggcttgacgccaggtgcctgggcattgcccgtaagctgggcttcacgtacacacggtacgccgacgatctgacttttagtaccacagatcctgaggccctggccaggattgggtatctgctggcgagaataaggcatatcgcccaggatgaagggtttgctctcaacgagaaaaaaacacgcgtgttacggcccagttgcagccagcgggttaccggtattgtcgtgaatggcgaccagcctcgcatacccagggcaacagtccgcagactgcgcgcaatcttgcatcaggcggagaagactgggctcgaggcccagaaccgggatggtcacccagatttcgcaaaccatgtggcgggtatgctcgcctgggtgagaatggtgtcgccccaacaggccgaaccattagtggcagcgtggcggagggcccgaaggaatgatgccggatga

SEQ ID NO: 13748 - RNA, 1731 nt, synthetic construct
  source 1..1731: mol_type = other RNA
atgcctttggcagtgggtggagtcggaatggggtggtttgattggctgaagccacggaaaacgcctgacgagggtcctccagctcctagccctggcctgacgcatggcgacctgtctgggctggtcgcacaacctggacctccgaccccaggaactgtccccacggatccacgggtggtgactacccgcgtcccaaccacacaggagccagcgacacctaccgtagcctccgctggaacacccgcatctgcatcacgggccgctaggcgaagtccctcatctcctccaccagagtcgctggactacgacctggggccatttgctccgatttcacagtccgacctgagagcccaggccggcaaactcactaatgcttggcgcaccctgtatctgttcggacgaacatcgcgaattccgcccgcaaatgatcccaggaccaacttaatcgacagggccatggtgagcggtggcctcctgacacctgaggaactggcagagattcacgccgtgggcgaagcctatgatcgcgcaagacccgatttacaggtggagctcgccaaggctgaactctccgccgtactacccgaacaggagagagccgaacggaaagcccgcaaaagggcggaagcagcagaaaggaaaagactgcgcgcagaagctgttgccgagagaagggcaaccgacgtggtgtttctgggtcggggcgttagcacccaactccacgaccgcacttcagatgccgaggccttggcgaagctaggactccccgtcctctcaacccccgcagatgtagctgctgccctgtccgttacaataccccagttacgatggctcgccttccacagcgaggcttccactgtgtctcactacgtgagatttgaagtccccaagaggagcggagggactcgccagcttgctgcaccacaaccgcacctggctgctgcccaagcctgggttttggctaatgtactgtcccgggtgccaccccatgatgccgcacatggattcgtgcctgggcgaagtactgtcactaacgccgcccctcatgttggcagggcagtggtggtcggcgctgatctgaccgatttctttcccacagtcacttttgcccgcgttaggggcgtgttccgccagttgggttacagtcccgccgtggcgacagtgcttgcgttgctatgtactgagagtcctcgacgcaccgtgacctatgctaacagaccatttcacgtggcgacaggtcctagggctttaccacaaggggcgtgcacgagtcccgccctttctaacctagccgcgcggagactggacagccgtctttccggtatcgggaggaagcttggcttcgcttacacaaggtacgcagatgacctgaccttcagcggcggggccgaacaactggctaaggtgggatatctccttgcccggttgcggcacatcgcccaagacgaggggttcgcggtcaatgagaaaaagacaagagtgctgcgtcagagcgcatctcagcaggttaccggggtggtcgttaatcagcggccaggcgttcctcgcgatgtagtgcgtagactccgggctatcctccatagagcacagttcgaggggcttcccgcccagaatcgtgaaaaccatccccactttgaggcctgggtacgtggcatggtcgcttacgtccagatggtgaacccagaccaggccagacctttgcgggaggccttagacgctctgccgggctaa

SEQ ID NO: 13749 - RNA, 1797 nt, synthetic construct
  source 1..1797: mol_type = other RNA
atgggcctgctgaattggattaagaagctagtgtctggaaagtcaccaggaaggccttccgggggccagagtgcaagcgacttagccagagaattcggacagaccattgaccctggtcttctggccggtcaggggtcacaaccccccgttaatcaaccacctaccgtgccccctcaacgccccactgtggtgaaagtgccggcaaactggatcagcacaggacaggctccttcctccgccactaacacacctaatagtgccgccgcctccaccatcccatacgcttcactggccttgagggctgctgttccacctgctcctgcaaatagactatcgccaagccccgctgagagtttcgattatgatctcgggccttttgcccccatctccgctgatgatctgcgcaccggagcagacagactgaaaaacaattggaacaatctgtggttgttcggccggtcaaaccggataccccctgctgatgacccccgtaccaaactcatagacagagccatgattaccgaggggcttctgacgcctcaggagctcgcagaaatccacgctgtgggccaggcatatgacgcagcccgcccagatctgcaggttgagctcgccaaggcgcaggtcgcagttactctcccagagcaggagagggccgaacgaaaagctagaaaacaagccgaagccgccgaaaggaagcgcaagcacgcagaggcggttgccctacgcaaacaggcggacatcatttttttgggccggggtgtgtccaatcagcttcacgatcgggtcagtgatgtggccaagctgaccgccattggacttccggccctgtctacccctgccgacgttgcagccgctatggacctcccagtctcgaggctgaggtggctggcgtatcacagcgatgcagccaccgtgtctcattatgtaaggtttactgtgccaaagcgctctggcggcacccgacaattagctgcgccgcacgattctctggcggaaacccagcagtggatcctggctaacgtcttatccagggtgccaacacacgacgcggcccatggtttcgtccctggaaggagcactgtaacgaacgccatgcctcatgtggggaaacccctcgtcatcaactgtgacctgagagactttttccccactatctccttcggacgggttcggggcatttttaagcagctcgggtacagcccagccgtagcaacgattttcgctctgctttgcactgaaagcccccgccaggaagtggtgtacgctggaaagacatttcacgttgctacaggcccccgagcgttgccacaaggtgcgtgtacatctcccgctgtcagtaacttggcatcaagacgccttgacagccgattggctggaatctgccgaaaactagggtttacatacaccagatatgctgacgacctgacattctctggcgacgctgcactcaacgataaggtcggctacctgttggctcgggtgaggcacatcgcagacgatgagggctttgcagtgaacgagaagaaaactcgggtgcagaggccgcacgtagcccagaaggtcacggggattgtggtgaacgatcgggccggggtcccgagagatgtagtgcgtcgtctgcgggccatacttcataaggccggtaaagagggcctggccgcccaaaatcgcgagaatattccccatttcgaggcatggttacgtggcatgatagcctacgttcatatggtcaatcccaaacaggcaaagccactcgccgaagcaatggggagaatcgctccaacaacaacttga

SEQ ID NO: 13750 - RNA, 1557 nt, synthetic construct
  source 1..1557: mol_type = other RNA
atgggattctttgactggctgatagagctgctcgtgggtggcccctcaaccgatcgcttttcgtctccccaacctcccccaaggaggcctccaggagccagacagtctagaagactggatctcgatatcgaacagttcacccctctgtctgactcagaagtcaagaagcaagcccggactctgggtcgggcttggagcaatccctggttcggacgcagggacttgatcccaccccccgaagacccgcgtactctgctgattgatagagcgatggtggggcatggcttgctcacaccggaggagctggtccgcatccacgaaattgggctggaaatggacaaagtacgtcctgatctggccatggctaaagtggaggctcaggcagccgttgccaggaccgttgaagaacggcgcgcgcgaaagctcgctagacagcaggaatccgcgcggctcaaaaaacttggtgcagaggctgtagcccagcgccgtgctaccgacattgtctacctcggccctggagtcagtaggggtctggcagaccgaagaagtaacgtggaaaagcttgccgctgcctcacttcctgtgttagcaagccctgccgacgtagcacaagcactgggcctggcagtccccagattgaggtggctcgccttccatagcgacgctgcgagcaggctgcattatgttcgctttactgtaccgaagaagagcggagggacccgcgagttgtcctctccacaccgtgccttagctgcggcacagcgctgggtccttacttccgtgctcgacaaggtgccaactctgcctgccgcccacgggttcgttaagggacgctccacagtgacaaatgcttccgtccatgttaaccgagccgtagtagtgaacctggatctggtggattttttccccagcatcacctttccacgggtcaggggcgtcttccaaagactgggttattcccccgccgctgccacagtgcttgccttactcgcaaccgaggcccctagacgaaccgtcgcttatgccgggaaaacatttcatgtcgctacggggccacgggctcttccacaaggagcctgcacgagtcctgccttgagcaatctggtggctcggggcctagacgcaaggctctctggcattgcggctaaactggggtttgcatacactcggtacgccgatgacctcacatttagtggcccagatgaggtgcagaatctagtggggtacttgatggcccgtgtgaggcacatagccggcgatgaaggcttcgctgtgaatgaggcgaaaactagggtgcagcggagaaacaccgcccagcaggtgacagggattgtggtgaaccaaaggccgaacgtgccacgaacggaggtgagacgcctgagagcaatcttgcaccgagctgcaaccgagggactagccgctcagaatcggcagaaccacccccggttcgcagagtgggttcagggaatggttgcatatatctcaatggttaatcccgctcagggcaagcctttggcagaggcccttgcccggttagatgctaagaaaggcccctga

SEQ ID NO: 13751 - RNA, 1557 nt, synthetic construct
  source 1..1557: mol_type = other RNA
atgggctttttcgattttctcagacgcctctttggcggaggggaagctggagatccaccaccccctctggcgtttcctgcaaaggctttaccacctaaaccagccccaccactgccccccaagaaaagagccccgcctacctcctatgaggcagactttctgccgattagtgacaaggagctgcacgccaaggcagcgacagaggaagtcagaacttctccctggtggggtcggactgatactattcctccggccgacgatgcgaggactaaactcattgacagggccctggtcaccagggggtatttgacccccgagcagctggaggagatccatcaggtaggtgatcttatgctgctgaaaaaaggagacgaagctatggtccggcaggaggcaaagagagccgttgaacggcggaaggaggagcgagctgctagaaaggctgagatgaagagattagcagaggaacgacgacgcgcccatgccgctgaagtcgctagtaggagagcgacagacatcctgtttctgggacgggacgtttctggcggactggctgaccgccgctcagatgtggagaaactcagaaccgcagggttgcctatcctagcgtcacccgcagaagtggccgcagcgatgggtctgactattcctcaactccggggaatggccttccacattgatgccgccaccgtgacacactacgtgactttccgtatccctaagaagtccggcggcatgcgcgatatcagcgctcccaaacctcgactggcaaccgcacagcgatggctgctagagaacgtgctctcaaaaatcccagtcgaacccccagcacatggattcctgaccggccgctctacagttaccaacgcagcccctcatgtgagacgagccgtggtggtcaacatggacctcaaggacttcttcccatctataactttcccccgtgtgcggggcatattcgagaaaatgggttacagtccggccgcaagcaccatttttgccctccttacaacggaagcacccaggcgggtggccgaatatgagggcaagagatactatgttgccattggccccaggggtttgccacaaggggcttgcagctccccagctctttccaatttggctgccggccgtcttgacagacgcttaggcggtctggccgcgaaactcgggtggacatacacaagatacgccgatgatttaaccttctcgggagacacgataatccccaaagggacgaaagatccgaagagcgtcgcctggttgctagctaggacacggcacatcatctccgaggaaagttttgaggtgaacgaaaagaagttgcgcgtacagcggcggaataccgcccaggtggtcactggcatagtggtaaatgacaagcccgctgttcctcgtgccgaaaggaggcgactgcgcgctgctcttcacagggccaggttcgtggggcttaaggagcctgcaagggttcgcggggaggtagcttacgtgagcatggtgaatgccgaacacggagggcggcttaaggtccgtctcgacgccctgctgaaacgctga

SEQ ID NO: 13752 - RNA, 1497 nt, synthetic construct
  source 1..1497: mol_type = other RNA
atggggttctttgactggctgcgaaatctacttttcggcggcatgccgcaaaagaaggcagtgatcgtgcggccagcccagccagtattccccctcagacccgcgccagcaagactacctgccgcagcaccaaaggctccaccccctgctcctcgtccaactgccgactatgcagccgaggatttcgcacctatctcagataaggagttgcggcagaagagcaagtcgagtgaagtagccaccagcccttggtgggggaggaccgatacgattccgcccggagatgacgcgcgcactaagctcattgatcgggccctggtgacccggggatatttaacccccgagcagcttgcggaaatccaccgcgtcggagacttgatgctccttaaaaaaggcgacgaggccattctgagggttcaggctcaagccgccgtagcgcgaagtaaggaagagcgtgccgctctgaaggccgaaaagaagaggcaggcagaggagcgcaaaaaagcacatgccgaggcagtagcacgacgcaaggccgctgacataatctttctcgggagaggagtctctgggggtttggccggccggacatctgacgaggggaaactacgcaagtttggattgccaagtctggcgacccctgatcaggtagccgcagcactgtctatcccgattctgaggctccgctggctggccttccactccgaagcttcaacagtgagccactacgtgcgctttcagattcccaaaaaaagtggcggcctccgtgatatctgggctccccagccaaaactggctgccgcacaggcttggatcctcgagaatatcttatctaaagtccccgccggccctgttgctcacggttttgtgccgggaaggtcaactgtcaccaacgcggctcctcatgtgaagcgcactattgtcgtgaacgtggacctgcgggattttttccccacaataacattccccagagtcagaggtctgtttgagtccctggggtatagccctgcggtggcaacagtttttgccctcctgtgcactgaagccccccgaagggaagtggaatactccgggagaaagtacttcgtcgccacaggaccaagagcccttccccaaggtgcttgtactagccctgcactgtcaaatctggctgcctggaccttagacaggcgactcggaggcgttgctgccaaattaggctggacgtacactagatatgctgacgatctgacattcagcggagacacccttgtgccaaagggcgagaagaaccctaaatccgttgggtggctgttggcaaggacgcggcatctgtgcgaggccgaaggttttgaagtgaatgagaagaaagtgcgcgtgcaaagacggaatgccgctcagacagttaccggcatagtcgtgaacgagaaaccatccacctctagggctgagcgtaggaaattgcgggctattcttcaccatgccagattcgaaggcatcgaaaagcagaaccggtga

SEQ ID NO: 13753 - RNA, 1611 nt, synthetic construct
  source 1..1611: mol_type = other RNA
atgctgctccgcctgctgcggtttttctttggtcttgtacggcccaaatctagtgctgagaggggtacccaccctggcgctctaccctctagcctgaccggtcgggacttaacccctcctcgcacggttcaatctgccactgcatcaaatcccgaaaccgggtcaagtagcccaggcccgtctgggttgaatgggttggacacagataagttcgcccctagcactgttgaggaggcatggaccgccacaggcagagcagattggcgctcagtattcttggatagccgcggggctattccccctagtgaggtgccaagggtccagaggattgataggaccatggtcggtatggggctcatctcagagagtgagcttgctgaaattcatgacattggcgaccgaatgagccaataccaaagtgacgcagcatttgtggccagcagcggcgaaagtgctgttgcgcagtcacgggaggagagaaggcgacagcgcgaagagaaacaagctgccgccgaagcaagaagaaaacagaggcgggagcaaatcgctcagaggcgggccaatgacatcgtctttctgggtcgaggcgtgtcccgtggattagccgaccgacgctccaacattgaacagcttcaggaacagtgcctgcccgtgctgtcttctccagcggatctggcacagtccatgggcatgtctattagcctgctgcggtggcttacctttcattccgatgcaccaactagggtccactacgtgtcctttgatgttccaaaaaagtcgggaggcatgagacggctatcggcgcctcacagaaagctggccgaagctcaacactgggtgttgactaacatactgaatctcctccccgtccatgcctgtgcccatggcttcgtcgctcgtcactcagttgtcacgaatgctgaactgcatgttggcgcttctgtggtgatcaacgccgaccttagcaacttcttcccagccattacattcgctcgggtggatggaatgttccagaaactgggttatagtccggccatcgcgacaatactcgcactcctgtgcactgagtgcccccgtcagccattacagttcggcgagacaatgtattacgccgcaaccggacctaggtccttgccgcagggagcctgtacatcccccgccatttctaaccagatcgcagggaagctcgaccgcagaatgtccctgctggccgaaaagctcgggtggcgctataccagatacgccgacgatttaacttggtccgtatgtggcgaggcgatcccatcaataggatatgtcctagccaggatacgtcacatcgtggaggacgaaggctttgagctcaatcatgctaagacaagagtgcagaggcgaagccagcagcagtccgtgacaggagtcgtggtgaacgatcgcatgaacgtgcctagacccacgatcagacgcatcagggcaattctgcataacgccaagcggactggactcgatgcccagaatcgaaatagccacccccactttagagactggctgaccgggatgatcgggtgggtgcacatggtaaaccctgagcaaggacgtcggcttatgagcgctttggcggaactgtcctga

SEQ ID NO: 13754 - RNA, 1611 nt, synthetic construct
  source 1..1611: mol_type = other RNA
atgctgatcaggctgctgaggttcctctttggctggagtaagcctgccgctcccgctgaagttgcatctccacgcgagccagctccctcctccttgaccggacgtgatctgtcccaaccagcaagcgtgcagagtgcaaccgtccctaaggcagatagcagggctgccgcccctcctagatctaacctgtctggcctcgacactgacaaattcgcacccattaccgtggacgaggcactagccgcgaccgctaaggcggactggaagagcgcgtattttgatagccgcggggtgatccctcacccatcccttccccgcgtacaagtcatcgaccggacaatggttggaatgggcctaatatcagaacaggagctggccgagatccacgacattggggatcgtatgggtcagtttagatccgacgccgagttcattgccattgcgggtgaacgagccgtcgtggaatcgagagaagagagacagcggcgcaaggagttgcggaaagcggaagccgaggcacgacgcaatttaagacgggaacaggtggttcagaggcgcgccacagacatcgtcttcctgggtaggggtgtttcaaggggattagcagatcgtagatcaaacgtggaactgctgcagaataacggactgcccgtgctttcaagtccagcggagctggcccaagctatgggagtgagtatcagcttgctccggtggcttgccttccattctgacgccccaacgagggtccattatgtgtcttttgatgtgcccaaaaaatccggcgggatccgaagactttctgctcctcatcgcaagctctccgtggcccaccattggatcctcaccaacattctgaatctgttgcctgtacacacgtgtgcacacgggtttgtggcccagcactcagtgttgactaatgctgagcctcatgtcgcagctagcgtagtaatcaatgcggacctgagcaacttctttccaactataacattcagtcgggtggatgggatgtttcgcaaactgggatattcgcccgctgtggcaaccattctggccctcctgtgcaccgagtgtccccgacaggcccttaagttctccgatactatctattacgccgctacagggccacgtgctttgccccaaggcgcttgcacctctcccgccataagtaaccaaatcgcagccaagttggatagacggatgagcgccatggcatctaaactcgactggaaatacactagatacgctgatgatctcacatggtcaaccacgggggaggttacaccgagcgtcggctacgtgctagcacgcatgcggcatattgtgaatgatgaaggctttgagcttaatcacgctaagacacgggtccagaggcgaagtcagcagcagtcagtgactggtgtagttgtcaacgacagaatgagcgtccctagacagactatccgccaggtgcgggccatactgcacaacgccaaaaggaccggattagacggccagaaccgagacgctcagccgcacttcagggactggcttacaggcatgattgggtggattcaaatggttaatccggaacagggcaggaagttacggtccgagctggccgagctctcctga

SEQ ID NO: 13755 - RNA, 1608 nt, synthetic construct
  source 1..1608: mol_type = other RNA
atgctcctgagactgctgcgttttcttttcggcatctcaccaccaacggcgccgcgagacgttcgttccagccttcaggaaagagacttgtcaggcgtccccgggtccactaaaagcactagcgggagtagtgcgactagcctaactacaggtgcaggacgttccgccccagcaggtctaagtggcttggatacggaccgctttcgacctcaaccgggaaccgatctgacatcactgggccggatgactgactggcagttctccgccgctgatactcgcaatctgataccctcagaagaatccccccaggtgcgggccatagaccgagctatggtgggcatgggactgattacagaaacagaactcgtcaggattcatgatatcggacggcagatggccccactgctctctgctgcctcttttatccagagcgccggggcctctgccgtgaaagagtctagggaggagcgccagcggcgaaaggcagagaagaaggagacagccaggctcaagcagatcgctcacttagaacaagtacagcacagaaaggcaaccgatatcgtattcctcgggagaggcgtttcccgcggtctagctgatagacgcgcaaatatcgagaagctgcaggatgccgggctgcccgtaatgtccagcccatctgacgttgccaacgctatgggacttaccgtctcccggctccgatggttggcattccacagcgaggcacctactagagtacactacgtgtccttcgagattccaaagaagtccgggggcacaagacgcctttcagctccccatagacagctcgctgccgctcaacattggattctgactagggtcctgaatttggtgcctgtgcacgagaacgcacacggttttatcactcagaggagtgtcgtgaccaatgccgtgccccatgtcaacagcagtattgtgattaacgcagaccttaaagacttcttcccctctataaccctggcaagggttgacggtttgttcaggtccctgggatactcaccggcggtcgcaaccatttttgcccttttatgcacggagtgtcctagacagaccgtccaaatgcacggcaccacctactttgccgctaccggacctcgtgcgttaccccagggcgcttgcaccagtcctgccatctctaatcgcatcacacacaaactggatcggcggatgagcgccatggctgccaagcttggctatcggtacacacgatatgccgacgatatcacctggtcgaccagcgatgaatcagccgtcgcagtgggctatgtgctggccagaattaggcacatagccgaagacgagggatttgagctgaatcatgcgaaaacaagggtgcaacgcaggtcgcagcagcagagtgttactggcgtggtggtgaacgatcagctgggtgttgctagggagacagtgcggaccataagagcgatcctccacaatgcagaacggacgggcctcgcttctcagaacaggaaccaacatcctcagttcgagagctggctgacagggatgattgggtggatctctatggtgaacccagaacaagggcaaaaattgcgccagcattttgacaaagttcggggaagctga

SEQ ID NO: 13756 - RNA, 1620 nt, synthetic construct
  source 1..1620: mol_type = other RNA
atgctcattaggttgcttaggttcctgatccgcttagcccttcctaccccccaaccacccagagacaccccctcatccctcgcaggccgagatctcagtggccaaccgggttctgctagccggacagtgtcttccgtcgccaacactactgtgtctagctccggccctgctgcccctaaaggttcctcgctttctggcctctccaccgacaaattcgctccaatgtccgtagctgacgccttgtcagccacagccgcggcagattggaggagtgccaacttcgattcgaggtccgttatcccacctgctgacctgccacgcattcaggtgatcgacaggaccatggtggggatggggcttatttcagaacaggaactggcagagatccacgacatcggcagggagatgacccagttccagagcgatgccgcattcatccatcaggcgggagagagggcagtggccatttcacgcgaggaaaggcagcgcctgaaggagcagaagaaggctgaggccgaacagcgtcgtgtgcttcggcgccagcaagtagcccatcgtcgagccactgacataatgtttctagggcggggcgtaagccgaggccttgctgatcggcgaagcaacatcgagaaactccaggctgggggactgcctctgttgagcagtccggcggacctagcaaacgccatggggttgacaattagtaaactgcgatggctggccttccactcagatgcgcctaccagagtccattatgtctctttcaacatacctaagaagagcggcggtacgcgcagattgtctgccccacaccagcaattagccgccgcccaacattggatcctcacaaacatcttgaatctaattcccgttcaccagaatgcacacggctttgtggcccagcatagtgtagtcactaatgccgctccacacgtcggctctagcgtggtgataaatgctgacctgaaggatttttttccctcgattaccctggcaagagtcgatgggctgtttcgaagaattgggtactccccagccattgcaacaatcctggctctgttgtgcactgagtgcccccgcgatactgttacattttgtggaaccacctatcacgcagctataggacctcgggcattacctcagggggcatgtactagccccgcgatttctaatctggtggcacataaactcgaccggcgtatgagcgctatggctgataagctcggatggcgctattcacgctacgccgatgaccttacgtggtctattgaagcggaaccatctccctcagtggggtacgttctggctaggataaggcatatcgtggacgatgagggatttagtgttaaccacgagaagacacgggtgcagagacggtcccagcagcaatccgttacgggcgtcgtggtcaacgaccggctgagtgtgagcagagacaccataagagagattagagcgatcctccataatgccaaatccacaggcctggccgcacagaatcggaatgagcacccgcacttcgaaagctggctggccggtatgatcggatggatcgacatggtgaacccccaacagggaggtaagctcagagctgaattaatcgaactgctgaggaaatga

SEQ ID NO: 13757 - RNA, 927 nt, synthetic construct
  source 1..927: mol_type = other RNA
atgggtgtggccatccccaaactgcgctggctggcctttcacagcgaagcaccaacgaggacccattacgtgtatttcaaagtccctaagaagtctggtggcgaacggcgacttgcagccccatataaacagctcgccgctgttcagaggtggatcctggatagcattctgaatcagttgccagtgcacgacgccgctcacggctttgtccgtgaaagatccactgtaacaaatgctgatctacatgtgggtgccgatgtggtcattaacgctgacctctgtgacttcttccccacaattaccttctatagggtcgaagggttgttccggagctttggctactccccagcagtggccactatcttggccttagtgtgcacggaatgcccccgcgacgcagttaccttttccggggagacatattatcctgcgactggacatagagggctaccccagggcgcgtgtactagtccggcaatctcatcgctgatatgcagaaacctggatgtaaggtttgctggcatcgccaatcgtatgcactggcgctacacacggtacgcggatgacctgacattctcaacctctactgagcatggagacaaaattgggtacttactggctcggattcgtcacatcagcgaggacgaggggtttagaattaacgccaagaagactcgagttcaacgcaaccacacacgccagagtgtgaccggaatcgtggtcaacgacaagaggtctattgataggaacaccatacggcgccttcgagcgatcctgcacaacgcaaagagaaccggattcgccgcccagaataccgagcaacgacctcatttcgagaattggctcaggggcatgatagcatacgttgctatggtgaatcctgagcggggacacgagctcagagagcagtacgaagctcttagatga

SEQ ID NO: 13758 - RNA, 1578 nt, synthetic construct
  source 1..1578: mol_type = other RNA
atggggctatttaactggctgtccaacctgctgggtaagtcccccgctggaaacaagtctagcgtagatcgcgggagtgtagtgattccggaactcagcgagccaaggccagagtctaaaaaacggggccctattcggctgaatggcttggacgcacagcagttcgcccccctcgaggataacgaagcacgggagctcgccaagagtctcggacgctccatctggaacgacaccttcttcgggaggagggacctgatcccaccaacctccgacgctcgcacattgttagtggatcgaatgatgattgccgatggtatcactacagccgacgaactagcagagattcatgcagtgggactggagatggataggctgaggccacaactcgcccatgccgctgccagagccgatagagcagtggcttcaaaccgccaggccagagccgaaagaaaggctcggaagaagtcagaagccgcggaccggttgcgtttacgggccgaagccatcgctgagcggaaactcaattctattgactttctggggcgtggagtctctagagggttgccccacaggcagagcgatgcgcagctgttggaacagcgtagtcttcccgtgctgcatacgccggctgatctggcacaggccatgcagttaacaatcagcgagttacggtggcttgcctttcacagcgaggccaccgagaggatacattatgtgcagtttgctattaggaagaaaagcggtggagtccgtctcctcgcatctccccatctcaaattgagaacaactcaccgctggatcctcgccaacatcctgtcaaagattccgctggacaacgctgcacacgggttcgtggtaggcaggggcatagtctcgaatgctcaaccccacgtggggaaatccgtggtggtcaatgtggacctggcggacttcttcccttcaatcaccttccctagagtcgcgggcctgtttcgaggcctaggttacagcggcgcagtcgccactattctgggcttgcttgtgacggaatgccctagacagcgagtgcggtatgcaggacgcgagctgtgggttgccagtggtcctagatctctgccacaaggagcctgtacatcccccgctatttcaaacgcaatcgcatggcgactggatcacaggctggctgcaatcgcctccaagctcgactggacttacacccgctacgcggacgacctgacctttagtactagcggcgacaatgctgagaagatcggctacttacttgccaggcttcgacacatatgtgaaaacgaaggcttcaggcttaatcataataaaacacgcgttcagagaagaaacatgcaacagtccgtaaccggggttgtggtcaatgaccggtgcggcgtctcgcgcaaggttgttcgacaattgcgcgccatactccataatgctaaacagaccggtctagcggcccagaatcgggatggacaccctgatttccaaaactggctgcagggaatgatcgcttatgtgcacatggttaatccagatcaggctctgccccttaagcagaaatttgagcagatcattgggccttga

SEQ ID NO: 13759 - RNA, 1602 nt, synthetic construct
  source 1..1602: mol_type = other RNA
atgggcatgtttgactggctgtcaggcttgtttgggcgagcctccagtgggaggcctacagcacccgctgcaggtgctgcatcacccgctccaccaccagtgagaagctctgccccagagcagcaaccccgtcctagacaatctgggccgaagcggctggagggtcttgatgctagccagtttgcacctctcgaaatcgatgatgctagggggcaagctaagcgcctcagcagatctttcgggagactcgtatggggcaaccgcactgatcggattccccccgccaacgatgcccgtactttgcttattgaccggatgatggtggcggaggggctggtgaccccagaagagctggcggacattcacagggtgggagctgagatggacagactccggcctgattacgatgcagcccatcgcgcgggtgctaaagccgcagagcaagctgctgcctcatcccggcaggaaagggagcagcggaaagccgagaaaaaagccgcagccgctgagcggaagagagaacgagccgagcagatcgccgaacgccggagaagtgacatagtctttcttggcagaggcgtttcacgcgggctggccgatcgtcagagttacccggatctgctgggatctttcggcctacctgtcatggcaacccccgctgacgtagtcaaggcaatgggcttcctcgacatagccgaactcaggtggctagcctttcacacagaggcagccactagaacccactacgtgcagtttactaccaggaagaagtctggcggagttagagtcctcgcctccccccatcagaagttgcgacgagcccaaggctgggtcctggagaatatcatcgccaaaattcgggtggacgacgcggcgcatggattcgtggcaggtcggagcacagtctcgaatgccacaccgcatgtcggccagcaggtggtagtgaacgctgaccttaaagacttcttcccttctataacgttctatcgggttgaaggatttttccgcaggctgggctactccggagctgttgctactattctggctctcttaacgaccgagtgtccaaggcagcaagtgacctatgccggccagactttatgggtagctaccggtcctcgctgcttacctcagggggcatgcacatcccccggtctgtccaacgccatcgcttggaaactggacaggcgattgggcggcatggcacgaggtctgggatggacatacacacgttatgcagacgacgtgaccttcagtgcctcgggagaacccgcggcaaaggtgggatggctgttggccagacttcgtcacctggcccaggaggaggggtttgaactgaaccataagaagactcgcgtgcagcggcagaatgcccaacagagcgtcaccgggttagttgtgaatgatagggttggagtcagcaggaaaacagtgaggcgcctgcgcgctatcctgcacaatgcgaagcagacggggcttgaagcccagaatagagataatcacccaaacttcaccggctgggtgcaaggcatgatcgcatatgtggccatggcgaacgccgagcagggagctagcctacaggcagcctttgatgaactctga

SEQ ID NO: 13760 - RNA, 1626 nt, synthetic construct
  source 1..1626: mol_type = other RNA
atggggctgtttgactggatttccaaccttttcggtggctccagctctacagcaaacccaccaaaacccgaatcgagcgactcagcaggtccccaaggccctgcttcaacatcatcttcctcaagtccggcacctaccccaccgcaacctccaaggcctggtccacctgctccccctaaaagtaaaaggttagagggcctggatgcatcccagttcgcacccatcgaggaagctgccgctctgcggcaggcgaaatcaatgcgcttaagattttggacctctacctggtttggcttgcgggatagaattccacccgcctctgacgaaaggactaaattggtcgaccgattaatggtcgccgatgggctggccacccctgaagagctcgctgagattcatgaggtcggcgccgagatggataggttacggcccgccctagatgatgccgccaaacaagccgggcaggcggtttccaggaataaggaagacagagccaaactcaaggcacagaagaaggccgaagctgcggaaagaaagcgactgagagcggacgctatagccgagcgtaagaggaatgacatagtgtttctgggccgcggagttagccgaggactagccgacagagagtccaatgcggagaagctggaaggaagggggcttccggtgctgcacaccccatctgagctcgcgacagctattgatcttcccctttccactctgcggtggctggcctatcacaacgaggcagccgagcaggtgcattatgtgcaattccaggtcagaaagaaaagtggagggatccgtgtcctagcttccccgcacaagaaaatgcgccgggcccagcagtggatcctcgacaatattctgactaagatagacatacacgaagccgcccacggatttgtggctggccggtcaaccgttactaacgcagcaatgcacgtgggacagcaggtagtggtcaatgtggacctgcaagatttcttcccctctgtgacctttcccagagtggaagggttcttccgaagcctggggtactccggcgcagtagctaccatcctcgctctcctggtcacggagagccctcgccaacgtgtgcgctacgctggaaaagaattgtgggttgctacagggcctaggtcgctgcctcaaggcgcttgcacgtctccagccctgagcaacgccatcagctggacaatggacacccgcctcactgctatctccagtaagcttggctggagctacagccgatacgcagacgatctcacgtttagtaccgctggcgaggccagtcagcaggttggctatctgttggctcgaattcgccatattactcaggaggagggattcggtctgaataggaagaaaacccgggtacaaaggcggagcgcgcagcagtcagtgactgggatcgttgtgaacgatagggccggagtagcacgtaagactgtgcggcagctcagagccatcctccataacgcaaagacaacaggtttggccgcacagaatcgcgaaggtcggcccgatttcgaagcatggttgcagggcatgatcgcctatgtgcgcatggtcaacccagagcaggccgcctctctgacagatgcatacgagcagcttagatactga

SEQ ID NO: 13761 - RNA, 1623 nt, synthetic construct
  source 1..1623: mol_type = other RNA
atgaattttttccgtcgacttaaacaatggtttgcccccggacaggaaaggagtgcccagcagacaccttcccaactgcctgcgtccgtggaaaatagggattacactagcccgagtcctggaaccccccctgcttctcagcccactactcccaatcggagcacctctccacctagcagcccccagcctagaccagaaagcacactgagcggcctggatgcttcacggttccaaccactgacccaagacgaggcgatggagagcacctctcaacctggctggaggactgcctactgggaccctctgaacgtcatcccgtctgcctcactccccaggatccgcgtgattgaccaaacaatggtaggcatgggactgatagatgccgaggagttggctgagattcacgacataggggaacagatggcccaatttaggacagattatcacgtgatccagcatgctggtcaagcagcagtgcaggccgcccgtaacgctagagatgctcgcaaggccgagatgaaaaggctggccgctgagcgtaagcagcagaggcaacaggccgtcgcacagagaaaagctacagatatcgtttttctcggccgcggtgtgtctagaggcctggcagacaggcgcagcaatatcgaaagactgcaggccagtgggctgcccgtgttgagctcaccagcagagctggctgaggcaattggcatcagcgttggtaccctccgctggctctcctaccaccatcctgcatctaaaaccacccactaccactcctggaagattgcgaagcggagtgggggcgagcggacaatctctcgcccacataaaaaactagaacacgctcagaggtgggtcctagaccatttacttagcaagctgccaacacatgacgcagctcatggctttgtgccaggtcggtcaacattgtctggcgccgttccccatgtaggcgcctcagtccttgtcaacgtggacctgcaggatttctttcccactattgatttcgcgcgggtggcaggactttttcggggcttcggttattccccggcagtggcaactattctcgcactgctgacgacagaagctcctcggcgcatgatccggtcggggtctgaaacccttcacgtggcggtggggaatagatcacttccccagggggcctgtacgtccccagcaatatccaatctgatctgccagcgaatggacaagcgattaagtgggatggcggcctccattggatggtgctacacgcgatatgccgacgatttgagtttctcctccgtcgaacaggccgacaaggtggcctacctgctcgccagagttcgtcactttactgacgaggagggtttccagatcaaagcctccaagaccagagtgttacgccggagtaaccagcagtcggttaccggaattgtcgttaacgataggccgagcatcgatcgaaaaaccataaggcagttgagagccatcctccaccgcgctaagtcagaagggctcgagcgccagaacagaattggccacacgaatttcagagggtgggtagctggaatgatcgcttatgtagagatggtgaacccacagcagggacggaagctacgagaagccttcggaactatttga

SEQ ID NO: 13762 - RNA, 1518 nt, synthetic construct
  source 1..1518: mol_type = other RNA
atgtctcccccttcagaatccggacaggctagcgagttttcaccagcggcgtcacggcccactactagctccccaagcccacctccggaatccgagctttctgggttggacgcctctcggtttcagcctattagtcacgacgacgccctcgaggcgacctctgatcctagctggaaaacagcatacttcgacccactaaacgtcatcccatcagtgtctctccccaggattcgggttatcgatcaaactatggtgggcatgggattgatcacagcagaggagctggccgagatccatgacgttggggagcagatgtctcaattccgcacggactattatgcaatacaggcggctggccagcaagccgtgcagtctagccgagatgcccaggctgccaggaaggctgaactgaaacgtctcgccgagcagagaaagcaggcccatgaagaggccgtcgctaagaggaaggcaaccgatattgtctttcttggacggggggtgtcaaagggcttggcagatcgacggtcaaatatagaacgtctgcaagcctgtaggctgcctttactgtcctcgccagccgatctggccgatgctttggacgtgtccatcggcacgctgaggtggctggcatttcaccaccccgctagtcgaaccacccattatcattggtggaagattcagaagtcttccggcggtgaaagaacaatctgctgtccgcatagcaaacttgcaaatgcacagcggtggatactcaacaacattctggggaaagtgcccctccacgacgcagctcacgggttcgtaccttcccgctccacactgacgggtgcaaaaccacacataggaagtagagtcctggtcaatgttgacttgaaagattttttccctaccatagatttcgcaagggtggctgggctgtttcgagggctaggatactcccccgcggtagccactatcctggctttattgacaactgagagcccgcgcatgagactccgatcaggaaaaacaaccctctacgtagccgtgggtaaccggtctttacctcaaggcgcttgcaccagtcccgccatcagcaatctcattagcagaaggatggacaagcgtcttttcggtatcgccaactcaattggctggaggtatacacgctacgccgacgacctgagtttcagttgcagtgatagggaagataaagtggcttatttactcgctcgcgtgagacacgtcaccagcgaggagggctttcagattaaggaatctaaaaccagagttctgagaaagaatagccagcagagtgttactggaattatcgtcaacgacaaagcttccattgatcgcaagactatccgcaagctgcgctccatcctgcatcgggccaaattcgaaggcctggagaagcaaaatcggctaggacaccccaatttcagcgcctggctcgccggcatgatcgcatacgtggaaatggtgaaccccgaacaggggaacaagcttagacttgcctacgagtcgctgggttga

SEQ ID NO: 13763 - RNA, 1605 nt, synthetic construct
  source 1..1605: mol_type = other RNA
atgaacttctttcgaagactgaccaaatggattacatccgggcgcgacagctcagccgatcaaccagtgccttcacagatgccggcctcggtggagaatagggactatacagtccctaatacgcctcagaccccttccgcacccgcaagtaatccaagcccaccagaacagccacagactagcaacctcgccggtctggatgcttctcgttttcagcccctgagtcaggacgaagccttagatgcaacatcccagcctgggtggcaatccgcttactgggaccccctcaacgtaattcccagcacatcactgcctagaatccgcgtcatcgatcagactatggtgggtatggggctgatcgacgcggaggaactcgccgacattcatcatattggcgaggaaatggctaagtaccgaaccgactaccacgtcatccagcatgcgggacacgccgctgttcaggctgccagagacgctcgggctgccagaaaggccgaaatgaagcaaagggccgcacagcgaaaacaggagcgcgaggccgcaatagccgaacgtaaggcaacagacatcgtgtttctgggtcgcggagtcagtcggggactcgcagataggcgttcaaacgtcgagcggttgcaggctagctctcttcccgtgctgtccagcccggcagatctagcccaggccatggggatccccgtggcaacactgagatggctcagttaccaccatcccgcatcgaaaaccacccactatcactcatggcagatagccaagcgaagtgggggcgttcggacaatctccaggccccataagaatctggaggatgcgcagcgctggatcttggaatctatcctcgctaagttaccgacccatgacgcggctcacggctttgtccccggacgttctacactgaccggagccaccccacacgtcggagctaaggtgcttgtgaacgtggacctgcaggactttttccctacgatcgatttcgcacgggtggccggtctgtttcgcggattcgggtacagcccagcggttgctaccatcctggccctgctaactactgagagccctcggagggttataagatccggcagcgagacgctgcacgttgccgtaggaaatagaagcttgccccaaggcgcatgcaccagtcctgcgatatcaaacctgattgctaggcggctggataagaggctcgccggcatggcccgatctattgagtggcagtataccagatatgccgatgacttatctttctcatgtcgcgagagcgaagagaaggtggcttacttgatggcaagggtaaggcatctcacttctgaggagggcttccttgtgaaagaatccaaaactcgcgtgttgagacgccacgcacagcagtccgttactgggattgtagtgaatgatcggccatctatcgatagaaaaacgatccgacagcttcggtctattcttcacaaagccaagtccgaaggcctagaaaggcaaaaccggattggtcatacaaatttcagtggctgggtcactggcatgattgcctacgtggaaatggtgaacccacaacaagggcaaaaactcagggaggcttatgaggctctttga

SEQ ID NO: 13764 - RNA, 1668 nt, synthetic construct
  source 1..1668: mol_type = other RNA
atgggcctgttcgaaatccttaagcagattttcgcacctggccaaagacggccaggaccacctaggggagctcctagtgaccccagcgctattgatcctggcagcctcacacccccaaggcaagcagagccctctccagccaccagctcagctccactgtcaagtgccactcccgctacaacgcctgcgcctgctgccacaagcaaacctgccggtggactagaagggcttgatgcttccaggtttcaacccctcacaccctcagaggcactggatgccaccgcacagcccggatggcaaaccgcttactgggacccactgaacgtaatcccatctacccacttacctcggattagggttatcgaccagactatggtcggtatgggactgattgatgcagatgaacttgcggagatacacgacatcggccagcgaatgtcgaagtttcgcaccgattaccatgtcatcgccgacgcaggacagcaggccgttgatcaaagccaggctgcccgggatgcacggaaacaggagatgaagaaacgagccgccgagcgcaaacaggctcatcaacaggctgtggcacacaggaaggccacagacatcgtgtttctcgggagaggcgtgtccaaaggtcttgccgatcgccgcagcaatatcgagcgtctcgccgcgtctgacctacccctgctgtctactccggcagacctcgctaatactctggggataagcatcggcaccttgaggtggctgagtttccatcatccggcttctaagaccacccattatcaccactggaaagtccctaagcggagcggcggggagagaactatatcccgaccacagaaaaagctcgagagtgcacaacgctggatactagaatcaatcttagctaagcgacccacccacgacgccgcccatggatttgtcacgcagcgtagtaccttaactggcgccctgccccatgttggatcacaggtcgtggtcaatatggacctggagaacttctttccaacaattgatttcgcccgggtggctggtttgttcagagctatgggctattcacccgcagtagccacgattatgtccctgctgtgcacagagtctccgagaagggtgatcagatccggggacgagacactgcacgtcgccattggtaaccgatccgtgcctcagggagcgtgtacctctcccgcactgagcaatttgatatgcaagcgcttggataaccggttggtgggcatggcggaaagtattgggtggaggtatacgcggtacgcagacgatctctccttttcatgtccaatcgccaaggacggtacagaccagggcgcgcaggcttctgccaagattggctatctgttgagcagggtacgccacttcgccgacgaagaggggttccgagtgaaagaatccaagacacgcgtgctgaagagatccactagacagtccgttactgggatcgtggttaacgacaggccttcgattgatcgtaagaccatccggcggctcagagctattcttcaccgcgccaaacacgaggggcttgaagcccagaatagagaaggacatccaaactttgccgcatggttagccggcatgatcgcatacgtgcagatggtgaatccggcgcaggggcaaaaactccgtaaacagatggatctgctgtga

SEQ ID NO: 13765 - RNA, 1629 nt, synthetic construct
  source 1..1629: mol_type = other RNA
atggggttatttcgcgtcctcaagcaattctttgctccaggaaggaacccgcctcaggacgcgaccagagcacaagcgacagcccccagcagcatcgatcacagagacttgactccaccaactacaccggtcgttacgaccgggcctgactacgttccactgaactccctgcccgccacaccacccagagagtcatcagggttcgacggcctcgacgctagccagttccagcccctcacccaggacgaagccatggaggcgacagcagaacctgggtggcgcactgcatactgggaccccttgggggtcattccgtccgcagatctgccacgaattcgtgtgattgaccagacgatggtcgggatgggcctaatagacgccgaagaactggctcagatccattccttaggggaagagatgtccagatttcggaccgattactacgccgtacaagatgcgggcaaccaggccgttcagcagacaagagacgcccgcacagcccgtaaagccgagatgaagcagcgagctgctgagcggaaaaaacaacacgacgctgacgtggcccatcgcaaagctactgatatcgtgttcctaggtcgcggcgtctctagaggacttgcagaccgcagatccaatatcgagcgtcttaagagctccgaactgccagtactctcgtcccccgccgatgtggctagtgccttaggaatttcagtgggtaccttgaggtggctagcttttcatcaccctgccagcaagacaactcactatcatacttggacgatcgccaaaaggtccggcggcgatcggacgatttctcgaccccagaagaagcttgcagcggcgcaacagtggattctggatagcttgctgagtcaaattcctgttcatgatgctgcccacggtttcgtcccgggacggtctaccctgactggtgcacagccccacgtgggttcccagatagttgttaatatggacctgcaggatttttttcctactatcgatttcgcaagggtcgctggactcttcagggccttaggctactctcctgccgtcgccaccatctttgctctgctgtgcacagagagccctcgccgggtgatcagaagtggcggagagactctccatgcagccgtgggcaaccgaagtcttccccagggagcatgtacatcaccagccctgtctaacctcatcgcaaagaggctcgataagcgtctggctggaaccgcaaaatctattggatggcagtacaccaggtatgccgacgacctcaccctgagtacaaaggtgaactcgagtaaagtgggatatgtactggctcgcgtacgccacttggccaaagaagagggttttgtggtgaaggaatctaagacaagggtgctgcggcagtgcacccagcaatcagtgaccgggattgtggtgaatgatcggcccagcatcgatagaaaaaccatccgagaaatccgggcaatactgcaccgggccaagttcgagggcttggagaagcagaatagaatcgatcacccaaacttcgctgggtgggtcagcggcatgattgcctatataaatatggtgaatcctcagcagggcggcaaacttaggcggcaacttgacgagctgtcaatgaggtga

SEQ ID NO: 13766 - RNA, 1635 nt, synthetic construct
  source 1..1635: mol_type = other RNA
atgggcttattcgatttctttaaacagatgttcggcggaaggagtgtccaggagaagtgcgtcagatgtcgccaaccactccggatgggtgccctgttctgcggaaattgcaagcacccacgaggtgcgccttaccccattccacttgcgcagaccaaacgatcagaccagggtgcagccaacgctcccagggttagaccccagaatctggtcgggctcgatgctgacaagttcaaaccaatgacaacgtccgaggcaatggccacaatcgacaacgaagacagctttaaaagtgcctacctggatagcctgaacgccattcctgatgctagccttccacgaatacaggtgattgatcgcactatggtcggcctagggctgatcgctccagaggaactggtgcacatccatgacgttggcaaggccatgggcgagcttcgtggcgactggtcttccatccatgcaagaggccagcaagccgttcaactgtcacgagaagagagagcggccagaaagcaacagaagatcgaagaggccgctcgtaggaggcaggcaagggcagaagcaattgctcggaggaaagccactgatatagtcttcctcggccggggagtatcaagagggctggctgataggcgggccaacgtggaagcactgaagcgtgccggcctccctgtattggcagcacctagcgacgtctccgtcgctatgaacatctccatcccgaggctgaagtttctggcattccattccgacgcgccggagcgcgtgcattacgtgagtttttctgtgccgaagaaatctgggggcatgcggcttctgagcgctccacaccagagcatggatgaggcccaacgctggatactcgacaatgttctgtgtaaaattcctactcactctgctgcgcatggttttgtcactggatgtagtaccgtgaccaatgccgaaccccacgttggcgccagaaccttggtgaacgtggacctcaaggatttttttccctcaattacttttcctagggttatgggcctattccagtcgctgggatattcgcctgcagtggcaaccatcttcgctttgctgtgcacagaggcccctcgccgcgtgatgaagtatgctggtagagtgttccatgctgccacagggcccagatcattgccacaaggagcctgtacctctcccgcaattagcaatttagtggctcgggggattgatcggcgtctggaaggtatagcccggagacttgactggacatacacacgctatgccgacgatctctctttttccaggaaggatgccggcgagcctcacgtagggtacctcttggcccggatccgccatatcgcccaggacgaggggttcgaagtgaatgagaagaagactcgggtacagcgtcccaaccagagacagaccgtgacgggactagtggttaatgataaagtgaacgtgtcccgaaaagacattcgccggatccgcgctattctccacagggcaaaacacgagggattagcgaggcagaaccgggaagaccacccctattttgagtcctggcttagaggaatgatcgcgtacatcagcatggtaaatcccaccgtcgggcagagtatgcgaacgcagttcgacgctctggcctga

SEQ ID NO: 13767 - RNA, 1635 nt, synthetic construct
  source 1..1635: mol_type = other RNA
atgggcctatggaacgtgctagcacgactctttggcgggggctccgcttccactaatcccacacccccaactcaaccccaggacgctagggccccagtcggaatgccttatggccgggggagtgcagtaaacacacctcctcctccaccgcggacacttgctagaccgggttctccctcacctactcggccagcacctacaaacctgaatctggatccaggccaatttgcccctgtgggggctgccgagctcaaaaagagggcaggagagctcagatggaattgggcaagcgtgaacttcgatcgccgcgatcagatccccagtgccggtgatcctcgcactgccctcatcgaccgtgccctggttgcccaaggccttctgactcccgaacagctggttgaaatacacgagactggtgcccagatggcagagctcaggcccgagctgaggaatctgcagaacattgctgctgacgctgcactcgccgacgaagctgaaagaagagcgcgcaaagaggcaaaaaaggccgaagccgatcggaggcgtgcagaaagggcggaggcaattaaacagcgaagagccacagatatcgtgtttctggggcgtggcgtcagcggtggactagcagatcgccgggctaacatagagagactgcaagcgctcgggctccccgttttggctaccccagccgatgtcgcaaaggccctggggttagaagtctccagactcagatggctggctttccattctgaggcagccgctgtaacccactacgtgcgattccagatccctaaaaaatctggaggaacccgcgaacttgctgccccccatcgcgatcttgcacggtgccaggaatgggtacggatccagatcctcgaccgcgtggatttgcacgacgccgcgcatgggtttgtgactggcaggggaaccttgacgaacgcccgcccacacttaggcagggctgctgttgtgaatgccgatcttaaggacttcttcccaaccattacatttcctcgggtgaagggagtcttccagcagttgggctattctcctgccagcgcgactgtgctggccttgttgtgcacggagtgtccaaggggagtggtgaattatgacggccgggagttacatgtggccaccggtccccggggattaccacaaggggcgtgtaccagtccggcgctctccaacttggtggctcgaggtcttgacaataggttgtcggccttcgctcgaaggctgggctggacttacacccgatacgctgacgacctgaccttctcagctgatggagaagcgatggggcagacagcaagactgctgacaggtctgaggcacattgttggagacgaaagcttcgtggtgaacgagaagaagacgcgggtacagaggcccaagacaagacagacagttacgggcattgtcgtcaatagacacccaaacgtcccccgcgacaccgtacgtcggttacgtgccatcctgcacagagccaaaaccgagggcctgaccgcacagaatcgggaggcccacccccattttgaaggctgggtgcgcgggatgatagcctacgtcgccatggttaacccggagcgagggagagagcttctggccgagtttgaactgagaaagaggtga

SEQ ID NO: 13768 - RNA, 1635 nt, synthetic construct
  source 1..1635: mol_type = other RNA
atgggactcttcagtaccttgttccgatggctgcgaggtggccccaccttagacgaagcccgaagagccgccgccagaagggttcctgctgatcgggcacctgaaggccagccctacagggctgccgttcctggtgcaggggctagaccaccagtgttgccgtccgcacaacccagttctaggcctgccgccggaaaactaaacctggatgcaggccagttcactcccctcagtcctgaggaagtcaaaaagagggccgcctctctctcctggaactggtcaacagtgaatttcgaccgtcgggatcagattccctctacggccgagcccagaactgccttgattgaccgagctttggtggcccaaggcctgctgacgccagagcagctggtgcagattcatgaagttggcgcccagatggcagctctgaggcctgaactggctaacatacacaccatcgcccacaacgctgtagctgcggacgcagctgaaaggcgcctgcgtaaagagcgcaagcaggcggaagccgcacaacgaagaactgctcgggctactgctgtggcgcatcgcaaggctacagatattgtcttcttagggcggggcgtatcaggcgggttggcagatcgcagagccaacatcgaacgtttacagctgctcggcctgccggttttgggtccaccaggcgatctagctcaagcactggggcttgaggtgagcagactgcggtggctcgcgtttcattctgaggccagcgctgtgtcccactacgtgcggtttcgaatccccaaaaagagcggaggtacccgtgaactagcagccccccatcgagatctagcccgctgccaagactggatcaggcgcaacatccttgacagagtgcctctgcacgaggcagcgcatggatttgtgactaaacggaataccctgtcgaatgcgacacctcacgtccacagggccgtagtcgttaacgccgatctgaaggacttttttccatccatcacgttcccacgcataaagggcgtgttccagcagcttggatactccccggctgctgctactgtgctcgcacttttatgtaccgagtgtcctcggacagccgtaaagtatgaggagagggaactctgggtggccacaggacctagaggactcccccagggagcctgcacttcacccgctctcagcaatctggtagcgaggggcctggacggaagaatcgcaggtctggcccgcaagctcggttggacatatacccgctacgcggacgatctgacctttagtactgacgctgagggcgccccaaaaacagcctggctgctggcaagactcaggcacattgtgggggaggagaacttccttgtgaacgagaagaaaacaagggtccagcggccaaacacccaacagagcgtgaccgggattgtcgtcaatcagcatcccaatgtgccccgggaaaccgttcggcgtctgagagcaatactgcacagggccaagacagagggcttggcagcacagaatagggaagcacacccacattttgccggatgggtcagagggatgattgcctatatccaggtcgttaatccggagcgcgggcgcgaacttttagccgacttcgaggctcttcctcaggggcggtga

SEQ ID NO: 13769 - RNA, 1656 nt, synthetic construct
  source 1..1656: mol_type = other RNA
atgattcccctgggggctattgccggcgccttagtggttctcctcaggcagctcttcaaagggtctaaaccacagccgaggagatcgtctccccctcctcctgtaccacgtccaggtgaccggccttatacacccggtgcacctccacctattcccccagcggcaggagctgctagacctgcacaacctagtccacctaggtcagcaccaccccgatccaccactctgaatctggacgccggccagtttacacccgtttccgccgaggaagcaaaaaagcaagcccgcgggatcaagtggaactgggcctctgtgaactacgataggagggaccaaatccccgcgcctactcagcctcgcactttgctgatagatcgcgcaatggtggcccagggactgctaactcctgagcagttggtggagatacacgatgtcggcgccaaaatggctgaactgcggccggatctcgccgggatcggtaatgtggccgatcatgccgtggccgctgatcaggaggaacggagacggcgcaaagagcagaagatcgcggagagcgcagagcgccaacgcaagcacgctgaagccgtggcgcaaagaagggccactgacattatcttccttggacgtggcgtatccggcggactcgcagataggcgcgctaatgtggagaagcttcagcagttgaacctacccgtcctcgctacctcaggggatgtagcgaaggttctggacttagaaatcagccgactgaggtggctggccttccatagcgaggcttgtgccgtgacgcattatgtgcgcttcaccatacccaagaagagtgggggaacccgagaactggccgcacctcacagagaaatggcccggtgccagctgtggattaagttaaacatcctggaccgcatcccccttcatgaagctgctcacggctttgttgctcacagaggcacgatgagtaatgcagtgccccatgtgcgtcgggacgtggtcgtgaacgccgacctgaagaattttttccctaccattacctttcccagagttaaggggatcttccaggaactgggctacagccccgccgtagctaccatactggcactcctctgcaccgaatgcccgaggcagcgggtcacttatgctggacgagagttgcacgtggcgacaggaccaagagctcttccacaaggagcctgtacctcaccggccctgagcaaccttgccgcaagagggctggatgcacggctaacaggcttagccaggaagctcggctgggattatacccggtacgctgacgacttgacattttccacgtccggggcacccgcacagaaaacggcgtggattctcgcccggcttaggcacattgcacaggaggaaaatttcactgtgaacgagacaaagacacgggttcagaggccatctgcccagcagaccgtgacaggaatcgtcgtcaataagcgaccaaatgtcccacgtgagactgttagacgcctgcgtgctattttgcacagagcgaaaacagagggcctggccgcacagaaccgagagcagcatccccacttcgctgcctgggtcggtggtatgatcgcctacatgcaaatggtcaacccggagagaggcaaaaaacttaaagctgaatttgacgctctgccaaaatga

SEQ ID NO: 13770 - RNA, 1215 nt, synthetic construct
  source 1..1215: mol_type = other RNA
ccatcgcgacaggcgatccaggctaaacagcaggcggaagcgcaagccgccgaacaagcgttggccgatgatgacgccgcaagagctgctgctcgggaggctaggaaagccgctgcagctgccagacgagagcagagagctgccgcaattgccgaaaggcgccggaccgatattgtttttctgggtaggggagtctctgggggattggccgaccgacgcgctaacgtggagaggcttaccgccttcggcttgccggttctagcaagccccgccgatattgcccgcgtgttggggatctctgtgccccgtctgagatggctggccttccatagcgaggcctcctcagtgagtcactacattcgttttacaatcgccaagaagtctggaggcatccgcgagctggctgctcctcatagggacatggcagctgcacagcagtggatcctgacaaatattcttaacgtacctcccgtgcgcgattgcgcacacgggttcgttcggggacggaacgtaatgactaatgctgtgccacatgtccggagggacgccgtggtgaatgccgacctcaaggatttttttcctactgtcacctttccgcgcgtcaaaggtatattcgagagcttaggctactctcccgcagcagccacagtcctggcattactgtgcacggatagtccacgaaggctagtcgagtacgaaggcgaaaaacttcacaccgccgctggtcctcgagctctgccacaaggcgcctgcacaagcccagctctgagcaacatggccgccagaaaactcgatgcaaggttagaggggctggccagagctacaggatggacctatacccgctatgccgacgacctgactttttccgcaaacggcgaaactgcgagtcggtgtggtgggctgctccaagcgttgcggaggctttgtgccgaagagggcttcaccgtgaacgagaagaagacgcgggtgcagcgtcccaactcccagcagtcagttacgggggtggtcgttaatcaaagaccaaatgtgcctaggacccttagacggcggctccgtgccatactccaccaggcacgcacaactggactggctgcacagaatactgagaatcaccccaacttccccatgtggctcagaggcatgatcgcgtgggtatcctcaacaaatcctgacgagggccgcagactcctggaagcattcaaggacctgaagtga

SEQ ID NO: 13771 - RNA, 1587 nt, synthetic construct
  source 1..1587: mol_type = other RNA
atgggctttatcgactggttacgggacctttttctggggccagaattccgcccaaaggataggtcacaaccgcccccgcaaagaccgggtgcagttcctgatcccgtgtttccgccccggaatgtcgctattcctggacagaatcccctagcacaaagacctgcccccgctccaagaacaccccctcctcctccacgaaaactcaatctgaccgcggctgcctttgccccaatttcagacgcagaggccaaaaagcagggggaggccgccaggtccgcatttaacccctggtggggacggcgcgatcttatacctccacccgacgatcccaggaccctcgtgatcgatagatctatggtggcacacggctttattactccgcaggagctgacaggcatccacgatgtggggagacagatggaagaactgcgccctgatttgaaccaggtagaagctcaggcaaaccaagctgtcctcgccgcccaggctgacagagaggagctgaagaagcgcaaaaaggcagaggcagccgaaaaaaagcgccggcatgccgaggacgttcttaggcgccgtagcacggacattgtattcctgggacgaggggtttcaaaaggtctgtctgatcggagagcaaatgtggagaaactccaggcggccggtttaccagtcctggccacacctgctgacgtagcgcgagcactaggcctcacagtgcctcgtctccggtggctggcgttccacacggaagctagccctgtgacccattatgtccggtttgagatacctaaaaagtctgggggaatgcgcgctttggctgctccccacagggacatggctcggtgccagcagtggattctggcgaatatactggggaaggtggcgccacatgccgtagcccatggtttcgtgaagggtcggtccaccttgacaaatgccgctccccactgcaggcgtgacgttgtcgtgaacgccgatctgagggatttctttccaaccatcacgttcccccgggtgttgggaatctttgcccagttagggtacagcccagccgctgcaacagttctcgccctccttgccaccgaaagccccagacgcccagtcgaagtcgacggcaccacataccacgtggcctgtggaccccgtgctctaccacagggggcctgtacttcccctgcactgagtaaccttgcagcacgaggcctggacaggcggttagcagctatcgcaactaagctgggttggatctattcgcgctatgccgacgatctgactttcagtaccagtggcgaggccaagaccggctacttgttggccaggctgagacacatcgcgagggacgagggcttcactgtgaacgaagataagacccgggtgcagagacgatctgacgcccaatccgtcactggcattgtggttaacgagttccccagcacaccacgtaaggagcgcagaagactcagggccgcaatgcataaagcgaagacttccggactggcccctaaagatcttgctagggcccgaggcatggctgcctacgtcgctatggtgaatccagctcagggagccaaattcgctgcactgagatga

SEQ ID NO: 13772 - RNA, 1590 nt, synthetic construct
  source 1..1590: mol_type = other RNA
atgggtctactgtctttgatccgccgacttctgggcagggatcagccctctcaaccaccacctataccacggccgtcgacttccccacggcacaacgtggtgccgcaggtcagagcaaccagtcagccccctcaacgaaaaactctgagccagctggatagccaggttttcgcagggttgagcggtgccgaaacgaaacaacaggccaaagctatggggcgacccttatggagtaacttattcgcctttggccgccaaagcgtgatccctccagtttccgatgagcgtaccctgatgattgaccgtgccatggtaggggaggggctgatcacacctgaagagctcactgcaatccacgagattggcctgaagatggaggagctcagaccctcctacgaaggtgctaggcatcagggtcaggtagcagtgaacgcggacaaggccgccaaggctgagcttaaaagacagaaaaaggctgaggccgccacacggaaagcagaaagagaggcagccattgctcagcgaaaggccaccgatatcatttttctgggacggggagtgtccggcggtttagcagaccggcgatcccacgtggagaaattgcaggaggccaaactgccggtgttgtccactcctgcggaactcgccaccgctctcgagttgcccgtaaaaagactaaggtggctggctttccacgccgaagtcgctgtggtcacccattatattcgctttcaaatccccaagaagagtgggggcatgagggagatctcgacaccacataccgatctcgctcgggcgcagagctggattctccagaatatactcgaacatgtgcccgtgtctggcgtcgctcacggctttgtgcgggagcgtggcaccctgacaaacgcgagaagccacaccggcaaggatgtcgttctgaacgctgacctcaaggacttcttcccatcaattacgttccctagagttcggggaatattccagcagctggggtacagccctgctgtggccacagtgcttgccttactgtgcactgaatgcccaaggaggactgttacctacgatggccagacctatcacgtagccaatggtctgcgcgctctgccccaaggcgcatgtacatcacctgcactctcaaatctttgcgcccgcaagctcgaccttcgctttgccgccctggctgcgaagcatgggtggacatacacgagatatgcagacgacctgacattctcaacaaggggagagcccgcaaaagccactgccttgatcctctctagattgcataatattgtccaggacgaacactttgaagtgaacaccgcaaagactaggatccaacgccgcaatgctcagcaatctgtcacaggaatcgtcgttaatgatcggtgtaacgtggacaggaagaccagacgtcggctgagggccatacttcatcaggccgaaaaaacggggcttcctgcacagaaccgcatcggacacgacaattttgcgggatgggtgagtggaatgctagggtatgtcaagatgattaatccccagcagggcatgaagcttttcaaagcttgggatctgctgggaggccagaagtga

SEQ ID NO: 13773 - RNA, 1587 nt, synthetic construct
  source 1..1587: mol_type = other RNA
atggggcttttttcatttattaagagcctctttggcgggtccagtacgccacctccactccctaggagagaaaccaccccggtacggaacgctgtgccgcaagccaaaaccccacctcagccccccaaaaggcagactttagcccatctagactcacaggtgttcgaagccatatcctctgaagccgcaaagaagcaggcaaaagcgatgggtcgccctctatggagcaatctctttgcattcgggagacagagcgtgatccctcccgtaactgacccaagaacactgatgatcgatcgggctatggttggtgagggcttaatcactcccgaggagctgacacagattcatgagataggtgaaaagatggccgaactgcggcccgatttcaactgggcaagacaccagggccaggctgctgtgaatgccgataaagcagccaaagctgagctgaaaaggcagaagaaagccgaagccgctaagcggaaagccgacagagaggcagcaatagcccatcgcaaggcttctgacatcatcttcttaggccgcggggtcagcggaggcttagcagatcgccggtcccacgttgaaaaactgcaggaagcgaagttgccggtcctttccacaccagccgaggtcgctactgcccttgagctccctgtcaaacgccttaggtggctggcattccatgcggaggtcgccgtggtcacacactacatccgttttcagattcctaaaaagtctggcggggtacgagagcttgctgcacctcacgctgacttggcgagggctcaacgttggatactccaaaacattctcgagcgagtgcccgtgtctggagttgcccacggtttcgtgaaaggaaggggaacccttaccaatgcgcgaagccacaccgggaaggacgtcgtgttgaacgccgatttgaaagacttctttccttcaattaccctgccgcgcgtgcggggaatttttcaacagctggggtatagtccatcggttgccacagtgttggctctcatctgcaccgagtgtcccagacgcacggtggagtacgacggccagacgttccatgttgcaacaggcccacgagcactgccccaaggtgcgtgtacatcacccgccctgtctaacctgtgcgctcgcaagctggatctgcgttttgccgcactcgcggctaagcacggctggacatacactcggtatgcagacgatctgaccttctccaccgacgatgaagccgctaaggccactgcactaatcctgagtcgactgcatcacatcgtgaaagacgaacatttcgaggttaacgaggccaagacccggatccagagacggaatgctcagcagagtgtaactggagtcgtggtgaatgatcattgcaacgtgcctagaaagactagaaggcagctgagggccattctgcaccaagccgccaagacgagcattccagctcaaaatcgtattggacacgacaactttacaggatgggtgtccgggatgctgggttatgtcaagatgatcaatccacagcagggcgaaaaactcttcaaggcctgggatatgttgggcgagaagaggccctga

SEQ ID NO: 13774 - RNA, 1599 nt, synthetic construct
  source 1..1599: mol_type = other RNA
atgtttagatggctcctcaatttcctggggctggctccaaatccacgacccacggccaggcagcggacaatcgctgactcatggacagccgaaaggacgtccgccgctcctcagtctacacccgctcggtccgttagcgcccaaaagaagcaaactagtgctagccccgaggcactgaatgcggcgcagttcacccccattggcgatagagatcttaaagagcaggcaaaaaacttaggctcagcctggtccaacccgtggttcggaagaagagacatcatcccccctgctgatgacccccgcacacagctcatagacagggctatggtcacacacggtttcttgacgcgggaagagctagccgatatacatgccgtgggcgaggagatgagtgagtaccgacccgatacggtgctagtgagtcacagggccaatcaactggtagctgaagccaccgccgatcgggaggaactcaagcgccagaagaaggcagaagcggaggagaggaaacgccagcgagaggaggaaattgctgagcgcaaacggaccgacatcgtttttctgggcagaggggtgagtaaggggctggcagatcgtagagccaacgtggaagagctgcagaaaaacaacctcccagtcctggcaactcctggcgagcttgctaaggcaatggaattccctataccacggctcagatggctggcatttcacactgtggctgcagaacgggtacactacatttccttcactgtgccaaagaagtctggaggagaacgcgtgctttcagctccgcaccgtgacatggcagctgcacagcgatggatactcgagaatattctggaggcggtgcctgtacatgaagccgcgcatgggttcgtcaggaaaagatccacagtaactaacgcagaaccacacgttggacaggaaatgttagtggggtgtgaccttgaggacttttttccctcgatcaccgtgtttcgcgtgatgggcgtgttcgaacagttgggatattctcccgctgtggccacaatcctggcattgctgtgcacagagtgtccccggcggaaaatgatctacgccggccagaccttttatgccgccactgggccgagggccttaccacaaggagcctgcacctctccagcgctgagcaatttggtctgcaggcgactagacagccgcctcaccggtcttgcaaagcaattcggcgcaaattatacccgttacgcggatgacctgacatttagcggttccggggacgttgccaatatggccggctgggtgattgccaaaattaggcatgtcgtcgctgatgagggcttcaccttgaacagaaagaaaacccgggtccagcggcctaatatgaggcagaccgtgaccggtgtcgtcgttaacgaacgacctggtgttccaaggaagttggtacgtcgcctgagagccatcctccataatgcccagactactggactggccgcacagaacagagaaaaccaccctcactttgagtcttgggtggaggggatggttagctatatccagatggtgaacccgtcacaaggagagcctcttcgcgctgccctggctacaattcgcaactga

SEQ ID NO: 13775 - RNA, 1524 nt, synthetic construct
  source 1..1524: mol_type = other RNA
atgccgattggagttcagccggaaagcagcggagatgaacggtcggctccagcgccgactaggagaagggagaatctggcggcactgaacgccgaacagtttgcccctctcgaacatgacgaggtgcgggagcaggcggaccagttaggcagtctttgggggaacccttggtttggacgccgagacttaattcctcccgcaagcgatccacgcacccagctcatagatcgagcaatggtgggccagggcttgctcacccccgaagacctcgtggacattcacagaattggagatgctatggacgccgtgcggcctgatctagccttggcggttgcagaagcggatagggccgttacgagatcagccgaagagagggccgccctgaaagctgaaaagaaagcagcggccgcagagagacgcagactccatgcagagcaagtaactcatcgtagggccaccgacatagtctttctcggacgcggggtcagtaagggcctggctgagaggacacccaatgtggccgctcttcaacaggccggtctaccaatccttgccacacccgctgatgtggctgcagctttatccatctctatcccacgcctgcgatggctggccttccatagcgtcgctacgaagaggacccactacgtaagctttaccgtccccaaacggtcagggggtgtgaggactctttcttccccacacagatccttggcacagtgccaagaatggatactgcggaacattctggaccgtattccagtgcacgcagcagctcatgggttcgtgaggggccgttctactctgtccggcgccagaccacacgttggagctgaggtggtgctgaatgtcgatttgaaggatttcttccctacaatcacattcccacgcgttaaaggcgtgtttcagcagctcgggtattcacccgccgccgcaacaatcctagctctgctctgcacagagtgtccacgcagaccagtggagtacgccggcgagaagctgtacgtggctactggagagcgcggactgcctcagggcgcatgtacctccccggcacttagtaatctggtcgtgaggcgaatggacgcccgtctgcaggggattgcccagagattaggctggatctacacaaggtatgccgacgatatgacgctgtctactagtggtgacgccgcacagcggttggcctatgtgatggctcgggtacggcacatcgcgggtgatgaggggttcgcccttcacgcagaaaagactagagttcagcgacctaacgtccggcaatgcgtcaccgggatcgtggtaaacgagcgtgccggtgtacctcgagaaaccgtgcggcgcattcgggccatcctccatagagctcggcacgagggcctggctgctcagaatctggacgggatcccccattttgaaggatggctgagaggaatgatagcttatatccgcatggttaacccccgccaaggcgctcctttgcaacacgccttcgacgagctcatgccccccggtaccgtcaggtga

SEQ ID NO: 13776 - RNA, 1290 nt, synthetic construct
  source 1..1290: mol_type = other RNA
atgagtgtttgggactcattgcggagactgattgctccaccaaagttgccaaaaacaagtgaggccgatagacacgccatggccgagagctttaaccttcacagaaagaggcccctgcccgcggttcgactgaaagaacagctggatctgagctggttggccagaagacgcactgctcccgcagcggagccgtttggttacctcggagacggcgtgagctatgaactgggtcagcgagtgaccgacgtggagagactgagcagtgctgggctcccggtgcttaaaacgccggaacagctggcagaagccattggcttttctgcccggcgccttcgctggttggcttaccatagggatgcccaggctagttgtcactacatacatttcatcgtggagaagaagtccggcggagtacgatccattgccgcgcccaggcctcaaatcgcagcctgttgcagatggatcgaccgcgaaatcctacggcttattcctccacacgatgcagctcatggatttgtgcttggacggtccacgacaactgccgcccagcctcatgtcgggcaagacgtcatagtgaacatggacctgtctgactttttccccacgatcaccttccccagggtacggggttggttcgcatccctcgggtattctcgacagacagcgaccgtcctagccttgctgtgtactgaaagcccacggacccctatcgacatggacacatcaaatgttaatgcctcctctatagacactgtcaatcactcacgtctgtggctcgctaccgggcccagacagctacctcagggggcatgcacttctcctgccatcagcaacctcgtctgccgaagcatggacaggcgcttaaccgggctgtgcgaaaaactcggctggacctatacaaggtacgcagatgatttatcattctccaccagtggcaaagatgattcgcagattgggtacttaatgcaccgcgtcggcggaatcgtgcgggatgagaggtttgctatcaacgattctaaaactcgggtgcaacgccgctccggacgtcaaaccgtgaccggtctggttgtgaacgatcgtataggggtgcctagggagacagtaagacagcttagatcaattctgcatcacgcaaagactgagggcctggaggcccaaaatcgtgaaggccacgctgacttcctcggctgggtcacaggaatgattggatatgttggtttcgtggacccagctaagggcgagaggctgcggagccagctggatcaggtactcaagcaggagacaacctga

SEQ ID NO: 13777 - RNA, 1227 nt, synthetic construct
  source 1..1227: mol_type = other RNA
atgtgggacagactcaagagactctttagtggcagcgctaagagcccaagacgaagtgccgcccagtttaacacacggcggggtaaccaatccgacgagcgagttcttccttactggtcacagcgtactccactggccgattccgctgaagcccgcttttcttatcttggaaacggggtcagtcacgaggcagcagatctggccaccgacgccgagctgctcaagaaactggagttaccagtggtcgagactggaaatcagctcgctgaggccatcggcttctcgccgaagaggcttaagaggttggcggtacattctgctcagactcgctcttgcaactatttctattttaccgtgcccaagagatctggcggtgagcggctgcttgcagcaccacgacctcagatcgacgcctgttgccggtggatattacgcgaaatcctggacaagatctcaatacaccctgccgcccacggctttgccaaaggaaagtctataaaatccaatgcggaaattcacacccaacagcaggtgatcgttaatctggatctcctggatttcttccccgctattgagttccgccgggttaggggcctgttcgagagcctcggatacaatgggcaaattgccactctgctagctttgctcaccacagaggcatctcgggaacccgtcccgtcaccagccggaacactatgggctgcgaccggccctaggcatttaccccaaggggcatgctccagccccagcatttccaaccttatctgtagggctctggacaggaggctgagcggcctgtgtagatcattgtcctggaactactcccgctatgcggacgatctaacatttagcgcatccgccgtggcaggacagagggtaggctacatgctgcaccgtattcggggcattgtacgagaagagggattccaggtcaacgaatcaaaaacaagagtgcagcgaccttcgcaagctcagacggttacggggctggtcgtgaatgacggtgtttctgtgagccggagtaccgtgagaatgttgcgcgccatcctccacaacgcttcattgcatgggctcgaaagccaaaatcgcgataaccatcctcacttcgcagcctggctggagggtatgatcgggcatgtggtcaatgtggatccccagcacggggtgaaacttcagagacagtttcgtcagctgaaaaagcagcaggtgagtcacaatcatgaatga

SEQ ID NO: 13778 - RNA, 966 nt, synthetic construct
  source 1..966: mol_type = other RNA
ctcccagtgctggctactcctgccgatgttgcacggtggctggacctctccatcccacgcctgcgatggctggccttccatagcgactccacaaccgttagccattacgtcttctttacagtcccaaaaaagactggcggcgtacggagacttagtgctccccatgctggaatggctgcggcacagagaaagatcttccaggagatactccctcgtcttcgcatacacgatgctgcccacggctttgtcacgggccggagtatcagatcaaacgccactccgcacgtgggagcccatgtggtggtgaaccttgacctcaaggacttctttcccagcatcacttttccgcgtatccgaggtttactcactgctgcgggctactctccttgcgcgtcatcgattctggcgctgctatgctccgaatccccccggcaagtactaggtctggggggtcaaaggctgttcgttgcaaccggaccacgcgctttgccccagggagcatgtacatctcctgggttggccaatttggcagcccgcatactggatgctcgacttgccggcttagtcgccgcctggggatggacatatacaagatacgctgatgatctgactttttctacccagaacgcccaagcagacatcggcaggttgttaaccgctgtgaggaatattgtggcagacgagggtttcacggtgaatgaggagaaaacccaggttcagcgccgaagccaggcacaggaggtgacagggctggtcgtaaaccagcgggccaaagcaccacgtgaactcattaggaggattcgggccatcctgcacagagctgaaagagaagggctcgccgcccaaaatagggagggccaccgggattttgcagcctggctggggggaatgattgcttatattgccatgaccgaccccgctaccgcagccagatatagggcgcagctggaacgcgtgcctaggtga

SEQ ID NO: 13779 - RNA, 1809 nt, synthetic construct
  source 1..1809: mol_type = other RNA
atgctgttgagtagccggctgttctttcctttagacgtgagctctcagaagtactttttctacttaccagaattcagggagtgggtggtcatgtcatttttcgactggctgcaaaaattgtttggttccgccagtcctgaagagcagcggcccataccaccccgtaagagtccagaagaccctaacccagttgcgacgccggaacctcaacctagccccaccactgaaacattgaagccatctaaggttgccgaccccccagctcgcgtctctaagactgctcgggccgtgaaaatcacagagcaagaagaaccccccaaaccacccgtttcgagcgtgtctggggacgcacttgctatgggggagctggcgccactctccctggatgaagctaaaagcgaggctaaggcgagcaatatttcctggcgtatgtccgggggctgggataggagggatcggatcccctccctggagaaccctcggactagcctgatcgatcgagctatgatcggccacggccttattactgccgaggaactggaggagattcatcgcgtaggggcagagatggatgagctgaggccactcagggaacacgcccttgagctggccagacagcaggtggctgctgaggaacaggacaaacagaagatcaaagaggagaagaaaaaggaagccgctcgcagagctgccgtgagacaagcagaaatagagctcgcaaaaaaaacagatattgtctacctgggtcggggagtctctcaaggcctagcaaacaggcagagcaaccgagagcagcttgaccagttgcagcttcctttcctggatcacccggacgagctcgcaaaaatcctcgaagttgaaatccctcaactgagatggcttacatttcataatgaggccgccgaacggacacactacctgcagtttgaaattcccaagaagtcaggaggctcgagaattctcagcgcccctcaccaggccctctcaaaaactcagcagtgggtattgacaaatatcctccaaaaattacccacccatgaagctgcccatggcttcgtccctggaagatctaccgtgactcacgccaaccttcacgtgggatgtgacctggtcgcccaaatggacctggcggatttctttccctccatcaccttcccgagagtgcgcgggcttttcgagagttttggttattcaccggcaattgctacaatactggctctcctgtgcaccgaggctccaaggcgcaccattgagctatctggcaagaggtattatgtggcggaaggcccccgcagtctaccacaaggggcttgcacctcacctgcactatccaacctgatcgccagaaagctggatgcccgactgaccggtatgtctcagaagattggctggacgtactcccggtatgccgacgacctgaccttctcatggaaaggctccgccggtgagaatggaaaacagcccaactatggatacctgctctcacaggtgctcgcgataatcgatgaggagacattcgccttgaatgaacagaagactagaatacagaggccgagccagcgtcagcaagtcacgggcatcgtggtaaatgaccggccaggagtaccccgcccagttgttcgacgcttacgagccattttgcaccaggcacagaagaccgggttagcagcacagaatagggagaatcatccccattttgccggttgggtgcaaggaatgatcgcatacatcagtatggtgcagcctgagaaggggaagcagctccaggccgcatttgagcaggtccctaaggacgatgctgtgaactga

SEQ ID NO: 13780 - RNA, 1692 nt, synthetic construct
  source 1..1692: mol_type = other RNA
atgggcctgtgggataaggtgaagactctcctgggactcggcgatggagcacagcaaccaggtgccggagaagatgctggagggggtcaagggtcctctccagcagcccctgctcaacccgcaaggccagctgctgctcaaggcagtgctaagcctgcagcagcccaaccccctgcagcagtgcagcagtttagcgctgctcctgcccctgcagctgcacagaggcctgctaaacagcgccagaagcccacagatccttacgacgctaaaggcattctggggctcagcgcagacgaggtgagaaagagagccctcaaaatcaacccatataagactgcgtggatcggcagggtcgataccattccaccccagtctgacgaaaggactgccctcatcgatcgcggactcatcctgcgcggcctgctgactgaggctcagattgctgaaattcacagggtcggcgacatttggcttaagcaccacgaggctgccagactggcgggaacagtagccgccaagaccgccgagaaggcaattgccgacatcaagcgcgagaaagaggccaggaaagccgagaaaaagcgtctggctgccgagcgtagagagagacgagcggccgaaattgcccggaggagagccgaggacatcatatacctcggccgcggagttagtgccggactagcggacaggagggctcacgtggaggctttagaggaacgggggctccctgttttgtccacacccggggatgtggccagagctcttggtctgactatctcacaactgcggtggctggccttccatggggatgccgtcgaacgcccgcattacgtttattttgaagtgccaaagcggtcagggggcaaacgactcctgagctcccctcatcggtccttagccgcagcccaggcatggatactgcacgacatcctggaaaggcttcccgtggaagcccccgcacatgggttcgtccagggcagatctacggttactaacgcccgaccccacattggacgcgatgtggtagtgaatttggacctgtcagacttttttcccaccatcacattcccaagggtgagaggggtgtttcagcggcttggatacagcccagctgccgcgaccgtgttagccttgctatgcacggagcccccacgtcgggaactagagtatgacgggcagcgctactgggtagcagtcggcgaacgtggcttaccccagggtgcatgcacatctcccgccctgtcgaaccaggtagcgaggaagctcgatcggagacttgccgggatgtgtaaaaaacacgggttcgagtacacccgctatgccgacgatcttaccttcagtgccccgcctggtaagagagcggagataccgatgcttttggcgcgagtgcggcacatcgtcacagaggagggattcgcgatcaatcctaaaaagggccggattcaacgagccgccggtcgacaggaagttaccggcatcgttgtgaatgataagctgggtatgccacgtgaagaagtccgccgactgcgggctatcttgcatgctgccaagaaaaccggattggcagcacagaacagggagggcctgccagactttgaggcccatattcggggcaaactcgcttatctgcagatgatagaccgccagagagcagctccgcttttggccgctctggacgcgctggcaggttga

SEQ ID NO: 13781 - RNA, 1626 nt, synthetic construct
  source 1..1626: mol_type = other RNA
atgggcttctgggacaagttgaagtccatgctaggcctaggcggcgccgaacaaggggaaagatcccctggtggagtggaagccgaacaggcgcaaggagcccaagcaggacctgctgcagctacacaaccggctgcacgggccggtcaacccagagtagctgcaggggccaaaccaaggccagctgatccttacgatgccggaggcattctcgggctgagcgccgatgaattgcgccggagagctttgaaaattaacccctatcagaccgcctggatcggccgcgtggacacaatccctccccagagcgatgagagaacagcccttatcgaccgcggcctggtcctaagggggcttctgacagaggcccagttggcggagatccaccgggttggggatctgtggctccgccataaagacgccgcagccttagccggaaccgttgctgctcgcagcgccgatgaggccatagagcgacttaagcgcgagaagctggcgcgaaaagaggagaaaaggaggcagtccgccgagagaaagcggcagagagcagaggctgtagccagacgcagggccgaagatatcctgttcctcggcaccgatgtatcagcagggctggccgacagacggtcacatgtcgaatctctggctcagagaggcctgccagtgctgtcaaccccagctgacctggcagctgctctcggtgttgccgtaccccggcttcgttggctgtgctttcatggcgaggccgttgaacggccacactacgtctattttgacgtgcccaagcgatctggcggtaccaggcagttggcagctccccacgcaagtcttgcagcagcccaggcctgggtattgagggaaattctcgagaaactgcccgtggaggctccggcccatgggtttgtcaaggggaggagtaccgttactaacgcccgcccccatactagacgggacgtggtcgtgaatctggacttaagcgacttcttccccacaattacttttccaagagtgaggggcgtcttccaccgactcggctacagccctgcagtggccacgctcctggctctgttatgtacggaggcgcctcggcgacctgtggagtatgacggtcagcgctactgggtcgctgttggagacagggccctgcctcaaggggcatgtacatctccagcactatctaaccagatcgcgcgtaagttggatagacggttagcaggaatgtgcgcgcgcgccggtttcacttatacccggtacgctgacgatctcactttctccgcgcctccaggaaagcgcggagatatcgctatgctgcttgcgcgcgtgcgtcacatcgtcgaagaagagggctttgccattaatccggataaaggacggattcagcgagcgggcggcagacaagtggtcactggggtggtggttaatgacaagcccagtgcaccaagggaggaagtgcggaggctccgagcaatactgcacgctgccaagaaaacgggactcgcagcccagaacaggtcgggtgtgccggactttgaggcccaccttaggggaagaatagcctacgtgcagatgattgatcgtgaacgtgctgcccctctgctggctgctctcgacgcactgaccgggtga

SEQ ID NO: 13782 - RNA, 1704 nt, synthetic construct
  source 1..1704: mol_type = other RNA
atgtcattttggaacaagattaagtccctgctaggtgtgggagctaatgacgagccagccggcgagaagcagagggatgagcccgcagacggtggcgatggacaaagagcccgtactaaacccgttgtgacggcgtcctcttcagtggctgcgaaattttctggggcaagtacaccgagtccacccgcccgaaaacccgctactacccctacgcggccaaaaactaccgccaccaaacagccagctaaagccgcccctccaaactcacctccgacgacaggggtcttgttggggctctccaaggacgagctgaggcagagagcactgaaaatagacccctaccgcactgcctggataggccgggtcgacactattcccccccagtctgatgaacggacagcgttaatagatcgcgggctgattctgcgcggactgctgtctgaagagcagattcaggaaattcaccgcgtgggagatttgtggctacggcatcacgacgctctgagactggcaaccagcaaggccgctaagaccgtggagctcgccttcgagcaaatgaagcgcgaacgtgctgagcgcaaggtacagaagcaacgtgaggccgccgaacgaagacgacggagggtggaagacgttgctcggagaagagccgaagacatcatctttttaggcagcggagtgagctcccgcctggtagacaggcgatcccatatcgaagctctcaccgagcgagggcttcctctcttgagcacgcccgccgatgtggctagagcactggggatctcagtgcctcgccttaggtggctgtgttaccacggcgacgccgtcgaaaggccccactacgtctacttcgaggtccccaagagatctgggggaaagagattgctcagtgctcctcatgcgagccttgcgcaggcacagacctggattctgcgttccatcctcgataagctgccgaccgagaatcctgcccatggattcgtggcaggcaggagcaccgtcacaaatgcccgggagcacctgggtagggatatcgttgtcaaccttgatctgcgagatttctttcccaccataacattccctcgcgccagaggcgtgttccagcgagttgggtattcaccagcggtagctactatcctcgccttactttgcacagagtgtcctcggagagaagtggactatgacggccaaagatactgggttgccattggcgataggggtctaccgcaaggcgcatgcacatctcccgcgctgagtaatcaggtcgcccggaaattggataggaggctcgccggcatggcagctaaacacggttggacttatactcgctacgctgacgacctcaccttctcggcaccaccaggcaaacggagcgggatcccaatgctgctcgctcgtgtccggcatattgtgacagaggaaggctttacattacacccttccaaagggagaatccagcgcgcagcacggcgacaggaagtgacaggaatcgtggtgaacgataagctcagtgtgcctcgggacgagcttagaaggctgagggcaatcctgcacgccgcaaagactaccggtcttgaggcccagaaccgggagcagaggcctgactttgaggcacatattaggggaaagatcgcctatgtagccatggttgacccagaaaaagccgctccactgcgcgccgctcttgatgctttgccccgttga

SEQ ID NO: 13783 - RNA, 1686 nt, synthetic construct
  source 1..1686: mol_type = other RNA
atgagcttctgggacagggtgaaagcattctttggtgggggcaaaggggagggcactgaagcgccaccatacgatgcaccaactcagagagcccccgcacagagggctgccactaaaggcacaagtggatcaggcaccaaagccagtcaaggcgccgcgactagtacctcacctgcagctagtggagctcctgctgcgagccgccgtaccttcgtaaagtggataacagaggctttctctacagatcccgctgtgaccacacgggccatcatgagcatgtcggctgccgagatcagacgcagagcattgacaataaatccatttcggaccgcctggattgggagagtggacgttatcccacctcagtctgatgaacggaccgccctgattgacaggagcctgattctgctcgggctcctgacagaggagcaaatcgtcgaaattcatcgcgtcggcgacctttggctgaagcatagggaagcgtcccggctggttgcattgtccgcagcccggaatgctgagcaggcccttgcggacctgaaacgggagcgagctgctaggaaagagcagaagcgaagagatgctgtggagaggcgtcggaagagagccgaagcaatagcccgcaggcgggcagaggatatcgtgtatctgggggcaggagtctccgctggcctagctgaccggcgatcacacattgaagccctggcagccagggggctccctcttttagcttctcccgccgacgttgccaaagccctgggagtcagcatctcccgtctccgctggttatgctttcacagcgacgccgtagagcgcccccactatgtgtacttcgagatccccaaacgctctggtggaaagaggctgctggcggctcctcatgcatcattggagcgagcccaacactggatcttgagagagattctcgacaagctccctgtggaaccgcccgcccatggttttgtgaagggcagatccactgtaaccaacgcacgcccgcacgtgggaagagatttggtagtcaacctggatttgagcgactttttccctacgattacgttccccagagtgaggggcgtgttccgtcgcctgggatacagcccagcagtcgctacagtgctggcccttctgtgtactgaaccgccaaggcggccagttgagtatgaggggcaacgaacctgggtggcagtcggggaaaggggtttaccccagggcgccagtacatctcccgccctatccaatcaggtggcacgaaagttggacaggcggcttaccggaatggcagaaaagcacggttggacctacaccagatatgcggacgatctcactttttccgcccctgagggaagaagaggcgatctcgccatgctgatggcccgcgttcgccacatagttactgaagaaggctttgcactcaacccccgtaaggggagagtacagagagcctctggccgccaggaagtgacaggcattgtggttaacgataagcttggggtccctcgggatgaggtgcggaggcttagggccatcctgcacgctgctaaagctacgggactggaggctcagaatcgggaaaagattccacatttcgaagcctacctccgaggtaaaatcgcctacgtcgccatgatcgacccggcgaaggctgctcctctgcatgctgcgttagaggccctatcacgatga

SEQ ID NO: 13784 - RNA, 1722 nt, synthetic construct
  source 1..1722: mol_type = other RNA
atgggattttgggacaaagtgaaatctttcataggaacaggcaagcccggcgaaggtgagccaggaaagaacgagccagacgataaaccaaaggcagcctccgccagtacaacaagctcatccagttcgagctctacgaagtccacaacgaccggtgcagctaccggctctgcgaccacagctgttgcaacctttactagcactagccccgcgccagctgccaaaaaaaaagacaagcctaagccgaaagacccatacgatacatctggcatactgggtctgagcgccgacgagatgcgaaagcgggcgttgaagatcaatccttatcagactgcttggatcggcagagtcgatacaatccctcctcagtccgacgagaggacggccttgattgaccgcggactgatcctgcgcggtctgctcaccgaagcacagattgaggagattcacagggtcggggacctttggctgaagcataatgaagcaactagcttagcatctactgtcgcccggaaaaaggctgacgaagctatcgaagagttgcggcgacaaaaggcagagcgcaaggccgaaaaaaaaagactggctgccgaaagaaaaaagaaacacgcggaagccgttgccaagcgtcgtgccgaggacattatattcctgggacggggagtcagtggatccctgggtgaccgcagagccaacgtggaatcattgcagaagcagggcttgcccctgctttcgacccctgccgaagtagccaaggcgctgggactacctatacccaggctccgctggttgtgctatcataacgatgctgtggagaagcctcattatgtgtactttgaggtccccaaacgttctggtgggatgcggcttctgagcgctccgcacgaagcactatccaaagcacaacagtggattctccagaatgtgctggcaaagttaagcatcgaagctgaggcccacgggttcgtcaagggcagatccaccgttacaaatgctcgcgctcatctcggccggggtatcgtggtgaatcttgatctgtcagatttctttcccaccatcaccttcgggagagtccgcgggttgttcgaatcaatcgggtacagtccggctgtggcaactatattcgccctcctctgtacagagtcccccagaagaaaggtcgtgtacgatggcactacttactgggtggccgttggtgagaggggactgccacagggggcatgcacatctcccgcaatctcaaatctcgtagcccgaaaactcgataggaggctgaccggcatgacgcggaaaatgggctggacatacaccaggtatgccgacgaccttacctttagtgctgcaaacgaagtggtggacgatgggaaggggggccaaaaaaaggggcggggcgatctgggcattctactcgcccgagtgagacacattgttcaagaagaggggttcgccatcaacccaaagaagggacgtgttcagcacgccggaggacggcaagaagtaaccggcatcgtggtgaacgataaactcggcatgcctagggaggaggtgaggaagctgcgagccatcttacacgcggctaagaaaactgggcttgcggctcagaatcgcgagaacattccacattttgaggcctacctgcagggcaagattgcctatctgaacatggtagatcctgagagagcaatgcagttagctaaagcctttcttgagattcccaggtga

SEQ ID NO: 13785 - RNA, 1701 nt, synthetic construct
  source 1..1701: mol_type = other RNA
atgggcttttgggataaggtcaagacctttattggtcctgggaagcctggcgagggagaaccgaagaaagatgatcctgctccagcggcaaaacctgcctccactcctgctaccaccagtacgtctgcatcaggaaaaaccgcttcagcttccagcgccgtaggagccgtgtctacgtttaccgcctctactcctgcaaagaccgccgctgccaaaccgaagaaagacaagcctaaggacccatatgacgcctcaggaatcctcgggctgagcgccgacgaattacgtaagcgagccctgaagattgaccccttcagaactgcatggatcggccgcgtggatactatcccaccccagtctgacgagagaacagctctgattgaccgaggtctgatcttaagaggcctgctgtcggaggagcaaatcgaggaaattcatcgggtgggggacctgtggttgaaacaccatgaggccgctaacctcgcctcgacagttgcccgcaagagagcggatgaggcaattgctgagctgaagaaagagaaggctgccaaaaaagcggagaagaaaaggctggccgctgaacgcaagaagaaaagggccgcagacgtagcacggaggaaagcggaggacattatcttcctggggcggggagtctccggcaaactagctgatcgccgcgctaatgtcgaagcactccagaaaaacggtctgccaatactcagtacccccgccgaagtggccaagacactgggattgccgatagggaaacttcgatggctttgccatcacaatgatgctgttactcggccacactacgtgtacttcgaagtgccaaagagatccggaggaacgagacttttgagcgcaccccacgagaatctcgctaaggcccaggagtggatcttcaacaacatcttgcaaaagcttcccacagaaaaccctgcacacggattcgtgaagggcaggagcacagtcaccaatgctaaagagcacgtgggtcagggcatcgtcattaacctggatctaagcgatttctttcccactattggattcggcagagtgagggggctctttgagtccctcggctattctcccgccgtagccactatcttcgctttgttgtgcaccgaacccccccggagaaaagttacgtacgatggtactctgtattgggttgccgtgggagatagggggcttccacagggcgcttgtacctccccagccataagcaatctggtgagtcgcaagcttgaccgacggctgttgggcatgacacgcaagatgggctggacatataccaggtacgcagacgacctgacattctcagccgagatgcaggaaatcgagggcgggaagaagggaaggaaagacctcgggatgctgctggcacgtataaggcacattgtccaggaggaagggtttgcgataaatccgaagaaaggtcgtctccaacatgccggcggccggcaagaagtcacaggcatcgttgtgaacgataagttaagcatgccccgggaggaggtacgacggcttagagccattctgcatcaggcgaaaaaaaccgggctggaagcccagaataaggagaaacgcccacactttgaaagttacctcaaggggaaaatcgcatacttaaacatggtggatcctgacagggcaatgcagctagcgaaggcatatatggaagctggtggtcgttga

SEQ ID NO: 13786 - RNA, 1707 nt, synthetic construct
  source 1..1707: mol_type = other RNA
atgggcttttgggacaaagttaagactttcctagggaacgagaagcccggagagggcgagcctaagaaagatgatgcccctcccgcagtgaaaggaccggccactcccgcttcatctggaggcgcaaaacccgctcagagcgccaagaatgcagccgcgcctcctcctgtggctacatttactactactcaaccagtgattacacccgccccagcaccagcaacaggtgccaagaaaggcaagccaaaagacccatatgatgcatccggaatcctcggcctgagcgcggaggaactcagaaagagggcactgaagattaatccctacaaaaccgcttggattggacgagtcgataccatcccaccccaatctgacgaacggacagccatcatcgacaggggcctgatcctcagagggcttctctccgaggcccagatagcagagatccaccgtattggggacctttggttacgccaccgcgaagtgacatcgttagcggagagtgtggcaaaacagaaggcaagcgaggtgatcgaagagctgaggcgtcagaaggcggagaggaaggccgaaaaaaaacgcctcgctgctgaacgaaagcagaaacgtgccgaggaaattgctcgccggagggccgaagacatcatttacctgggtaggggtgtttctgccggcctcggagatagacggtcacatatcgaggccctgggtgagcgcggtctgcctttgcttagcacacccgcagatgtcgctaaagccttgcagatccctgttccccggttaagatggctgtgcttccactctgaagctgtcgagaagccccattacgtatatttcgaggtaccgaagagaagcggaggaactcgcctgttgagcgctccccatgaagccctggcgaaggctcaacagtggattcttcacaatatactggagaagctgcccgtggaggaccctgctcacgggttcgtgaagggccgaagtaccgtaacgaatgccagaccacatctgggccagcaggtggtcgtgaacctggacctctcagatttttttcctacggtcacctttcttagggtgcgaggctttttcgaaaagatcgggtatagtccagccgtggccaccatatttgccctgctctgcacagaacctcccagacggcgcgtagtgtacgatgggcagccgtattgggtggcagttggaacccgcggactgcctcaaggggcctgtaccagtccagcaatttccaatggggtgtctaggaaactagacaggaggctgacgggaatgtccaaaaaaatgggctacacatacaccagatatgccgacgatctgaccttctcagccccagcgcctgcaggtgaagacggtgacaaagcccggaacgacatcggcattctccttgcacgcgttcggcatattgttcaggaggaagggttcgccataaacccgaaaaagggccgagtgcagcatgccggtggtcgtcagtccgtcaccgggatcgtcgtgaacgataagctctccgtaccgagagaggaggttagaaagctgagggctatactacacgctgcgaagactaccgggctggctgcccaaaaccgggaaggcatcccacacttcgaggcttacgtccggggcaaggtcgcttatttgcacatggtggatccagagcgggctgctcccttgcttcgagccttagaagcattgggatga

SEQ ID NO: 13787 - RNA, 1650 nt, synthetic construct
  source 1..1650: mol_type = other RNA
atgggctcgttttggaatcggctaaaagggctctttacgggtggagatacccccggagatgccgctccagctcaagggacaacagctgcgccacctgctggtacagctgctcccagtaccggagctcccgctagtacagccacaccgccacaagcccaagcccctcaagcccctgctgtcaggaacccctacgaggccaacgaggcaatcctgggcctttcacctgaggagttccggaaacgcgccctgaaaattgtcccttggcgtaccgcgtggattgggagggttgataccataccgccccagagtgatgaacgcacggcactcatcgataaaggactgctcctgcgcgggttcttgacccgcgaacagctcgcggaaattcatcgagtgggagacttatggctgaagcatcacgacgctgatcggcttgcccacgcagctgctgccaagaccgcagaagctgcagtggaagcgaggagggcggagagaaagaagagaaaagaggagaagcaacggcagagcgccgaaaggaagcagcagagagcagaggacattgccagacgaaaaagggaggacataattttcttgggacgtggcgtctctagcggccttgctgaccggaggagcaatatcgaggccctgcaggcatccaagctcccagttctgagcagcccagcggacgtagccaaggcactgggcttgtcgatccctcagctgaggtggttgtgctttcatcaggaggccgcagaaaagactcattatcactacttcgaggtgccgaaaagatcaggcggaaaacgcctgctttccgccccccagccaactttgaagcaggcccaggcctggatcctggaaaacatcctggagccccttcccacggaagctccagcacacgggtttataagagggaggtctaccgttagtaatgccgcagcacatctggacagagacgtggtcgtcaacctggatttaaaggacttttttccgactatcacattccgtagggtccgtggtgtgtttcggcgactcggatattctccctctgtgtccaccgtgttggccctgctctgtacagaatcaccaaggcggcaggttgactacgatggcaaacgctattgggtggcagtcgccgaacgcgggttaccacagggtgcgtgtacttcccccgctctttccaatcaggtggccagaaaactggaccggcgcctgcgaggacgaatggctaagctaggctgggagtacactcgttatgcggatgatctgaccttttctgcccctgccggtaaaagagaacaagtgcctttcctgatggccgccgtacggcacgtagcagaggaggagggcttcgcactgaaccccaacaaggggagagttcagagagtggggggccggcagagcgtaactggcattgttgtgaacgaaaagctctcagtgcctcgcgaggaagtgcggaggctacgagccattctacaccaggcaaagactaccgggttggctgcccaaaatagagagaatcggccagatttcgaggcctggctccacggtaagatcgcatacgtgtgcatggtcgacaagcctaaaggcttaaagctccttgaagctttcgaggccctgcgctctggaaaacaggcctccgctggcagctga

SEQ ID NO: 13788 - RNA, 1605 nt, synthetic construct
  source 1..1605: mol_type = other RNA
atggcaagcttttgggggagagttagggggttctttgggggcggccaacctcccagcgattttgagacttcagccccatctcctggagcttcccccgttcctagagccgctgctcccgcaagtgccgcttcacctgctaaaaacccatacctggcaaatgaggaggtcttgggcctgtcagccgaggagttgaggaagagagctctgaagatcactccatggagaacagcttggatcggccgcaccgatgtcataccaccccagtccgatgagcgcacagcaatcgtggaccggggactggtgctgagagggctgctcacaaaagagcagctcgccgaaatccataccgtgggtgatcagtggctaaagcaccatgaggcaatgtctatggctggagcgcttgcagccaagtccgccgaccaagccgtggaacagcgacgcaaggagaaagcccagagaaaggccgaaaaacagaagttggcacaagagagggcccaggcaagagcggcagaagtggcacggcgaaagaaagaggaggttgccttcctggggcctggagtatccagcggactgtccgaccgacggtctaatattgaagccttagcagccgccggtctgccggtgttatcgacaccggcagacgttgccaaagcactcgaggtgacagtccctgagctgcgatggctctgctttcactctgaagctgccgaacgtacccattaccggactttcgaggttccgaaacggagtggaggggtcaggctgttggctgcgccaaagaagaagctagccaaagcccagggttgggtgctccgcagtatcctggaaaaactgcctaccgagaagccggcccatgggtttgtcaaaggcaggtctatagtgtcaaatgcagctgctcacctgggcagggatgtagtcgtgaacctggacctgaaagacttcttccccactgtaaccttccccaggattcggggggtgttcaaaaaagcgggatacagccccgccgttgccacagtccttgctctgctctgcactgaaagcccacggagagaggtggaatatgaaggccgtcggtactttgtcgctgtaggacctcgggcccttccccaaggtgcgtgtacgtcccccgctctttcaaatcaggtggccagaaagctggatagacgcttacggggcaggatggctaaactcgggttcgaatatacgaggtatgcagatgacctcaccttcagcgctcccccaggtaagcgcgagaaggtcggctttttgaaggccgccgtgaggcacctcgtggaagaagaaggctttaccgtgcaccctgagaaaggctccgttctgagtagcagtcgacggcagcgcgtcactggcattgtggttaacagaaagctgagcgtgccacgggagcaagtacgccgcctacgtgcgatccttcaccaggcgcgaaagaccggcttggccgcacagaacagggagggcaggccaaacttcgaggcatatttacagggaatgattgcctgggtttctatggtggacagagagaagggtcagaatctagcgcgccagcttgccgaactcgtggtcgctggacgtcgtgctgctgggtga

SEQ ID NO: 13789 - RNA, 1608 nt, synthetic construct
  source 1..1608: mol_type = other RNA
atggaacgcgatggtcgatacctgtacaacccatatagtggtgactcttctgccactgctctgagaaatgcgcctcctgcgcctgctcctgctcctgtaaggactaccgctgcctctacaccagccccctaccagacaccgccaccaccaaggacaataaatgagaacagctacgcggccaatcccgaaattcttggactcagtgccgatgatctgcgtaagagggcactgaaaatcgttccctggcgcacagcctggattgggcgtgtcgatacaatcccaccacaatccgatgagcggaccgcactcatcgacagggggctgatgcttggcgggtacctaaacgaaaagcagctggcagagattcacacggtgggggacttgtggctgcgacatcaggatgcaacccggttagcagaggctgctgcagccgaggctgcagacgatgctatcgaggccctgaaagccgagaaggcccgcctcaaagccgaaaagaagaaagccgctgcagaacgcagggctgctagggctgctgaagtagctcggaggcgggctgaggatattattttcctgggccggggggtgagcaaaggcttacatgacagaaggtcaaatatcgagcggttaaccgagaaggggttgcccgtcatgagcactccggctgacgtcgcggctcagcttggtctaaccgtccccaagctgcgttggctatgctttcactccgacgcagcccagacggtccattatactgctttcgaaatacttaaacgctccggaggcacgcgactcattgcagccccacgacccactctggccaaagcccagacatgggtgctccgcaacctgctggagaagctgcctgtggaagagaatgcccatggattcgtgaagggaaggtccaccgtgactaatgcgcgggcgcacgttggacgtgacgtcgtagtgaacatcgacttgaaggacttttttcctagcataggcttccgcagagtgagaggcgtatttaagagacttggctacagccccgccgtcgcaacggtactggcacttctctgcaccgaggcgcctaggaggaaggtggaatatgatggacacacctactttgtggccgttggtgagcgagccttaccccagggagcctgtacaagtcccgcattgtctaaccaggtggccagaagactcgataaacgcctgagatctcggtcacaaaaagctgggtggacttatacccggtatgccgatgatctgtcattttcagcgcctgcacaaagacctgcagccgcacaactccaggcaatggttcgacacgtggcccaagaagaaggcttggccgtgaaccccaagaagggtcgcgtgttggttcggggcgggagacagcaggttactggtattgttgtgaatcagaaaacatccgtgccacgggcccaagtcaagagactgcgcgccatccttcaccaggccaagaagaccggcctggctgcccagaacagagagcagcacccggacttcaccgcgtggctcaagggaatgatcgcatatgtcacaatggtggacagcgctaaaggccataaactgaaagcagccttcgacgccctcagtccgtcgtga

SEQ ID NO: 13790 - RNA, 1908 nt, synthetic construct
  source 1..1908: mol_type = other RNA
atggcctctttttgggacaaactaaaaagctggatcggtggggggccatcttctactccacctgacccttctgaagagacttccgatctggctcgtagagtggaggccatcgtcgtgaggcggatgacccgcaaggagagctttgaggctatcgaaatcgctgatgaagccgcatctgccccggaagatcgcacggtcaagggcattgcagcggcttccgccgtggtagcccgcttatacgatgaaggccgattcgagcccctgggctacaccaggaccaagctcgctgacggcaactggctttatcacctgaagggtgctgacttgagcaaacagtccgcaaccgctcctgccgctcgaactaccccacggtcaacagcacctgctaccaggacagccccccaaactacacccgcccaaacgacagccccagtacctgcggcacctgctcccaaagcaaaagacccttacgcagcttccgaaattcttggattgtctgcggacgagatgcgtaagagagcccttcggattaatccatacaagacagcttggattgggcgggtcgacactataccaccccagtcagacgagcggacagcgctgatcgaccgaggactgatcctgcgaggactactgacagagaagcagattaccgagatacacagagtgggagacttatggttaagacaccatgaagctaccaggctggctgcaagtaccgctgccgtagcagccgccaagcaaatggaggatatcgcacgcgaaagggccgagaagaaggcgcagaaaaaacgggaagccattgagagggaagcccggcgggctgaagacgttgcaaggcgaaagcgtgaggatatagtctatctcggtgtaggggtgtccaagggccttgccgaccgcagatcccatgtggaggcactgctcgacaggggtttaccagtgctgtcaactcccgccgatgtggccagagcaatgggcctgacaatcagtgaattgcggttcctctgctttcacgccgaggcagtagaaaagccacactacatttactttgaggtcccaaaacggtccggcggcaaaagactcttggcaagccctcagccccgactggctaaagcccaggcctgggtgctgcatgaggtgctggagaaactgcctactgaagatcccgcgcacggatttatcaagggaagaagtaccgtcacatgcgccatcccgcacgttgggcgagatgtggtggtgaatctcgacctgagcgacttcttccccactataaccttttcaagggtccggggtgtgttcgagcgtctgggctactcgccagcagtggcaaccatcttcgcactcctttgtactgaggccccccggagccttgtcgagttcgaaggaagaagatatcatgcagccgttggtccgagggccctacctcagggagcttgtacgagccccgccctcagcaatcaggttgcccgcaaattagataggcgactggccggcatggcaaagaagcatggatacacctataccagatatgcggatgatctgactttctcagccgacggcaagagtgccacggaccttgggatgctcctagctcgtgtgcgccatgtggttagtgaggaggggtttgccattaaccccaagaaagggaggttgcagcgcgctgcgcggagacaaatggttacaggcgtggttgtgaacgatagaccttcggtcccccgcgaagaagtccgcaggttgagggccatcctgcaccacgccgagaaaacaggcctggcggcgcagaaccgggaaaatgttccacattttgaagctcatctcagggggcgcctcgcttatctgcacatgatagatccggagcgcgctgcccctatgttggctagattcgaggccattgtggcacgtgcttga

SEQ ID NO: 13791 - RNA, 1527 nt, synthetic construct
  source 1..1527: mol_type = other RNA
atgccgcctccacgaagtaccaaacccagtgctggccaagcccccccaattcaggctgccgctcctcctccgccaaagcctcagccagaggaccctctggctgccgaaattctcgggctcagcgcccaggaactgcggaagagagccattaagatcaacccctatcagaccgcctggattgggcggacagatacgatccctcctcaaaatgatgagcggacagcaattatagatagggggctgatcttgaggggactcctcacacccgaccagattaccgagatccataggattggcgaccaatggttgactcatagagaggccgcaaaaatggcccaaatcctggcagcccgatccgtcgaagaagctctcgcagctagacgcgcagaacgggaagccaaaaaggcccagaaaaaagccgagtccgaggcgcgcaaagctagaataaaggaggaaatcgcgaggcgtaaagcggaggatatcgtttatctaggcgcaggggttagccatcttctgcacgaccgaagatctcatttggaaaccctggaaagcaggggccttcccatactttccacacccgctgatgtggcccgcgcattgaaccttccaattggtaagctccgctggctatgcttccactctgaagcgactgagaagccacactacagatattttgagatccctaaacggtcgggcggtacccggaagatagcggcaccacagccagaactggccaaggcccaggagtggatcttcactcacatactgcaaaagctgcccacagaggacgccgcgcacggttttattcccaatcgcagcactgtaacttgcgccgccccccacgttggtaaggatgtggtaattaaccttgacgtgaaggactttttcccaacaatcacgttcgtccgtgtacggggcgtctttcagaaactgggctattcacccgctgtcgccaccatctttgccctcttatgtacagaggcaccccgggtggagacgtcattcgaaggccagacactgtgggccgcagtgggacctagagcatgtccgcaaggggcctgcaccagtcccgctttgtctaatcaagtggctcgtaagctggaccgcaggttcgtgggcatgtctaagaaacatggatttgtgtacactagatacgcagacgaccttaccttttcagctcctgaagggaagcgggctgagataggaatgctcatggcaagggtccgccacatcttagctgaggagggattcaccttacatcccgataagggaagggtccagagacgacagcaccagcagctagtgactggcattgttgtgaaccagaagctgggactcgatcgtaaacacatccgaaggttgcgcgctatcctgcatgccgcccagaagaccggtctggaggctcagaacagggagaatatcccgcacttcgaagcccacattagagggcacctggcgtacctgcatatggtggctcctgataaagccgcaccactgttacaggcactgaattccctcccaaaatga

SEQ ID NO: 13792 - RNA, 1887 nt, synthetic construct
  source 1..1887: mol_type = other RNA
atgtccttttggaaaaaagtgaaaggttttttcggcgggggaggcggtgatgaaccaccagaaggactcacagggcacgacccgaaggttgccgctgaggtgatcgccgtcctgagggtcaggtgcgcagctcaaacttccttcgaggcagtggatattgcggacgaagtcacaagagacgatgctagtaggggcgtagcacagattcgggccgcctgtgctattgtggaagcgctgtacgagtccggttggttttccaccttggattatgtgaggaccggggctatttaccatcacacctcgaaggcaccctcctcttatgccccccctagaggcggcagtacattccctccacctgcacctccagcccctagaccagctgcgccaccaaccacgcctacagcgacaaaccccacagctccagcagctcccgcagtacctgccgtggatcccttagctgcagaagccatcctggggctttcacccgaggagttccgcaaacgcgccctcaccattaaaccgtatcaaactgcttggattggccgggtcgacactatacctccccagtcagacgagaggaccgccttaatcgacagaggactgctcctccgtgggctgcttacgcgggagcagctcgaagagatccaccgtatcggcgatcagtggcttctccatcacgaaagcgtgaagttagccgagatcgctgcccaggcaaacgttgaggcttacttgagggccgcaagggaagagaaggccagactaaaagctcagaaaaaggcggagtcagctgagcgagaggctgtgcgtaaggccttggtcgccaaacgccgcgccgaagatatcatctacctggggagaggggtatctggaggattggccgaccgcagagcgattgttgaggagctagagcgtcgcggactgccgcttcttggcagtccagccgatgtagcccgagctctgggcctgacagtgcctcgactcagatggcttgcattccacgccgaggccccaagcaggacacactacgtgtactttgaagtgcccaagcgaactggcggtctgcgacttctatccgccccgcatgacgatctgaagaaggctcagcattggattttggaaaacatcctggcaaagcttcccgttactgatgcggcccacgggtttgtaagcggccgctcagtcgtgagcaatgccgcagcgcatctgtgtcgggacgtcgttgtgaactgcgacctcgagtctttcttcccctctatcacctttgggcgggtcaggggagtgtttgaagctataggctacagccctgccgtcgctactatactggcactgctctgcacagaagctccgcggaccaaagtcacccatgagggcaaaacctattgggttgccgtcggagcccgaggattgcctcagggagctcccacatcgcccgcactcagcaatcaggtggcccggaagttagaccaacgcttaacgggcctcggtaggaaactgggctggtcttataccagatatgcagacgatctgactttcagcgcgggacccggtaaacgggaacagattggttacctgctggcccgcatcagacacatagctcaagacgagggctttgccatgaacagaaagaagactcgggtgcaaagggcagctcggcgacaggaggttacgggtgtggtggtgaatgacaagctgagtctggccagagaggaactgcgtcgcctacgcgccattgttcacggggctcagaaaaccgggctcgcagcacagaatagggaagggcgggaggatttcgaagcgtggctgagaggaaagatcgcttatgtgtctatgatcgacgccgccaagggcgaaaagttgcgggcagctctggatgcagcccctccatga

SEQ ID NO: 13793 - RNA, 1878 nt, synthetic construct
  source 1..1878: mol_type = other RNA
atgtctttttggaacaaggtaaaacagttctttggagcaggagaagcacctgagggacccgccaagacgggagacgcattgagcgcccatgatgccgcgctcgtgagggaagtgagtgcaatcattcagatcaaatgccagaatggggagctattccaggccgtggatgtggccgaccaaggtgggtacgctgctaagggcattccccagattagggccgcctgcgcagttgtggaggcgttacacgacactggccgctttgacgcactggggtatactcgcacagacgccgtctatcacccggtgggggcttctcctgactcctacgtaagaccacgcgcagctgccctgggatctcctcctgctcctgctccaaggcccgctcctgttgctcagccagcaccagtgtcagccgtaaggcaggctgacgcgaaggaccctcttgacggcggcgacattctaggcctctccgccgaggactttagaaagagagccctcaagattaatccttacagaaccgcgtggatcggccgggtggataccataccaccgcaaagcgatgagagaaccgccttgatcgaccgcggcctgatccttcgaggcatgctcaagccggaacagatcaccgagattcaccgagtgggagacttgtggcttaagcatcatgatgcgatgcgcatcgcggaaatcgccgcccagaagaatgccgatgcttttttggaggcacggagagcggaaaaagccgccctgaaggaacagaaaaaacgtgaagccgacgagagacgggcaaagcggaaggctgagatagctcagaggcgagccaccgatatcgtgttccttgggagaggcgtttcagccgggcttgccgatcgcaggacacatattgaggagctcgctcgtcggggcctcccaatcctgagcacccctcaggacgtggctaaagctctgggactggacgtcccccggctgagatggctggcattccacgcagaggctcccgcacgtacccattatgtgcacttcgaaatacccaaacgttcaggcggtactcgcctgttgtcggcaccgcacgatgacctgaaaaaagcacaacactggattctggagttcatcctctccaagctgcccgttaccgaagcggcccacggttttgtgccaggcaggtctacggttacaaatgctcggatgcatgtcggacgggatgtggtcgtcaactgtgacctcaaggatttcttcccatccattacattcaagcgagtcagaggtgttttcgaagttataggatacagccctgccgtgagcactattctggcactactctgtactgaggcgccaaggacgaaagtagtgcatgaagggcgggagttttgggtcgcagtcggagaacgtgcccttccccaaggtgcccctacttcccccgctctgagtaaccagattgcccgcaaattagatcagaggctcgagggggtgtgcaaaaaaataggttggagctatacccggtacgctgatgacctgactttttctgctgagagtggccagcgggagcggatcggatggttactggcccgagtcagacacatcgcacagaacgagggttttgccttgaacgcaaagaagacaagagtacaaaggaatgcccgcaggcaagatgtgaccggggtcgtggtgaacgataaacccgctacaccacgagaagagattaggagattacgcgctatcctgcatggcgctaagaggacagggctggagggacagaataggcaggggcaccccgccttcgaagcctatgtgcgcggcaagatcgcctacgttagtatgatcgatcgggaaaaaggcgaaaagcttagacgagagctggatgtcataacagggtcatga

SEQ ID NO: 13794 - RNA, 1617 nt, synthetic construct
  source 1..1617: mol_type = other RNA
atgggattttgggacaaggtgaaagccttctttgtcggcccacctgcagagccaagcgtggcagatgatgactcagaatccggttcctcacctcctcctgctaaaggcagtaggagcagtacacaggccccaagggctccttctcgggctgcagaatccgcccctccacaatcagctgattcctttgccgcgggggaaatcttgggcctctccgcaaaggacatgcgcgcaagggcattgaagataaatccgtatcacaccgcctggattggtaggattgacactatcccgcctcaaagcgatgaacgcaccgccctgattgacagggggttaatcctgcggggcctcctgagtaaaagccagatcgacgagatccaccgagttggagacatctggctgagacaccacgatgccgcaaaactcgctgaggccgtggcggctgctaaagctcagagggctgtcgacgatatgcgcgccaggaaagccgaggaaaaaagacgtaagaaagaggaagcggcccaacgaaaggccctcagggcagaacaggtccagcggagacgggaggaggacattgtgttcctcgggcgcaacgtaagtgcgtcattagctgaccgccggagtcatgtggaaaagctgagcgaagccggcttgccgttgcttgccaccccaagcgacgttgccaaggccttgggtattaccatcagacagctccgctggctttgtttccatgccgaggctgctctcaagtcacactatgtgtattttgagataccaaaacgcaccggcggaactagacttcttgcagcgccccacaggcatctggcccaagcacagcgctgggttctagacaatatcctgcgccgcatatctcccagcgaacccgcgcacggatttgtcgctcagcggtctacagttaccgcagctgccccccatgtgggaatggatgtggtagtcaatctggatctgaaggattttttccccacaattacgttcccaagggtgcggggactattcaagtccatggggtactctcccgcctcggccactgtactcgctctgctgtgcactgaatgccctcggacccccgtggatcatgagggcttgcgttattgggtcgctgcaggagagcgcgcattacctcagggggcctgtacttcgccagcaatctccaacctcgtgggtcgaaaactggaccggaggctggtgggcatgtctacaaagatggggtggcattacacacggtacgccgatgacctgacattcagcgctccagcagggcacagagaagcgatcggtatactgctggcacgagttaggcacattctacaggaggaaggctttcagttacaccccagaaagcagcatattcaaagagccgccagacgacaacaggtgacgggcatagtcgtgaaccacaagctagctgtgccccgtgaggaggtaagacgactgcgtgcaatcctgcataacgccagacggaccggactggccgctcagaatcgggatgacatcccccacttcgagtcttggctgcagggtaagattgcgtacgttcagatggtcgatgctgagcttgggcgtaaactcgccgagcagtacagagcccttactggctga

SEQ ID NO: 13795 - RNA, 1590 nt, synthetic construct
  source 1..1590: mol_type = other RNA
atgggcgtgtgggagaagctgaaaggcctgtttagtcggccaccgccacctcctagtggtccaggtgggcctgctacaccatccagcgccagtagcttatctagcccctccaacctgtctggagctggagcaagtggagcgcccgcgtctgacccttatcaggcctcggcaatcctgggcctctcctatgacgaaatgcgaaagcgagcaatgaaaatcgaccctatgagaactgcctggataggccgagtggatacaattcccccacagagcgatgagcgcactgctctgatcgacagaggactcatacttcggggattcctgacaaaagaacagatcggggagatccacagagtcggggatttgtggctccgttttcatgaagctgatagacttgcaaccacggtagcccaacgggaagccggcgaacttatgaagaacctcgccgaagagaaggccaaaaagaaagaagagaaaaagcggttggctgctgaaaggagggctgcccggcagcaggcaatcgaaaagaggagaagagaggatatcatatacctcggcgctggagtctcaagcggactgcgcgaccggagatccaatctggagcggctaaatggtgcggggttgcctgtgctgtcaacaccggccgatgtggctgcagcccttgacgtatccatcggcagactgcggtggctctgctaccacagtgacgcagccgagcgactacattacgtgcgttttaccattccaaaaaggagcggtggccaaagagccattgcggctcccctacctgatttgaagcgggcccaggcctggattctggagtccgtgctcgaaaagctggaggtggagcccgaggcgcatggtttcgttgcaggcagaagcactctgactaatgcaacaccccacctgaagagggaggtcattataaacctggacctggcggatttcttccccagcattgggtttaggcgcgtgcgcggggtctttgaggcaattggctactctcctgccgtagccaccatcttcgcactgttatcaaccgaggctccccggatggaagtcgattacgacggccagaagctgcaggttgctgttggagagagggcactcccccaaggcgcacctacctctccagccctttccaatcgcgtggcccgtaaattggataggcgcctcaggggtatggccactaaacatggctggacatatactcgctacgctgacgacttaaccttctcagccccaacggggcaccaaggtgaggtgcctatcatgcaggcgcgtatccggcatattgtaggggaggaggggttcgctgtgaacctgaaaaagggacgagtccagcgtaggtcagggcgccaggaagtcaccggcgttgtggtgaatgaccggcccggactcccgagaaccgaagttcgcaagttacgagcaatattgcaccaggcaaaaaaaacgggcctggctgcccagaaccgccaatctcacccaagatttgaggcctggctgaggggcaagattgcctatttgatgatgatcgatccggctaggggaaaggctatggccgccgaacttgacgcccttgtggggtga

SEQ ID NO: 13796 - RNA, 1980 nt, synthetic construct
  source 1..1980: mol_type = other RNA
atggccgggctgtgggaccgcattcgtgccttcttccgttccggccgtggaggagatgctgacgcccagatagaacaggcagtgagagtggccctcgtcaggagagtcagcggtcggtcagtgtttactccgttagagctggcatacgacatcgtaccaagagaggatcgttctgacgaagtgatagaagcaattgcaacagctctggatcggctctacgtacgcgcttactttggacctttcaattatgctcggagcatcgatcccaagtccgcctacagatatgtctatcatcccgccgggacaagagtaccagggacaacccctgataccactagggttagagccgaaccggaaagtgagcccccccctccaccagcaccaacaaggagtacccgcgcctccacagtgtctggcagtacccgagcacctacgagcgtgagctctaggggaggaagcactgcccggggtgcttctacaacaacaagcggtagaggggctccttcttctgccagaggcgcgtatcgcacagccgctgacccctacgctaggcctgagattctgacattgagcgccgaagagttgcgagccagggccgtgaaaatagacccgtacaaaaccgcatggatcggccgcgtggatacgattcccccccagagtgatgaacggactgctatcatcgataggggtctaattcttcgcgggctgttatcagaggcccagattaccgagatccatagagttggcgatctgtggctccgacattccgaagctgcaaggctcgctgccacgactgctgctaagaccgccgaagatgccgtacgccagatgcgagaggaaaaagtgcgtaaaaaggcgcagaaaattaaggaagctgccgaaaagaagagaagatacgctgaaggcgtggcgaaacggagggcgaccgatataatttttctggggcggggcgtttcgtccaaactgggggacagacggagtgatatcgagaagctggacgcgcagggcctgccagttttgtcgacccccaaggacgtcgcagacgcccttcggaccaccatcagcgaactaagatggctggctttccattccgacgcggccgaacgaactcattacgttacttttaccattcctaaaaggtctggagggaccagatcactatccgcaccccacgagaagcttgcaagggcgcaaaagtgggtcctcgagcacgtgctggccaaattaccgaccgagatccctgcgcacggctttatccgcgggcactcaacagtaactaacgccctgccacacgtcaagcgcgacgtggtcgtcaacttggacctgaaggatttcttccctactgtgtcatttgcccgagtaaggggagtcctggagaaggtgggctacagccccgcagtggctaccgttctcggactcctctgcactgagagccctcgacagatcataacgtacgctgacaaaccctatcacgttgcccttggccctagggcattgccccaaggggcctgtacttcccctgccctttcaaatcaagttgcccgccggctcgatcgaaggctgagtggtctgtgcgcaaaaatgggatggacatatacccggtatgcagatgacctgaccctttctgcagacgagggtcaccggggagagctcccagtgttgatcgctaaggtccgtgagattgtggaggacgagggtttcaaaatcaacccaaaaaaggggcgcgtccagcggaaatcagccagacagacggtgacaggagttgtcgtgaatgaccacccaaccgtgccccgcgatgagtataagaggttacgggccatcctgcatagggctaagtttacaggccttgacgcacaaaacaaggaggcgcgcccacacttcgacaagtgggtggaaggcaagattgcttacatttccatggtggatgctactaaaggcgcacggctgaaagccgccttcgacgcaatcccgaagacttga

SEQ ID NO: 13797 - RNA, 1836 nt, synthetic construct
  source 1..1836: mol_type = other RNA
atgtctttctggaaaaaagtcgtggattttttcaccggcgggcccacatccattgagacatccgcagttggcactagcggttcccctctggaagccgccatctggtctgctataaagtccaggatggccaagggcgagtccttcaccccaatcgacgtggtagatgacgcaacttcttcaacacccggacgcaccgtgaagacaattaccgatgggattgctttcgttgacgctttttttgccagaggcctctttgccccgcacgggtacactcggacactgacctcaacgcccagcggacagaactggctgtaccatccggcatcatcggccccgcttgttgcaatgccggcgattgtcgctcaacccgccttgaaggccagcgctcctgccattgatccttatgatgtgggtagtctcctgacacttacccccgcggaactgcgcactcgagcgcttaaaatcgtgccttggaggacagcctggatcgggagaacggatgtgattccccctgagagtgacgaacgtactgctctgatcgatcgcggactggaactccgcggcctcctaacaagggcccagttggtggagatccaccgcgtgggcgacgaatggctgaaacacaaggatgcccctaggttggctcagtctagggccgccaaaaatgcagaagaggcggttgcacagttaagggcagagcgagcacggactaaagaggagaagcgcgcagcttccgaggctcgtaaaaaagctagagctgagcggattgccaggcggaagcgggaagacattgtctatctaggccgcggggtcagtgcacttcttggcgacagacgtgcccatgtagaaaagctgaacgctctgggactaccagtaatggcgtccccagccgatgtggccaccgctttgggagttactatccctgctttacgattcctgtgcttccatgccgaagccgctagacgggcccactacgtgcagtttgatgtgcccaagcgcagtggaggtgtccgcagactgtcagcccctatgccacgtcttgccgctgcacagcaatgggtgctggagcacgtgctggagaagctgcctgttgaaagaccagctcatggcttcgtgccaggtagaagcacggtaactaacgcaagagagcacgtcggcagagacatagtcatcaatctggacctggagtctttttttcccagcattactttccctcgagtgcgggggctgtttgtcggtgtgggctactctccagccgtggccaccatcctcgccttgctctgtactgagagtgcaaggacccgggctgagtatgacggagctaagtacgacgtggctaccgggccaagagccttaccccagggcgcatgcacaagccccgccattagcaatcaaattgccagaaaactcgatcagcgcctcagaggattggcagttgcgcgggggtggacgtacaccaggtatgccgacgacctgacattttcagcgcccgaaggtaagcgaagcgaaatcgcgcggctgatagcacgcatcaggcatgtcgtggaggaagaggggttcaggatccaggtcaaaaagggcagggtacagcgggcagggggtagacaaaccgtaaccggaatagttgtcaatgagacacacaaactcggcgtgccacgcgaagatgtgcggatgctccgagccatcctacacaacgcgaagaaaaccgggctggctgctcagaaccgggatgcaaagccagacttcgaggcctggttgaggggaaagatcgcatatgtgcagatgatagacagggcccgtggagacgctttactgcgagcacttgatgccctctga

SEQ ID NO: 13798 - RNA, 1596 nt, synthetic construct
  source 1..1596: mol_type = other RNA
atggggctgtgggattctgtgaagcggctgtttggcggtggtgatgccgccagcccagatgagggtaaggaggaacgggaggaaagaggtggtggctccgctgctagaggaggggtgtatcgcagtgccccggagagaggagagcctgatgcaatcgacccctatggtaaaagccccgtgatgggatactccgaggatgacgtaagagcacggttcttcgctctgcgccgtggcggaatctctccctttttccaccccgaccttctgccggcacctgatgatgagtttacccagttggttgacaggtcactcgtgctggcagggctcctgactcaagaagaactggaggctattcatagaacaggcctggagtggcggaagcataggcatcgagctgaccacgctcgcatcgtgggaaaagccgcagcaggggaagccgtggaaatcctgaaacaggagcgggccgagaacgcaaaacggaaaaaagccgaagctcgcgcacggcgtgaagcacgaagacaggctatagagcagcgcaaacgggaagatattattcatctgggccgcggcgtctctaatcgactcggcgaccgcagatcccacgtggagaagttgcaggctgcggggcttcctgtgttgtctgggcctgcagacatagccgttgcgctcggaattacaatcggccagctaaggtggctttgttttcacgatgaagccagccgtaccagtcactaccaccaatttacggttccaaaaaggtcaggcggagttcgggtcttagcggctccaatgcctcatctgaagcgtgcccagactttcgtgttcgataacattcttagaaagctggaggtcgaagagcctgcccacgggttcatacggggaaggagcaccgtgacaaatgcgcgacctcatgtcggccaggacgtcgtggtaaatttggacttagagggatactttccaagcgttactttccccagagtacggggcgtgttcgaacacctcgggtattcacccgccgctgctactatcttagccctgctgtgtacagagtgtgagagacggccaatgcgatacgctggccagcgttatcatgtagccatcggagacaggggacttccccagggagcgtgcacttcgccagctctggccaaccaggtcactaagaggctcgacaggagactggccggactctgcagagccttcgggtggcagtacacgcgctacgccgacgacttaacattctccgcaccggccgggaagcgagcagaaattcccaaactattgggcgccgtgaaaaggctgatcaccgaggagggctttacccttaatcctaagaaggggcgcatccaaagaagaggcggctgccaggaagtgaccgggatcgtggtcaacgacaagttaggcctcgcccgcaccgaagttcgaaagttgagggctattctgcacaacgctcgcaagacaggtctggaggcgcaaaatcgggagggtcgcccacactttagggcctggctacaagggaagcttgcctatctggcaatgatagatagggataaaggcaccgccatgctgagggaactcgaggaactccccagttga

SEQ ID NO: 13799 - RNA, 1722 nt, synthetic construct
  source 1..1722: mol_type = other RNA
atgttcgggccacacggctatacccgaactctcctgcaaaccccagcgggcaccaactgggtatatcatcctaagtcttcagcccctgcagctgtggcaccggttccaggagcagctgctgtcgcacccaggcctgcaacagctagtagcgcaggaacagttcgtgggcccctggtccctcaaggatcacggcttcctgcctcagtcacagctcatacggcctctggcggtgcccctgcaaaagatccatatgacctcggagtgtttctgaccctgacgcctgctgaacacagggctaggtccttgaaaatcaacccctatcagacggcctggattggacgtgtcgacgtgatccctccagagtccgacgagcggactgcactcatcgatagaggtctggagctgagagggctgttgactcgccccgagattgttgagatccaccggatcggcgacctttggctaaaacataaagacgcggctaggcttgccgagtctattgcgcacaaaaatgtggaagaactcctcgcgcaggaacggatcgccagacagctggctaagacgaaaaaaaaggaagagtctgccgccaagcggacccgagaagcagaggatgtgcagcggcgcaagcgagaggacatcgtgtacctaggaaggtccggtttagctaggaatgtcagtaaaggcctgtcggatcgtagaagcaacatcgagaagctcgccgccaggggtttacccaggttaagcagcccagccgatgttgcacgtgcactagagctggagattaagaccttgcgctttctggcttttcacgcagacgcccaaagacatgctcactacgtccagttcgaagttcccaaaaagaagggtggcactcgcaccctgtctgccccaaagccgcagcttgcgaaggcccagaagtggatactcgaggaagtgctggagaaactgccggtcgaccccgtcgcccatggttttgtcaaggagcgcagcacagtgactaatgctcggccacacgccggcaaagccatagtgattaatcaggatctggttgacttctttcccacaatcaacttcgccagagtgcgcagcgtgttccaacgggctggatatagtcccgccgttgctaccattttcgcgctgcttacaaccgagtgtccaagaattcaggctacctacgcaggccacacttactacgtagctactggacagcgcggcttgcctcagggagcatgcacctccccggccttgtccaacctggtggctagccgactagatcgccggttaactgggtatacctcaaaacatggctggacatacacacgctacgctgatgatctgaccttttctagcgccgaagaagctgaacccgggtcaccatccggagtggccaagctcctcgccacactccaccatatagcacgcgccgaggggttcactatacatcccgacaaggggaggattcagagaaagagtaaaagacagaccgtaaccgggatcgtggtgaatgaggcacacaagttgggggtacccagggaagacatacggcttgtgcgagccatcttacacaacgccaaaaagactggccttgcggcacaaaatcgggatctgtcccctacatttgaagcctggctgaggggcaagatcgcctacattacaatggtggacagagccagaggcctggcgttcagtgaggaattggagcacctggatctcgggcgatga

SEQ ID NO: 13800 - RNA, 1701 nt, synthetic construct
  source 1..1701: mol_type = other RNA
atgtttggaccccacggctatacccggacactcttgcagacccccgctggcactaattggatttatcaccctaaggcacaggctccaacggccttggcacccgtggtcaaagctgcagcagcggctccggttcctgtagccgctaagggaccccttgttccccaggggtcgaggctgccttcatctgttacaggacacaccgcaagcgctggccccgttaaagacccttatgacctcggagtgtttctgacattgactcctgccgagcatagagccagagcccttaaaatcaacccctaccaaaccgcctggattggacgaacagatgtgattccaccagaaagtgacgaaagaaccgccctgattgaccgcggactggaattaaggggcttcctctctcgggccgagattgttgagatccatcgcgtgggggacctatggctgaggcataaggatgccgcaaggctaactgagtccatcgctcacaaaaatgtcgaggccctcctggcacaagaaagattggctaagcagctggagaaggcacgtaaaaaagatatggccgcagccgccagggccaaacatgcagatgatgtggcccgcagacgccgggaagacatcgtgtacctcgggagatctggtcttgccccgggcctctcgaaaggcttagccgatcggcggtccaatatcgaaaggctcgctagccaggccctaccacgcctctcatcccctgctgatgtggctcgggcactggagatcgacgtgaaaaagctgaggttcctggctttccatgcagacgcgcaaagacacgtccactatgtgcagttcgaagtaccaaaaaagaagggtgggatgcggaccctgtccgctccaaaggccgagttagcaaaggcccagcaatggatactggacaacgtgttggagagactgagcgtcgagaagcaagcccacggcttcgtgaaagggcgcagcaccgtgacaaacgctcagccacatcagggcaaggcgatagtggttaaccaggaccttgtcgatttttttcccagtatcacgctgcgaagagtcagggccgtgttcgagcgtgctgggtactctcctgccgtggctaccatctttgctctactgactactgagtgtccgcgtacacgcgccacttacgctgggcacgaatatcacgtggccgtaggtccacgcggtcttcctcagggagcctgcacaagtcccgctctctccaatctcgtcgccagccggttagaccgaaggctgcagggctatacacaaaaacacgggtggacctacaccaggtacgcagatgacttgactttttcctgcgatcttgaaccggcggctgacagcggcaatgatatcgcaaaactccttgcgacgctccaccatgtcgcccgctctgaaggtttcacggttcaccccgacaagggacgcatccagcggaagtcaaagagacagactgtaaccggcatcgtagtgaatgaagccagtaagctgggcgtgcctcgagaggagattagattggtccgagcgattctgcataacgcaaagaagacagggctggcggctcagaaccgagagttaagcccaaccttcgaggcatggctgcggggaaagatagcctacattgcgatgatagatcggtctaggggtcttgccctgcagaaagaactggattcactggacctgggacgttga

SEQ ID NO: 13801 - RNA, 1647 nt, synthetic construct
  source 1..1647: mol_type = other RNA
atgtttaaaaggttgatcgacaagtttcgccaattggtgagccaccccgattctcccgagcctccgatgcccagccatggtccaagttctgcaccccctcctagggaagcagcccctggagctccacctttaccacgcgctgcccctggcgctgaccctaaaccatctaccttagatcagtactcgcctcccgacattctcggactgtccaaagaagagctgcgcaaaagggccttactcgtcaatccgtacagaactgcctggattggccgggtggacacaatcccgccacgttccgatgagcggacagcgctgattgataggggccttgtcctcagaggattactgaacgaggaacagctggctgagatccaccgcgtgggggatttatggctcacctttcatgatgcagagcgtctagcatcggctgctgccggcaagacggctgatgaggctattgaagaggctcgcaaagcgaagcaggcggcaagagaagagaagcgtcggcaagccgccgaaaggagagctaggagagccgaggaaatagccctttttaggaaaacccacctcgcctttagaggtgagggcgtttccgctggcctcagtgacagtcggagcgagatcgaaaaacttgaagccgcgggattgccagtcctcgcatcacccccagacctggcacgggttctcgacgtgtccgtgagtcgcctacgctggctggctttccactctgaagctgtgacacgaccacactacacgtacttccggatcgcaaagaagagtggtggcactaggttgcttgccgctccccacaaagatctggagaaagcccagcgctggatttttgaaaatatcctggccaagattgctgcagaaaagggcgcccatggcttcgttaaagggagatctactgtgaccaatgctgtgccccacaaggggcgagccatagtcgttaacattgacttgagagacttcttcccttccatcaccttcccccgtgtgcgcggtctgtttcagtccctgggatattctcccgccgtggcaaccgttctggcactgctgtgtaccgagtgccccagagtcgaggccgtgctagatgggaagactttctatgtggcagccggtcagaggggactaccacagggagccgctacctctccggctttgagcaacctggtagcaagaaagctggatcgacggctgagtgggcttgctcggaagaggggcttcatatacactcggtatgccgacgatctcacatttagctgcggcagagataaggactcagagctggggaggttcctggccagcgtgaggcatatcttgacggaggaaggatttactatcaaccccaagaagttcagagtgcaacgatcatccgcccgtcagagggtaacaggcattgtcgtgaatcggaaactgtccgtaccacgcgaggaggttcggcgaatcagggccattctccatcaggcgaagtcagcagggctcgcagcccagaaccgagaaaatctgcctaacttcgaatcatggctggaggggaaaatcgcctatataagcatggtcgaccgagccagaggagcggtccttaaggccgagcttgaccgggtacaacggcagcgcccagcggaagacagctcaagcacagcatga

SEQ ID NO: 13802 - RNA, 1677 nt, synthetic construct
  source 1..1677: mol_type = other RNA
atgggcctctggtcgtggcttgggaaagtctttaggagggttcgcgcatggctagcttacaatcctgaattgcctcctccgccccctgaggcgccaaaagtcgatgaactgcctcctccagccggtggaagtggaggagccggtgttggatatggcacagccaccgctaaaacctggactaccgctaaggcaaaagcacaacagaaaaaacccccacccaaacccaagaaagctgtggacccctgggatactggagaattactgactctgtctcccgaagagctcagggctagagccatgcacatccagccctggaagacacagtggattgggcgggtggatgttatccctccggagtctgatgagcgcactgccttggttgatcggggcctggtcttgcgcggcttcttcaccgaggccgagttagccgagatacacgccattggcgatgcgtggttggaacataaggatgctgcccgattggcaagggcacgtgcagcgaaggatgtggacgccgctcttgcgcaactacgggccgaggaacgcgaacggaaagccaggaagaagcgggaggccgcagaaagacgggagaggagagctcgggagatagctgaaaggaggcgtaccgatattgtgtttctaggacgaggcgtgtcccattcactcgcggacaggcgggcccatgtcgagaaactggaagctcgcgggctgccggttcttgccactccaaaagacgtggccgatgcacttggattacctatcccgcgcctcagattccttgcgcaccacgatgaggcactgcagagggcccactacgtccagttcgaggtgcccaagcgaacgggagggatgcgtacactggctgccccaaagcctgacctcgctaaggcacagacctggatcctcgagcacgtactggccaaagtacccgtgcatgacgctgcccacggctttgtgcccggtaggtccacagcaacatgtgcccgcccccatcgtggtagagctgctgttgtgaacctggacttgaaggactttttccctagtattaccttcccgcgcgtaaggggggtcttcgcagagctgggctatagcccagccgcagccacaatcttagccctgctctgcacggaatgtccacgccgagaagtgcgcttcgcaggggtgacctaccacgttgctgtgggggaaagaggcctgcctcaaggggcctgcacatccccagccctcagcaacctcgtggctagacggttggacgcccgacttgcaggtctggccgagaaaagaggatttgcttatacccggtatgctgatgacctgagcttttcaacgggcgaccccaaagccgtagcgccactgttggccatcgtgcgcaagatagtccgcgaggaaggctttagagaaaacgggaagaagacaagggtgcagcgggcagcaggaagacagactgtgaccggcctcgttgtgaatgagccagaccgtctcggtctgcctcgagaggaggtcagaagactgcgagctattctgcacaacgctaagaagactggtcttgcggcacagaatcggggcggccatccagactttgaagcccatctacgggggaagatcgcgtacctggcaatggtcgacgcccccaaggctgccaggttcagagctgagctggacgccctgaccggatga

SEQ ID NO: 13803 - RNA, 1731 nt, synthetic construct
  source 1..1731: mol_type = other RNA
atgctggcgagagccaaggcgagaagccatttttccgcgatcaatatcgatgttgtggtggcgagagctctgagcgccggcgaaagagcggagatcgctccctgggttgagcagctgttccgaaggggcgtactgcagggacacgcctacacccgcactctggtgagagcaggcgatcgggtgatctggatttaccatccacaggaccaagctcccgagccagtgtctcccggcagtccagctccttcagctgcggcagcttcccatgctgctcccaggccagctgcacatgcagccggaccactgctggatgcaggttctctgtggaaactatcccctgacgaactgcgtgctcgcgcccttgacgtcaagccgtacctgactgcttggatcggccgcgtggatgttattccgcctgcatcagacgagcggacagccttgatcgaccgcgggttggtacttcgaggccttctgacagaggcccagatcctcgaaatccatagggtcggagatttgtggctcgaacacagcgatgctgcccgcctcgcgcagttaagagcctacaaaaaggccgacgacgctatcctcgctttaagggctcgggatgctgagttgaaagccgagaagcgaaagttggccgccgaaagggctcagcgtaggagggaagagatcgcccgtaggaagaatgaggatattgtgttcctagggcggggggttagtgaacggctgcacgataggcgggccgatgtcgagaagctggagaggctcggactgcccgtgttagcaacaccagcagacctggccaaggcattaggcctgagagcacccgaacttaggttcctcgccttccacgcagaagccaccgaacgccctcactatgtacagtttgacgtgccaaagagatcagggggaactcgacggttgtctgcaccactcccgaaactcgccgctgctcagagatggatactagacaatgttctctgtaaggtcgcccctcatgacgccgcccatgggtttgtaccaggccggagcaccctgacgaacgcaagacctcacctgaaaaagggggtcgtcgtgaacctagatctacaagactttttcccgtctattacgtttcctcgggtgagaggagtgttcgcctctcttgggtactcgcccgctgtcgctactattctcgctctgcttacaaccgagcctccccgcagagcagtgagatatgccgagcgcacactccacgtcgcagttggttccagaggccttccccagggtgcgtgcactagtcctgccataagcaacctcgcctgcaggaaacttgaccgccgactctccggtctggccgcaaagcacgggctgacatatacgcggtatgccgacgacctgaccctgtccggaccaaaggatacccacgttgcccgcttgttggcgagcttacgccacttgattgagagtgagtcatttagggtgaacgacaagaaaggtcgagtccagcgtgccggtggacagcagactgtgaccggcgtagtggtgaacgacaagccctctgtcccccgatcagagaggaaacggctgcgcgccattcttcaccaagcaaaaaaaacaggcctggaaaaacaaaatcgggccggcgtgccttccttcgaggctcatctgcggggaaagatagcatacgtgagcatgatagatgggacccgtggcgcagaactcgccaaagccctggatgcactggattga

SEQ ID NO: 13804 - RNA, 1635 nt, synthetic construct
  source 1..1635: mol_type = other RNA
atggatgccctgcatgagagaggggttcccggtgcctacgacttcgagagaacccttctctcagtcgcaggaaggagtgtgtggatctaccatcccattggtgcgtctccaaatcaaccctccacaccacctcctccggtagcaactcccgctagcccgaccaggaccaaggccaagcagaaaggcaaggagaaagctttgcctgacccctacgctgccgggcctctcatgacccttacagcagcagaactgcgggcccgggcattgaccatagagccatggagaactgcttggattggacgagtggatgtcatcccacctcagtccgacgagcgtactgccctcgtagataggggattggtcctgcgaggctttttcacggaggaagaaatcgccgagatccacagggtaggggatctgtggctggaacacaaagacgcaacacgcctagccaaagcccgagctcagaaatcagccgatgacgccatccaagccctgagggaggaggctaagcgggaacgggctcggaagaaagccgaagctgctgagaaaaagaagcaaagggctgctgaggtcgcacggagaaaggccgaggacattattttcttaggacggggggtgtcagggaggctgaatgatagaagagccaacgtggagaagctggctgaagctggcctgcctgtcttggccactcccgcagatgtcgccaaggcactcggactcaccgttccacgcctacggtggctggccttccacgcagaagccagtgaacaggggcattatgtgcaattcgaggtgcccaaacggagcggaggtaccaggcgtctgtcctcacctaagaaggctctccgcgccgctcagacgtgggttctgaacaatgtgctggccagatgtggcactgaagatgcggcccatggctttgtgcctggtcgatctaccgtgacgaatgcacgaccacacgttgggcgccgcgtagtggttaaccttgaccttgaagacttcttcggcacaatcacctttccacgcgtccgtgggctgtttgtgtccctcggatactctccggccgcggcaacagtcttagcgcttctgacaacggaagcaccccgacgcgaggtgcggtatgatggcaaaccttaccgcgtggcggtaggcccaagagccttacctcagggtgcgtgcaccagccccgctctatcgaacctggtggcccgcaagcttgacaggcgcctgactggcttggcaaagaaacacggatggacttataccaggtatgctgacgatctgacatttagcagagacgatgacacacaggtcggggccctcatcgctactgtacgtcacgtcgtgaccgaagagggctttcggataaacgagaagaagggcagagttcagaagtctggaggccagcagaccgtgacaggggtggttgtgaatgacaaattaagcgtgccccgggcagaaattcgccgactgagggccatactccacaacgcgaaaaaaacaggcctgagtgcccagaatacttccggtcatccgcacttcgaggctcatgttcgtggaatgattgcgtacgtcagaatggtggatccagagaggggcgccaagttggcagcacagctcgctgccgtgagatga

SEQ ID NO: 13805 - RNA, 1671 nt, synthetic construct
  source 1..1671: mol_type = other RNA
atggagattgccccatacgtagacggctgggtggaagctggactactggataaacacggatatacgggaactgaacagatagtggcaggccgcgcggtgtggatttatcatagagtgggacaacctgtcgctggggtcaccccctcaaccagggtcaatgcaccagcccccactgcccctaaagctgctccgcagaaggccaagaagaaagagaaaaaaaagcgcaagtggttcgatccctgggacgccggtgacctgatgagcttgaccgccgcagaactgagagcacgcgccatgaaaatcgtgccatggagaaccgcctggattggccgggtcgatgtaatccccccgcagtccgacgaaagaacagcccttgtagacaggggtctgatactcagggggtttttcactgaggaacagattgaggaaattcaccgtattggcgatctctggcttaaacataaggatgccgcgaaactggcaagagcagccgctgctaagtctgccgatgctgccatcctacagctgagagaagaggcgaaacagaagaaggcccgactgaaggaggaagcgaaggcaagggccgagaaacagagggccgacgtagcccacagaaaggccaccgacatcgtgtacctgggtaggggcgtcagtggccagcttcacgatcggcggtcgaacatagaaaggctggagtcacagggtcttccactgttggctgctcccgcggacgttgctgacgctctgggagtgaccgtgagcagacttcggtggctggcgtttcacgatgaagctgccccagccggtcactattctttctttgagatccccaagcggtcaggtggcacacgcctcttgtctgcccctaaggcagagctgcgtgccgctcagtcttggattcacgagaatatcctgaaaaaagtggccctcgaggcccctgcccatggattcgttcctggccggagcacggtgacaaacgccgcaccacatgtggggcgcgatgtcgtcgtgaacttagacctggaagacttctttccaaccataacgtttgcacgtgtccgtgggctgttcacaagtctgggctacagtcctgcggtggcaacagttctcgctctcttgaccactgaggctccccgaagaagattgacttacgctgggcgcccctactttgtcgctgtgggaagacgaggactgccgcaaggcgcgtgtaccagccctgctctgtccaatttagtggcccggaagctcgatcgcagaatggcagggttagcgaagaagctcgggtggacttacacacgttatgcagacgacttaaccttctccgcccccgcaggacaacgcgatactgtcgggaggctctttgcacatgtacggcacatcgttcaggacgagggattcagggttaacgaaaagaaggggcgagttcagaggaagggcggtcgccaaacagtgaccggcgtggtggttaatgagcgactagctgttccacgggaggaagtccgccgacttcgggctatcctgaacaatgcaaaaaaaacaggcctggcagctcagaacagggacgaccatcctcacttcgaggcctggcttcggggcaaaatcgcctatgtgagcatggtggatccagataggggggccaagctcgcagcccaattggctgagttgtcctga

SEQ ID NO: 13806 - RNA, 1623 nt, synthetic construct
  source 1..1623: mol_type = other RNA
atgggcttttgggataaggtcaagcggttcttcgggggaggtggtgccttgcaacccgatccttccgcaccgacagccgctcctccatcaacgcctacaccatcaacaccggctcctgccccagcacatacagcgccagctccaccagccgctaggactgctccagcacccactagtacagatgatagtgctcgctttcggaacccagccatactgggcttgagcgccgccgaactgcggaaacgagcactgcggataaacccgtaccagaccccctggatagggagggtggacactatccctccccagtctgatgagcggaccgcgattatcgacagggggctgatcctgagaggcctgctcactgccgcccagatcgaagagattcatagggttggggacctctggctggcccaccatgatgcaatgagactggctgctgcagcaggggctgctagcggtgaagcagcagtggccgcagaaagagctcgacgtgctgaggccaagcgggccaaacaagctgctgcagcagcccgagctgccgctagagcagctgctgtcgcggctagaagggccaccgacattattttcgtgggaaggggagtgtccgccggtcttgccgatagacgaagccacgtggagcaactcgcggcggctggattgcccgtgttagctgcacctgcagacctagccgccgcccttggactgacagtccccagactccgctggctgtgtttccatgccgacgcccccgctaagacccactatacatattttacgatccccaagaggtccggagggacacgcaagttggccgcaccacacagacaacttgcggccgcgcagagatggattttcgatcagattttagccaaactgcctatcacagacgcagctcacgggttcgtgccaggtcgctctactgtgaccaacgctcggcctcacgtaggccagcgcatagtcatcaacctggaccttgctgattttttcccttcaattacctttccccgggtacgcggtctgttcgctagcctgggatattcgcccgccatcgccaccctacttgccatgttgaccactgaagccccacgcgttgaggttgagttcgccggcaggactcattacgtcgcaaccggacccagagccttaccgcagggagcctgcacatcccctacccttgccaatctcgtggcccgaaaactggacaggcggttggggggagccactcgtaagctgggctggacctatactaggtacgccgacgatctgaccttctctgcgcccgctgcagggtctgcacaagtggctttaatttttgccagagtgcgcgcgatcgtaacggccgagggctttgctgtgaatgaggcgaaaggtcgcgtgcaaaggggagggcgtcacacagtcacgggactggtcgtaaatgacaggctcgccgttcctagagaacaggttcgtcgagtgcgtgcgatcctccacggcgcacgaaccactggcctagcagcccagaatcgggccggtcaccccgattttcgcgcatggctccagggcaccatcgcgtacattcatatggttgaccctgcccggggcgcagcatttcaagctcagctggacgccctcagttga

SEQ ID NO: 13807 - RNA, 1404 nt, synthetic construct
  source 1..1404: mol_type = other RNA
atggaggaacttagagcaagagcggccaaagtaaggccctggcttagcccttgggggtggcgtatggacattatccctccagccagcgacgagcgaacttcactcattgaccggggtctggtcctgaatggctattttactgaggcccagatccaggagttccatcggatcggagatctgtggctcgaacacaaggatactgcaaggaccattgccgcacgggcactagagacagctaaggctgatctcgaagagctgaagaggaaaaaactggaagaaaaggccgccaaaaaagtggcggccgaagaacgccggaaagcacaccgcgcggctattgagaagcggcgactggaagacattgtgttcctcggccggggtgttagcggcaagctagccgaccggagatctgatgtcgaagctctccagcgggccggcttaccagttctcagctccccagctgatgttgcaaaggctctggagattacaattcccaccctgaggtggctggcattccatacggaggccgccggagcaatccattacagacagttcgaggtccctaagaagaccggaggggtgcgactgttgagtgcccccagaccaaagctcgctgccgcacagcggtggatactggagtcggtgttggccaagatagctccagaggcagacgctcacggtttcgttgacggcagatcaaccgtgtccaacgcgaagccccacgtggggagagatgtggtggtaaacgtggacctgaaagactttttcccgtcaatccactttcctagggttcgcggttttttcgaaaccttggggtactcccctgccgtggctacagttttcgccctgttgactaccgaggcccctagaaggcgcgtcgaatatgctggcaagccatactgggtcgctgcaggccctaggggtttaccccaaggcgcatgcacctctccagccatcagcaacttggtgagtcgcaggctggacaaacggctgtcctcaatgggcaagaagcacggggctacgtacacacgatatgccgatgatctcacacttagtcttgaccccggacgcagggagcagataggaatgcttctcgcacgtattaggcatatagctgaggatgaggggtttcgggtgcatcccaagaaagtggccatccaacgctctggagggagacagatggtcactggaatcgtggtcaataggggcctttctgtcccgagggaggaagtgcgaaagatccgtgccgtattacacgccgccaaacgctccggcttagcggcacagaatcgagaagggcatgctgattttcgcgcccacctgagaggaaaaatcggctatgtaatgatggtggacagacaaaaaggggaacgtctgttgcgcgagctggaggctctagcgccctga

SEQ ID NO: 13808 - RNA, 1980 nt, synthetic construct
  source 1..1980: mol_type = other RNA
atgggcttttgggacaaggtaaaatctttttttggaggcgcttccccacctggcggaggtgatggaggtgatgggggcaatggcgactcagatgaagcaccacctttatttaacgagaggggtctgcctaccgatgcttttactcagttcgttgaaagacgcgtccgggtgcgggcgaagaaagaacatctcttcacccgccacgacattgcaagaattgtggtgaagaagctggagtctccccctagtgctgcggagacatttgccgctaacgccgtgctcaaattgaagaaggccgggctcttcgaggaattggggtacgagtgcagttacagttccaccgtgaggggggaggtcttccatcctgaagggacagaccctgacgagtaccccggtgcaggaggaggaccacctagtggcgttagacgggtgcaaccccagccagttgcacccgttgcccctgctgcaccacctccaccaagacccgcaacaccagcagccgctgcaccagctagagcacccactaccccctataggtccaacccgttcgatgccggccagagcctaggaatgtccgctgacgagcttcggcggagggcaatgaaaatcgtgccgtggcgcactccttggataggacgggtcgacgtgattccgccagcctcagatgagcgaaccgcgctcatcgatagaggcctggtgctccgtggctatttcaccgaggagcagattgccgaattccatcgaataggtgacttatggctggaacacaaagatgccgcttcatttgtagctgcacgtgggaaggagcaggctaaactggacctggaagctctcaaacaaaagaagcttcaggagaaagctgagaaaaagcgagcagcagccgaaaggagagaaaggctacgcgaggccattgccaaacgaagggccgaagatatcgtgttcttgggacgcgggtttagcgggaagctggccgacaggagaagcgacgtcgaagccctagaaagggcgggtttgcccgtcctgtcgacacctgccgatgtggcacgtgcgatggaactgtctatcccgaccctccggtggctggcctttcactcagacgcagctgagacaatccactatcggcagttcgaggtgcccaaaaagactggaggcgttcgcttgctgtctagccccctccccaaacttgctcaggcccaacagtggattcttgagaacgtgctcgccaagatccccacaggaggggacgcccacggatttgtccctgggagaagcacagtttccaatgccaagccccacgtcggcagggatgtggtggtcaatgttgacctgcgggatttctttccctctatccatttcccacgggtgcgggggctattcgaatcacttgggtactctccagctgtagcaagcatcctggccctcttgaccacggaggctcccaggaggagagtcgtctacgcgcaaaagccatactgggtggctgctggccctcgaggtttgcctcagggagcgtgtaccagcccagccgtcagcaatctggttgcacgaaagctggatacgcggttggccgccatgtcggctaagcatggggctcgctatacacggtatgccgatgacctgaccctgagtctggaacccggccgtcgagatcagatcggcatgctgctcgcccgtattcggcatatagccgaagacgagggcttcactgtgcaccctgacaaagtgtttgtgcagagggctggcggccgccagttagttactggcatagtagtaaataggggcctttccgtcccgcgcgaggaactcagacgactgagagcggtgctgcacgccgcgaagaaaacgggactggaggcccaaaacagagacggtctgcctgacttccgcgcccaccttagaggtaagatcggctacgtaatgatggtggatcgcgagaaagggtcccagcttctgcgcgccttagaggcaactccaccctga

SEQ ID NO: 13809 - RNA, 1410 nt, synthetic construct
  source 1..1410: mol_type = other RNA
atgtctgctgaagagctcaggaagagagccatgaaaatcgttccctggcgcactccttggattggacgtgtggacgtgatccctccagcctctgatgagaggacttctctgatagatcgaggcctggttctgtccggttacttcacagaagaacagatcgcggagtttcatcgcattggggatctgtggctggaacacaaagatgccgcaactttcgctgcacagagagcccgggcccaagccaagctggatctggacgccctcaagaggcaaaaactggaggagaaggccgccaaaaagcaggctgctgcagcaaggagggccgctttacgagacgcaatcgcaaaaagacgggccgaggacattgtcttcctgggccggggatttagcgggaaactgggtgatcgaagatccgacgtggaggctctcgaaagagcggggctgccagtgctcagtacaccagcggacgtcgcacgtgcgttaggcgttcccatccccacattgagatggcttgcttttcacagtgaggccgcacagactatacactaccgtcagtttgaagtgcccaagaagaccgggggcgtgaggttactctcagccccaaggcctaaactagccgcggcccagagattcatcttggagtcgatcctggaaaaaattagccccggccccgatgcccatggctttgtctcagaacgcagcacagtcacaaacgctcgccctcacgtagggcgcgatgtcgtggttaacgtggacctgcgggacttcttcccgagcatacatttcccgagggtgaggggcctttttgagcagcttggctattcccctgcagcagccaccgtactcgcgctgttgaccaccgaagctcctaggcggagagtcacctacgctggagtggctcattgggtggccacaggcccaaggggtcttcctcagggagcctgcacgagcccagcaatctcaaatttggtcgctcgcaggttggacaagcggctgggagcaatggctacgaaacacggtggcgtgtatactagatatgccgatgatctgactattagtctcgagtctggccgcagagagcaaattggaatgctcctagcacgtgtacgacacatagctgaggatgagggctttaccgttcacccaaagaaagtggccgtacagcgggctgggggacgacaaaccgtcacaggaatcgtggtgaatcgggggctgtccgttccccgagaggaaattcggagactacgcgctgtgctccatgccgctaagaagaccggactggccgcccagaacagagacgacttgccggacttccgcgcacaccttcgggggaagattgcgtacgtcgcaatgatcgatcgggacaagggtgcccgccttttacaggccctggaacagacgcccccttga

SEQ ID NO: 13810 - RNA, 1653 nt, synthetic construct
  source 1..1653: mol_type = other RNA
atgctcagggtagccggattttgggactggctcaaaaaagcattttccgaccccgaagctccacctggcccgtctagctctgggtccactccaacaccaccaagtccagctcccagtggagcagcgcccgcaagtgctacttctacacccacatcgtccccgggcaagtcaaacgataaatcagctacgaaagggcgcaattacgatgctaaccctgaaattctgggactctctgaggccgagctgcgaaagcgagccttacgcataactccctggcgaaccgcctggattggacgggttgacacgatccctccccagagcgacgagcgcactgccattatagatcgtggcctgattcttacagggagactcacagaagcagaggtggccgagatccatgaggtgggcgatctctggctgaagtaccatgggagggtggagttggctaggagcgaggcaaaaaaggcgtcccaacgcgccgccgatcaaatcgccgcagacagggaggcactgaagaagcagaagaaagaggaggctgccgcacgtaagaaagccagagctgaagccatcctggaccggaaacagaatgacatcgtgtacctgggtaggagtgtaagcgctagaatgaacgacaggcgcgccaacgtggaaaaattacaccagctgggacttcccgtgttggccacacctaaggatgtggcgcagttgctggagatttccgtccctaagcttagatggctcagctttcacgcagtagccaccgaacgaccccactacatttcatttcacgtgaagaagcggagcggagggttgcgcctactaagcgctccgcataaagagctgaaaaaggcccagaagcggatcgccacacagatcttggataaggtggatcctggcccagtcgctcacggtttcattaaggctcggtcaacagtgactaacgccacccctcatgttggtcaggacgtggtcctcaatctcgacctctctgatttctttcctagcgtcacattcccccgggttcgcggcctgttccagtcctttggctattcacccgcggttgccaccgtccttgccctgttagcaactgaaagtcctcgccgaactgttaagtacgacaacagaacctatcatgtggctgtgggtgagcgtgcccttccgcaaggagcacccacgtcgccagctatagcgaatctggtagctcgaaagctggatagacggctcagtgggttggcgagaagcgccggatggtcttatactagatacgcagacgatttgaccctgtctacccggggcgaagctcgcaagaagaccccctggatgtatcggcaagtccgcgaaataatctcctcagagggcttcgtcgtgcaccctaagaaaggcaggttacagaggaaagggggctgtcagaccgtgaccggtgtggtcgtgaatcataaactgggcctgccaagacgggaagttagaaggctgagagcgatccttcacggtgctaaaaagtccgggctagcatcccagaatagggaaggaagggccgacttcccagcataccttaggggaaagctggcatatcttgccatggtcgaccctcaaaaaggcaaaaaaatgctcgccgaactggataccctggaggggcgtcaccggccagagtga

SEQ ID NO: 13811 - RNA, 1644 nt, synthetic construct
  source 1..1644: mol_type = other RNA
atggctggtttctgggatcgcctgaagcagctattcggtgacggaccgagtccaaaaggctctgaccctgatgctgggccaccttcatcatctaggagcccatctagggatggggacccagtgcctccagcctcgagcaaggcaggtgcccagagccctgaaaagggtcagaagagtcccgcaagatcctatgacgcaaaccctgagattttagggctgagcgaaagcgacctgcggaagagagccctgcggatcacaccgtggagaactgcctggatcgggcgggtcgacacaattccccctcaaagtgacgaacggacggccatcattgatcgaggtctgatccttaccggcaggttgtccgaggcggagatagccgagattcatgaggtcggcgatctctggctcaagcaccatggaaaagccgacttggccagggccgaggcaaaaaaagccagctccgcggccatcgctgagctgcatgctgaacgcgaggccaagcgcaagcagaagaaagaagaagccgcggaacgcagaagactgagggccgacggcattgccgaacgaaggcgaactgatatcatcttcgcagggagatctgtgtccagccgactggccgatcggagggctaacgtcgaaaaattagtggcactgggcctgcccgttctggcaactcccagggatgtagcagagctgctgggaatttccgtttccaagctgcggtggctcgcctttcacgctgaggcaactgagcgcccccactacgtgacatttcacgtcaagaagagatctggcggattgcggctcctttctgccccacataaagagctcaaacgggcgcagaagaagattgccacgcagatccttgatcgccttgatgtgggccccgctgctcatggcttcgtgaaagggcggagtacagtgtccaatgcaaaaatacacctggggcaggatgtggtcctgaacctagacctttcagacttttttccaacaatctcctttccaagagtaaggggcctatttcaatcgtttggatattctccggccgcagcaacccttctcgcactggttgcgacagaggcacccagacgagtgataaaatacgaagggagagcctaccacgtcgctaccggtccccgagctctacctcaaggtgcgcctacctcacccgctctggccaatctcgccgctcgcaagttagacagacgcttgctcggcctggctaaatcagctggatgggtatactcacgttacgctgacgacctcaccttcagcactaagggggagccccgcaagaaaactccatgggttttcaggcaaatttccgagattgtgagtagcgaaggattcgtggtgcacccccgtaagcggcgtgttcagcataaggggggaaggcagaccgtgaccggagtcgtggtaaacgagaaactcgggttgcctcgggatgaagtgagacgtcttcgcgcaatactccacggagcgaaaaagaatggcttggcttctcagaatcgtgacggccggagtgacttcccagcctatctgcgaggcaagttggcttatctggccatgatcgatcccggcaggggcaagaaaatgttacgcgaactggatgttatcgagggaaggaaacctgccccgacctga

SEQ ID NO: 13812 - RNA, 918 nt, synthetic construct
  source 1..918: mol_type = other RNA
atggcattccacgccgaggcagctacacgaacacattatgtccgatttaccgtaaagaaacggagtggaggcgagagacagttagccgcgccgcaccagaagcttaaggccgtgcagaggcaaatcctgcagaaaatcctggagcgtttagacccagggccctatgcccacgggttcgtcaaacagcggtcaaccgtgacaaacgcccaggcacacttggcacggcatgacctgataaacctggatatctccgacttcttcccaactatccattggcggagggttcggggattatttaagtcatttggctacagccccgctgttgccacaattctagctctgctcgtgacggaggctcccagaaccctcgccgagtacgatggcaagaaatattgggtggccattggtgaacgcgtcctgcctcagggtgcaccgactagccctgcaatctctaatctggtcagtcggaggttggacctccgcctagccggtttggccaaaaagagagggtggcgctacactcgctacgctgatgatctcacttttagcgctggcgaaaaaaagcgcccagacatcccatggatgatgcgacaagctaaggaaatactggccgctgagggctttgttctccaccccaataaacagagggtacaaaggaagggacgtagacagaccgtgacgggcattgtggtgaatcaaaagctttctgttcccagagaagaggtcaggaagctgagggccattcttcacggggcacagaagaccggacttgccgcccagaacagagagaacctgcctcatttccctgcatggctgcgtggcaagttggcgtatctctccatggtggacccagcgaaaggaaaaaaaatgctggcgcagctggatgctctcgaagggagacgccccacccctgtgtga

SEQ ID NO: 13813 - RNA, 1638 nt, synthetic construct
  source 1..1638: mol_type = other RNA
atgtggttgtatcatcccgagggagtggaccctcgcggaactggtaaagccccagccgctgttttaccaccgagcccaaaggctgcttccacaactgggacagctggatcgaccacctctgctacaacggcatccaataacagttctagcactgggggttggaagccacctgccgaacgagctaatgacggcgaccccttcgacactgccggaacactgacgctgactcccgagcagctgcacgaacgggccaaaaagatcgttccctggcgcaccgcttggattggccgtgtggatgtgatccctcccgccagcgatgagagaactgcacttatagatcggggcctggtgcttcgcggcttactgacccaggaggatatcgacgagatccatcggattggagatttgtggctcctacacaaggacgccgatagaatggcctcaacacttgcccacaaatcagccgaagcagccattcaggcaaggcggcgggaaagggcagaaaggaaggcacaaaagaaggccgaggctgccaaaaagaaagctgcccgcgatgctgctgttgcggaaagacgggctacagacctcttctttctaggagaaggcgtcagttcccagctgcacgacaggcgcaccgagatagagcgattagagacactggggttgcctatcttggcaactcccgcagatgttgcggcgcatctcggggtggaagttccacgcctgaggtttctggcattccatcaagaggcagcccagactactcactatgtgcagttcgaggtacctaagagatcagggggcacccgtacattagcagcccctaaaccaggcatcgccgcagcacaagagaggattctggagacgatcttagccaaactcccactggatgaggctgcacatgggtttgtcaccggacgaagtactgtaacaaatgcaaggcctcaccagggcagggaccttgtgataaacctagacctgaaagactttttcccgtctgtgacatttccacgggtacgtgggctcttccggagtttcggctatagccccgcggtcgccaccatattggcccttctctgcacggaatccccgcgcagagagctatcttacgacggacgatcctaccaggtggccgtgggtgccagagctcttcctcaaggcgcctgtacttcacccgccattagcaacctcgtcgcgagaaagctcgatagacgactgaggggactggccgccaaacacgggcttgcctataccagatacgcagatgatctcaccttcagcgcggatgccgacaagcgaggcgaactgggtatgaccttggctcgcctgaggcacgtgatcgaggacgagggatttgctctgaatcccaagaaggtcagagtgcagcgcaagggtggtcgccagaccgtcacagggattgtagtcaacgagcctaccaaactggggctgccccgtgaagaagtgagacggctgagggcaatcctccatgccgccaaaacaacgggtctgcaggctcagaacagagcgggccatccggactttcgggcgcacttggccggcaagattgcctacctcgcgatgatcgacccagctcgggctcgtaccctgagggaagctctggcagcttgcaccggctga

SEQ ID NO: 13814 - RNA, 1191 nt, synthetic construct
  source 1..1191: mol_type = other RNA
cccagcgacaatcccccatctgaacggggactgaaagctgaacagcgtgaagccgcccggcgcaaagaagccagagaagaagcacagcgtgaggcaaggctagcccgtgtggaagccaggcgagagagggaagctgccctcagacaaagactcgcacgcgaggtcttgtatgccggtgagggcgtatctgcgacagtcgcccacgctgcttcagatgtggcacggctggaagccggaggcctaccagttgctcactccgcccttgacctggcccaccttttggggctggacttgcctgcgctcaggtggctgacattccatcgcgaggtggccagaagcacccactacagacagtaccaggtggcaaagaggcgaggagggttcaggaccatttcggccccgaggcctaagctaaaggcggccttacgtgctgtgcgggagcggatactggggaggctggctgtgtctcctcaggcacaggcttttgttccaggacgctccactctgactaacgctcgccctcaccttagggccgctgtggtcgtgaaactcgacgtcgtggacttctttggctccttttccttccctagagttcgcggctggtttcgagctagaggctacagtgggatggtcagtaccctgctcgccctgcttacaactgaggcacccagggtggaagtggagctggacggggctcgatattacgtagcgacagggccacgcgttttaccccaaggtgcgcccacttcaccggagctgacgaacctgctcgcattgcggcttgacagacgcctcgccgcctatggtgccaagcatggatggacgtatacacggtacgcagatgatctaacatttagccgagcggatgaaccagagggttgtgtgagccggctgttgggcaccgcagaggctatccttcgggacgaaggcttgcgactcaaccacgataagcagtgcgtgacccggcgaggacgtcagcaaagggtcaccggcatcgtcgttaatgaggtggcaggcctgcctagaagagatctccggaccttccgggctgccgtgcatagagttactagagacggattcaaggatgtgcatgagcgccagcgcatgctgggctatgccagttacgtacgcatggtaaaacccgccttaggggagagatggctggaggcactgagggaggtcaggtcatga

SEQ ID NO: 13815 - RNA, 1185 nt, synthetic construct
  source 1..1185: mol_type = other RNA
atgaccgaaggccctcggaagtcggttagggttgaggccgaagaggccgcaaggagggctgaagccagagaggaagcaaggagggctgcaaggttggcccgtgcagctgcagtcagagctcggagagccacgcatgcagctcgcctcacgcgagaggttctgcacgccggtgaaggggtgagtgctaggcttccagccgcgaggagcgatgctgcagctctcgagcggagaggactgcccgtaatgcacgacgccgccgatctggctacactgcttggcatggacatgcgggctctgcggtggctaacctatcaccgcgacgtcgcaactgtgacacactacaggcaattccaagtgcccaaagccaaaggcggtgtgcgcaccattagcgcaccaagaccggccttaagagcggctcagcaggcaatacgacagcacgtgctggcacgcctggaacccactgttcacgcacaggccttcgtgcgggggcgatctactctgaccaacgcccggcctcatttgcgtgctgccgtgctggtcaaagccgatatccgggactttttcggggcaattgactttccccgggtgagaggtctatttgaggctctggggtattctgggatggtggccaccctccttggcctgctcaccacagaggcgaggcgtgtcgaggccgacttggatgggcagccagcttgggtggctgtcggaccacgagctctgcctcagggagctcctacatccccagagctgactaatcaaatcgcgagacgcttagatgcgcgcctcgctggatacgcccgcagacatggttgggtgtacaccagatatgctgacgatctggccttttcatcccaggatggagcccgagagagggtgggtcgactgctaggggtcgtgagggcagcgcttgagggcgaaggcttccaactgaacccggataagctcgtagtcgtaagaagaggacgccagcagcgcgtcacaggcgttgttacaaatgacgtggccggcctccccagagccactttaaggcggttccgggccgcggtgcatagagttacccgtgcaggatttgccgaccccgcagaacgcgcccgtatgttgggctacgccagttatgtcaagatggtaaagcctgcccttggcgagaggtggttgcgagcgctccgcgaagtgcctgcctga

SEQ ID NO: 13816 - RNA, 1287 nt, synthetic construct
  source 1..1287: mol_type = other RNA
atgtcttggttcgcatctacactagcgtggtttaagcgttggactagagcaaagccagtcactcgggacgtgtcaggactggacgcgccaactggccgggatggaagaccccttgatgtggttagcgaaactgtacgcctaagtgggccgctgaagcccggacatctgaggcagattaagcgggaccccagactcctgcctaaaggcaaacgagtgtatgcacgaaatctgaagcggtggatgggtgccggagaagcaagacgcttcttcagtaggtcaatgctgacccgggataggtccgtgcgggatctcttaccggatgaagcccagttggctcgttacggcttgcctgtctggcgaaccgaggaggatgttgccgctgccttgggcgttactgtgggcaggttgcggcattatgcaagccaccgaccacgagagcgagtgcgccactatgtgacattcacagtgccgaagcgctctgggggcgttagatgggtgcacgcccccaagcgcagactgaaaaccctgcagcggcgtcttctcatgctcctggtcgctaaactccccgtgtccgcccatgctcacgggtttgtgaccgggagaagtgtgcggacaggtgccgctccacacgttggaagacgcgtcgttctcaagctggacctgaaagacttcttcccaagcgtgaccctacctagagtccgtggcctgctcttggctttgggctatgggtaccccgtcgccgccacactggcattgctgatgaccgaggccgagagacagcccgtagaagtggacggtaccgtgtttcacgttcctgtaagcgcgcgtgtctgtgtccagggggcacctactagcccaggggtgtgcaacgcagtccttcttcgccttgacaggaggctcgccggcttagccaaacgatacggctacgcttacacaaggtacgccgacgatctgacgttttccggagacgatctgggagccttagaacgcgtacgcgccctggctgctagatacatccaggacgagggctttacggttaaccgcgacaagaccagggtccaacgcagaggcggagctcaaagggtaacgggtgtgacagtgaatgctgggctcggattatcacgggaggaaaggaggaggctgagagccatgatacatcaggaggggcgggatggtgcagacgcagagaggtcggcgtatatcgatggaatgcttgcctatgtgaaaatgctcaaccctgagcatgcggaaaaactgtctaggggcagaaagcggcggggttcctga

SEQ ID NO: 13817 - RNA, 1287 nt, synthetic construct
  source 1..1287: mol_type = other RNA
atgtcctggctggactctactttatcatggctgaaggcccgattcacgcgtcccgtgactagatccaccaccggattggatgctcccgtggatgctcaagggcggcgtgtagacgtcgtctcggaaaccgttgtgatgtccggccctctcaagccaggccatctcagacagattcatcgggacgcgaggttactgccgaagccccaaaggagatatacacctggccgggcaaagtggatgccagctgccgaggccagacgcttgttttctggaacgctgaggacgcgcaaccgaaacctgcgcgatctgctcccggatgaggcacagcttgctcggtacgggctacctgtttggcggaccgaagaggacgttgccgccgcattaggcatatctgtcggtatgctccggcattattccatccaccgatcacgggaaagggtccggcactacgtgacttttgctgtccccaaaagaactggcggagtaagactgctgcacgcgcctaaacgcaggttgaaggccctgcagcgcaaactgctggaggtgctcgtctcaaagctgccagtgagtcagcaggctcacggctttgtgtccggccggagcatcaaaacaggtgcccagccccatgttggtaggcgggttgttcttaagctggacctaaaagacttcttcccgagcgtgactagtgctcgagtgcgaggactgttcatcgcattaggctacggatatgccgttgcagcgaccttggccgtgctgttgacagaaagcgagcgccagcctgtagatattgaaggtacagtctttcacgtgcccgtgggcccaagggtttgtgtacagggcgccccaacttcacccgccctttgcaatgccgtgctcatgaggctggaccgacggcttgctggactcgctcgacgctacgggtatacttataccagatacgctgatgatctgaccttctctggcgacgatctgagcgccctggagagagtacgggcactagccgcacgttacgtgcaggaagaagggtttaccgtgaaccgcgacaaaacaagggtcagacgtagggggggagctcaacgtgtgaccggagtcacagtgaatgcaacactgggacttagcagagaggagaggagacggcttcgcgccatgctccaccaagaggggagggatggcgaagacagtacccgcagagcatacctcgacgggatgctcgcgtatgtgaagatgttgaatccagagcaggcagccagacttgtgcgcaagaggaaacctagggccggtgggtga

SEQ ID NO: 13818 - RNA, 1281 nt, synthetic construct
  source 1..1281: mol_type = other RNA
atgagctggttcgattccactctgggctggtttaagggactgttcacacccaagcccgtaacgcgggacgtgtccagacttgatggatcggcacgagatgcttctggtcgtgcagccgacgtggtgcgcgaaacagtggcaacaagcgggccattgaaacccggtcatcggcgcgagattatccgggatgcacgtctcttaccaaaagggcgccgagtgtacacccctgggcgcaaaccgctcatgacccgaggagaagctcgccggttttttagcacaaccttccggaccaggaacagagacgtccgggacttgctcaccgatgaggcgcagctgactcggtacgggctgcctgtctggaggactgaggaagacgtcgccgccgcactggagctcacagttgggcagctgcggcattatgccacccacagaatccgcgaacgcgtctcccactacgtgacttttagtgtgccaaagaggtctggcggcaccagacttctgcacgctcccaagcgcaagttgaaagcactgcagcgcaggctgcttactctgcttgtagccaagctgccccggtccgagcacgcacatggcttcgtgagtgggcgatctattaaaacaggtgcggctccccacgttggaagaagggtggtcctaaagctggacgtgaaggattttttcccatcagtgactgtaggccgagtacgcgggctcctccttgccttgggatatggataccctgtcgctgctacgctcgccgtcctcatgacggaggcagaaagacagcccgtggaagtggagggcactgttttccacgtcccagttggtccgagggcgtgtgttcagggagcccctaccagccctggcttatgcaacgctgttgtgatgaggttggacaggcggttggccggtctggcgagaaggtatggatacacatatacccgttacgctgacgatctgactttttcaggggatgacgtcggcgctctagagaaggtgagggccctggcggccagatatgtacgtgatgaaggcttcgaggtcaatgcagccaaaacccgagtgcagaggagagggggcagacaaagagtgacaggcgtgaccgttaatgccggattaggcctttcaagggaggagcggcggaaactgagggccatgatacatcaggaggatggtggcgacgctaaacaaagagcacgcatcgacggaatgctagcctacgtgaagatgctgaaccctgaacatgccgcccgactcgctaggcgtagaaagccacgggggtga

SEQ ID NO: 13819 - RNA, 1281 nt, synthetic construct
  source 1..1281: mol_type = other RNA
atgagctggctggattggttcaagggtctgttcagcccgaagccagttaccagagatgtgtctcgactagacgcccccttcgaaagggatgcttctgacagaccgcctgatgttgtgcgggagacagtggccacaagtggtccacttaagccggggcacctccgacagatcctgcgtgacgcaagactgctgccaaaaggcaagcgcgtatacacaaagaagcggaagcgactcttttccgcactggaggcccggcgtttctttagtaccgcattccggacccgcaatagaaatgtcagagacttactgcctgatgaagctcagctcgccaggtatgggctgccagtgtggcgcactgaggaggatgtcgcgacagcccttgggctgtccgtcggacagttgcggcactactcaactcatcgggcacgcgaaagagtaagccactatgtcacattcactgttcccaagaggtccggcgggcagcggttgttacacgcaccaaagcgcaagctcaaagccattcagcgaagactgttggacgtgttggttagcaagctgcccgtatcagaacaggcacatggatttgtgactgggcgtagcataaaaactggagccgctccacatgtgggcaaaagggtggtgctgaaattggatctaaaagactttttcccctctgtgacagtgtcacgggtaagaggactactccttgcctttgggtatggttaccccgttgcggccacactcgccgtgctgatgacggaggctgagcgccaaagggtcgatgtcgagggaaccgtctttcacgtccccgttggtcctagggtgtgtgtgcaaggtgctcctacgtcgcctggcctctgcaatgctgtcctgaccagattagaccgtcggctggccggattgggcagaaggtatggctatgcttacacgcgctacgccgatgatcttactttttctggggacgacgtgggcgccctggagaaagtcagggcattagcagcgcgctatgtacgcgaagaggggttcgaagtgaacgctgagaaaaccagggtgcagagaaaggggggacggcaacgagtgaccggcgttaccgtgaacgagggtctgggcctcagtcgagaagagcgtcggaaactgcgggccatgattcaccaggaagatcgcgacggcggcgacgctaaaaggtccgctagaatcgacggcatgcttgcgtacgttggaatgctcaaccctgaacatgccaccaggcttgcacgatacaggaagccccgcggcggatga

SEQ ID NO: 13820 - RNA, 1296 nt, synthetic construct
  source 1..1296: mol_type = other RNA
atgggcagctggctgagacgagtgtttgggcctggagccgaatctccatccggggactcatcaggggctgacagggcagatagagccggaccagccacagctagtgcagcagcagcggcaggaacacgtaggggtggtcctctgcggccaaatcagagacgggaagccgtgcgggatgaacggctcctgccaaaacccgaaccaagacgcccttggcgagctcccaagtcacggcctattattcctgccgacgctggcgcccgtctattcagcgactccctgcgcacacggaatagagaattgcgaacgctggccaccgatcccgcacagttggctaggcacggtctgcccatctgggatacagaacgggacgttgccgacgctctcggcatcagccttggggagcttcgccatcacgccattcatagaagacgggagagggtggaacactatgtcacctacgccatcgctaagcggagtggcggacagcggattatccatgcaccgaagacccgcctaaaagccattttacgcaagttgcatggggccctggtcggcaaactccctgtgtctgagcacgcacacgggtttgtggctggcagatccgtacgaacaggcgccgctatccatgtgggcaagagagtggtcctgcgattggacctcagagagttcttcccaactgttaccgccgcgcgcgtaagggggtatctcatagcgctgggctatggataccccgtggctgccactctcgcactgttgaccacagagcccccccgccaaagggtcgatatcgacgggaccatttttcatgtgccggtgggcccaaggacttgcgtacagggagctcccactagccccggtctgtgtaacgcgatacttcacaaactggatagacggatagcagggctggcacggagagcaggattcgcctacactcgttacgccgacgacctgaccctgtcgggagatgaccttgacaccgctcaccgcctgcgcagacgggtagagagggtgatcagagaggagggctttgaggtcaaccctgccaagacgcgagtcatgacaggacgcggtgcccagcgcgttactggagtcacggtgaatcgagttcttgggttatctaggcgcgaacggaggcagatccgtgcgatggtgcactgcggcgatccagatagggcgaggcaggtggagggtttactcgcctgggttgagatgctcaacccggcccaagctgatgccttgcgtagggctccccgtaaaccacctgctaggccgggcgcacgacctgatagatga

SEQ ID NO: 13821 - RNA, 1323 nt, synthetic construct
  source 1..1323: mol_type = other RNA
atgtctttcttcagcaccctccgagcctggatgggctcgctcttcggagaaaagcctgtgacaagagaggtgactcgactctcctctgaaccagaaactcctagtgctaaacaggggcccacaaaaacagtcctcggaagagccaaggataccgttgtggagaaggttgtgatgaccggtcccctgaaggaaaagcacagaaggctcttaaagcgggacgcaagactcctgcctaaaccttcacgtaagaggaggtgggagaagcgcgagaaggtgatgtcccaggctgaagcacgtagactgttcgcgggcaccctgaggactagaaatagaaaccatagagatctcctgcccgacgaggagcagttagtacgctatgggctacccgtctggcgcacagaggaagacgtggcccaagctcttggtctgacagtgcgccggctgcgtcacttttctatacatagggaacgcgacccggtcagccattacatcaccttcgcggtgccgaaaaggagtggcgggcaacggctgattcacgcacccaaaagtggacttaaggctgtccagcggaagcttttgtcccttttagtggagaagttgcccgtgagtccacatgcccacggctttgtaaaggggagatctgtccggacgggtgcagagggtcacgtagggaaagcagtggtactccggttagacctgaaagatttctttcctaccgtgacatacgccagggttcgcggcctatttatcgccctggggtatggatttcccgtggcagcgacattggctgttctaatgactgaatccgagaggcagccagttgaggccgagggcaaggtgtattttgtacctgtgggcccacgagtttgtgtgcaaggggccccaaccagccctgctctttgcaacgctgtcgtcttgaaattggatcgtaggctggcaggactggccagaaaacacgggttcacatacagccggtacgccgacgacctgtccttttcaggaccaagcgaggaaactgcagagcgcctgcgggctctggccaaaaagattattgaggaagagggcttccaggtcaacgccgccaagaccagactgcagagaaggggcggaaggcagactgttacgggagtgactgtcaatcaggtgttgggcctgagccgaaaggagcgtcggaaacttcgcgcgatgatccatcaggaaacctcacgaccagcagatgccgaacggagcgctcggatcgatggcaaactggcctatctctcaatgctgaatccccaacaggctgaagccctccgcacccgacgcaaaggtaggacgtcttga

SEQ ID NO: 13822 - RNA, 1302 nt, synthetic construct
  source 1..1302: mol_type = other RNA
atgtccctattccccaaattgctaacatgggtgaagactgtgttcggacaaggcccacggacacgccaggtgacccgactttcaagcgcaaatggaggccctgtcgacgcctcaggcagacctgttgacgtagtgacagaggaggtggtgctcaaagggccactcaaggaaaaacaccgccggctggtcaagagagatcccaggctgctccctaagcccccacgcaagtcacattgggaaaagcgaaagaaggtgatgagcgcggaggaagcaaatcgtctcttctccgggactcttcgtaccagaaacagaaatttgagggacctacttcccgacgaggctcaacttgagagatatggcctgccggtgtggagatccgagcaagatgtagctactgctttggggatcaccgttcggcagctgcgtcacttttctgttcataggcagcgagatcgggtgagccactatgtcactttcgctctccctaagagatcgggaggccagcgactcatacacgctccgaagaaagggctgaaagccgttcagcggaagttactgagcttactcgtcgaaaagctgccagttagtcctcttgcccatggttttgtcaaaggcagatctgtgcggactggcgctgaaggtcacgtggggaaagctgtggtcttgcgggttgatctcaaggatttttttcccagtgtgagttacgcccgggtgagaggtctgctgattgcacttgggtatggctatcccgtggcagccaccctggcagtcctgatgacagagtctgagaggcagccggtggaggtcgatggccaggtattctttgtgccaataggaccccgcgtgtgtgttcagggcgcacctacctcacctgggctgtgcaacgcggtagttctgcgaatggataggcgcttagctggactggcccgcaagcacggtttcacatactccaggtacgccgacgacctcagcttctccggacccgaacagaagacagctgagaaattgagagccttggcggggaaaatcatcgccgaggagggctttcaggtgaacgcgcctaagacgaggctgcagagacgaggcggacgccaaaccgtcaccggagtaactgtcaaccaggtgctggggctgtctcgcaaagaacggaggaaaatgcgcgccatgattcatcaggaggcttctcggccagcagacgccgaaaatagcgcccggattgacggaaagctggcctacctcagtatgttaaacccaaggcaagcagaagccctgcgcaccaggaggaaaggtcgtacgaggtga

SEQ ID NO: 13823 - RNA, 1311 nt, synthetic construct
  source 1..1311: mol_type = other RNA
atgtccctgtttgaccgcctctgggggtttttcaaaggcctgacaagtaaaccggtggaacgggatgtaacccggctgcctagccacgacgccaaagacggcagggctgcagacctgacgaaggaagtcgtgaggactagcggagagttgaagccgcaccatcgtcggctcatcaccagggaccaacggttgttgcctgatccctcacggaaggcacattggggccctcttggatacacggccaggaaaaaagtgttcgatgcatctgtggcaggccgactcttcgccggaactctgcgaacccgcaaccgcgaattgcggacactcgccactgatcctgcccagctcgagcgatacgggctgccaagatgggaggacgaggctaccctggcagccgctttaggtctgtctgtcaaccagctacgtcacctgtccacacacaggctccgggaaagggttccacattacgtagcttttgctatcgccaagcgcagtgggggtgagcgggtcatacatgcccccaaaaaaagactgaaggccgtacttcgcgcggtccacgcacaactggtgtccaagctaccagtccacccagccgcccacggtttcgtgaaagggagaagtgtcaaaactaacgccgaaggacatgtgggccgtgccgtcgttgtgaagctcgatctggaggactttttccccactgttacctaccagagggtaaggggactgcttgtaagcttaggctatggatatccggtggcagctacattagctgccttgatgaccgagtcggagagacagcccgttgagctggacggggaagtggttcacgttcccgttgggcccagagtgtgtgtccagggcgctcctacttcccctggcctttgcaacgccgtggtgagacgcatggacgcaaggctgtcaggactggccaagaagctaggtttcacctattcaagatatgctgatgatctggccttttctggcgatgaccctaagcaggtggacgtgcttattcacagagccacgcgcgtgatcgctacagaggggtttcgggttaatggtaagaagactagagtgatgcgacgaggagcggcgcagcgaattgctggcgtgacagtgaatgccaccttagggctgagccggaaggaaagaaggttgctcagggctgccgcccatcgcgaaaaaacctctacagtcgatgcgaaggagcaagcggtcctcaccggccaactagcttgggtgcagatgctgaatccaagccaggcagaggcacttagacggaggcgtgctcgcgcaattggtccacccgcatga

SEQ ID NO: 13824 - RNA, 1296 nt, synthetic construct
  source 1..1296: mol_type = other RNA
atgaattggctgcgacggttctttgcctggctgtttggcccaaaacaggtcacacgggacgttgcgcgcctaccggaccattctggcggaagggctcccgacgtgctgaaggaagtggtccaaacagggggcccggttaaaccaaactaccgaaggctcgccgttcgagatgccagactgcttccagatcgttcgcgcaagggagggtggactggattggcttggcgcgccccaacctctgtaatgacagggaaggagtcaaggcggctattttctaactccctgcgcacgcgcaaccgcaatttacggaccctggccacagatgaaaaacagcttgcacgctacggcctgcctctgtggaggacagaaacggagctggccgctgctcttaatctgtccattgagcaactccgtcatttcagcatccacagggtgcgtgatagagtccctcattacgtagcgtttgccatacctaagagaagtggcggtgaaagagtcatccacgcacccaaaaagaaactcaaagcagtgctgcggaatgtcaacgatcaacttgtgtcaagacttcccgtgcacgcggcagcccatggatttgtaaagggacgtagcgttaagaccaacgccgagcctcacgtcgggagagctgtggttgtgaagctcgatctggaagacttctttcccaccgtcacttgggctcgcgtgaggggactgttgatcagcctgggttatggctatcccgtcgctgcagccttggccagcttgatgaccgagtccgaaagacagcccgtgactgtagacgggcagacgttccacgtgcccgtgggagatcgggtgtgtgtacagggtgccccaacctctccaggcctctgcaatgccgtgacccggaaaatggacgcacggttgtccgggttgagtaagaagctcggcttcacttactccagatatgccgacgacctcacgttcagcggcgacgacgctaagcagattgaaaccttactgaacagggctactagaattatccacaccgagggcttcgttgtgaatgggaagaaaaccagagtgatgaggagtggaaacagccagaaggttgctggggtcacagtcaatgaaacactgggcctaagtcggaaagagcgacgcaaaataagggctgcactccaccaggcaacccctgagaagagggcccagctggagggtacacttgcctgggtgcatatgttaaaccctgagcaagcagcaaagctcaaagccgatgcggtgcgagcgcctacttcaccaggtcccactactacatga

SEQ ID NO: 13825 - RNA, 1305 nt, synthetic construct
  source 1..1305: mol_type = other RNA
atgacttggctcatcgcacttatggtcctggccggcgtgttcgtgttgctccgagccttggcccgaaaaaagcaaaacgccattcacacaatcgagcctggcctcacccaggacgagcctacaagcgattccgcatccggagggtcaaagtcacagcttgaacctaaaactacgcagagcctccgtaagcagacaattgatgaaagattactccccaaagccccttctaggggcccccatcatccacgcagcagactcttcgatgcagcctcggcgaggcgccgattctctcacagtatgcgatgtaaaaatcgtgacctgagcgtgctggcagaggatcccgaacagttggctagacacggtctacccctatggcggaatgaggcccagctggccgaagcactggggctttcggtcgggcaactgcgccacctgagcatgcacaggatagcagagcgtaccccccactatatcactttctccattcccaaaagaagcggcggtaacaggctcattcaggctccgaagagaaaactgaaggccgctcagaaaaaggtcctgtcacttctgatccataagcttcccgttcacgaggccgcccacggatttagacagggacggtctatacgcaccggcgccgaaccccacgtacatagacgcgttgtcatccgtctggatatcaaagactttttcccgagtctaacattcgcacgaatacgcggctacctgattgcgatgggttatggttatgaggtggctactaccttggcctgcctttgctccgaaccacagaggcagccagttgaggtgggcggggagatcgttcatgtgccagttggccctagggtagctccacagggggctccaacatcacctggcttgttgaatgctatctgtcataagctggactgccggatgcagggactcgcgagagcacatggatttgcctacactcggtatgcggacgacctcacgtttagtggagactacccggatcgcgtggggaagatcctgtctcgggccagagccataatccggagcgagggatttgaagtgaatccaagtaagaccctcgtgatgaggcgcggcaaagctcaacgggtgactggtgtcaccgtgaacgagacattaggactgtccaggcaacagcggcgcctggtaagggcagcaattcaccaggcttcttttgtgtctcctatggacgggacgtccaaggcccggttactggggaaggtcgcttacattcagatgctgaaccagtcccaagctgagcctttaaggagacaaaccgaaaagctgacctga

SEQ ID NO: 13826 - RNA, 969 nt, synthetic construct
  source 1..969: mol_type = other RNA
atggggttcgtcgactggttgaaggggcttttccggccgaaacctctcatgcgggatgtttctaggctagaccgcgaaggcgggtcactggacgctgtccaggaggaggtccgtcctgagagtggaccactcaaacccgggcacctgagaaccgtaagaagggacccgcggttgctccctaagcccaaacccaagacacccctgcgggggaagcgcaagaaatggatggcagcctccgagagcaggcgactttttgctggcaccctgcgtacaagaaaccgccacatctcggacctgctgccagacgaagctcagctgcagaggctcggcctgccagtatggcgggatgaaggcgaagttgccgtggccctgggagtgagcgtgaaagagctgagattcttctcaatccacagggaggctgagcgagctccccattatgtctctttcagcatacctaagcgcaacggcggcaggcgcctcattatggcgccaaaacgccgcctgaaggcactgcagcgaaagctccttccacttttagtcgacaaactccctgtgagtggacacgcgcatggatttagagccggtaggtccatccgaaccggcgcagaacctcatgtcgggaaggctgttgtgctgaaaatggatctggctgactttttcccatccgtaacatacgttagagtgcgaggtttattgattgcactgggctatggatacaccgtcgcagccactcttgcagccctaatgactgaagccgagcggcaacccgtggaggtgaatggggtgagactgcatgtgcctgttggtcccagggcgtgtgtgcaaggagccccaacgtcccccggcttgtgcaatgccgtggtgcgtcggttagatctccgcttggccggtctagccaggaagcacggctttagctttactcggtacgctgatgatttgtgcttttctggagcacactggagaagatga

SEQ ID NO: 13827 - RNA, 1290 nt, synthetic construct
  source 1..1290: mol_type = other RNA
atgtctctgtggaggtggattaaaagttggtttggtgccgctcccacacgggatatcagtcgactagacacgactcgcagcgccagctctgcaaccggtgacgtcgaagaaagaatcgatatttctggcgggcctctgaaagagcatcaccggaggagagcattacgtgacccccgcttgctgcccaaaattaaatcaccagcccgccagcttgggttaactaagaagaaggctgtgatgtcgcagaccgaagcgaagcgcttattcggagggaccttgcgaacgcgaaatcggcagctgagggacctgttgcctgatgaggaacagctaaagaggttgaatctgcctctctggcgaacagaggacgatgtggcacaggctctcgggatcagccggcgtgagttatggttcttctcaatccacagagagcgtgagagaaggccccattacgtgactttctcacttccgaaacgatccggaggccagcggcttatacaagcaccaaaacgccgcctgaagtccatacagcggcgcctggtatctctcctggtaagccacctgcccgtgtccgaacacgcccatgcgtttcggccaggccgtagcatcaggacaggagccgaaccccatgttggccaccgcctgctgcttaaactcgacctgcaggagttctttccgagcgtgacttttgcaagagttcgaggcctcctcatttcctatgggtattcatatccagtggcaaccactctggccgtcctaatgacagaagcggagcgccaacccgtggaggtcgatggagaggtttttttcgtgccagtcgggccaagacattgtgttcagggggcccctacctctcctggcctgtgtaatgccttgctgctgagattagaccgtagattggccggcctggctaggaagcggcagctaacctacacgcgctacgctgacgacctcaccttttccggtgatcttgatcgggcccaggctgagtcacttagggcactcgccacccacttgatcgcttccgaaggattcactgttaacagtaagaagacaagaattatggccagcggagcccggcaatctgtcacaaacgtagtggtgaaccagacactgggtctgtcccggaaggagagaaggcggtggagagccagtgcccaccagctgagcagaaggcctgagagtgaacgcgcaggccttcgagcgcaactcgaaggcaggatcgcattcctccacatgctgaaccctaggcaagccgaggctctcgctagaaggctcccggctctgcagtga

SEQ ID NO: 13828 - RNA, 1275 nt, synthetic construct
  source 1..1275: mol_type = other RNA
atgggcctcctggattttattcgctccctgttcggacctcctaaaagggatatctcacggttaagcggagagacagtggccggggaggatgaggttgacgagagagtggatgtgtccggcggactgctgaaggaacaccacagacgaagagccctcagggacccacgcttgcttcccaagcgtaagagtgtgggcagacagctgggcctggccaaacggaaacgagtcctttcagcagccgaagctgaacgcctttttagtgggacaatgagaaccagaaacagacggctgcgcgacctcctcgttgatcccgagcagctgaaaaggctcggtctgcctctctggaaaacggaagaggaagtggcagccgcccttgggatctctttgagggaactgtggttttttgcaattcatcgtgagcgggagacacagcctcactatgtgacatttgcgatccccaaaagaagcggcggcaaaagaaccattatggccccaaagcgacgacttaaggctatccagcgcaaactgctgggccttctagtggagaagctccctgtctctgaacatgcacacgccttccggaggggacactctgtcagaactggggcggaaccacatgtgggcaagaggatggtactcaagttagacctgaaggatttcttcccgtcagtgaccatggcccgtgtacgcgggttgctgatagcgtgtggatacagctacccggtagcgaccaccctcgctgtgctcatgaccgaggccgaacggcagctggtttctgtggaggccgaggtcttccatgtgcccgtagggccacggcattgcgtgcaaggagcacccacttcccctggtctgtgcaacgccctggttctgcgcctagacaggcggttggctggtctagctcgcaagcggggcttggcctatactagatatgcagatgacttgacttttagtggagagttcgaccgcgccgcagcacaacaattcaggcaggttgcgtccaggataattagcgaggaaggcttcaccgtgaatacagcaaagacacgtcttatgggtcgaggagctcgccagtcggttaccggggtggtcgtcaatagcgtcctggggttatcccggcagaggcggaggcagttacgcgctatggcacaccgtctcaaactagctcaacgggccggtacggccgagggaactgaactggctcgatttgctggccacatggcctacctggctatgttgaaccccagacaggctgccaggatcccagtggtcgactga

SEQ ID NO: 13829 - RNA, 1266 nt, synthetic construct
  source 1..1266: mol_type = other RNA
atgagcctcctggcctggctgaagcgcctctttggccgcgaagtgaggagggacgtggcccaacttgaacgcggcgaggtggatgccgttgcagagactgtcgacctgacgggtccccctctgaggccacatggccaacgacgagcatggagggatcggcgcctagtccctaagaggaggtccttagggcgggccctgcgactaaccaaacggcagcccctgttaagcaggacagaagcagatcggctgttttccggaagcgcgagaactcgggacagacagcttcgcgatttagctcccgatgaagaacagctcagaaggtatgggctccccgtatggcggacagagcaggagctggccaacgctctagaactcaccctgggccagttgcggcatttcgctatccatagagagcgggaaagacagccccattacttcacttttgcaatacctaagagatcaggcggcgagcgtcacatcctggctccgaaaaggcgactcaaagccctacagcgccggcttttggagcagctgttcgcaagactccccgttggcgagccagctcacggattccgcagaggcagaagtgtgcgtacagcagccgaaccgcatgtagggcagcgacgcctgctgcaactcgacctgcaggacttttttccatcgctgacctttggaagggtccggggattgctgattgggtatggatatgggttcccagttgccaatgccctcgcccttttggtaacggagtgcgtgcgccagcctgtggagatagacggtgagatctttcacgtgcctgttggtctgagacacgctgtgcaaggggctcctaccagtcccgcgatcgccaacgcgttggtcctccgacttgatcgtcggctggccgggttagctcgcaggttccgttgtcgctacactagatacgctgacgacctgactttctccggagagttagacgctgccgcagctcagcaactgcgtcgcttggccggccacattattaggtctgagggtttcgcggtgaacgccgccaagacaagatcagcaggaccgggcgcacgacacgaagtcaccggtgtgaccgtgaacgaagtcttggggctttctcgggaagagaggcggtgcctcagggcagcagctcacagattgcaccgtgagcctgataatgccgaactggccgcaaggctgcacggacaactggcgtacctgcatatgcttaatccagcccaggctgagcggctccgacagagacttccaacaagatga

SEQ ID NO: 13830 - RNA, 1287 nt, synthetic construct
  source 1..1287: mol_type = other RNA
atgagtctgttcgattggatccgccagcggctattgggaggagccagaagacgtgacgtcagcagactcgagtcgggggacgacgctctagatagcgtgacagaactggtggctgtcagggggggacccctcaaaccaggtcatcgccgactcgctctccgggatcctcgtcttctgccaaaaccgccgagagcccctgtcaggcttggtaagcgaaagaagaaccctttcctagctaccgctgaggcctctaggctgttctcagagagcctcttaactcgcaaccgcggtctacgcgatcttgcaactgacgaggctcagcttaccagactgggcttgccactctggcggacggagtccgagatagcaaccgccctgggcttgactgtcggccagcttagacacttttccatccaccgcgaaagagagcggaccccccactatgtaacattcgccattcccaagcggggcgggggtgaaagactcataatggccccgaaaaggcgcctcaaggccattcagcggacgctgctggcccagctcgttgacaagctgcctgtgacagaacacgctcacgggtttcggagggggcgatcaatccgaacaggggccgaaccccatgtaggacgtcgcgtggttatgcatttagacctgaaggacttctttccatccgtgacatttgcaagggtgcgcggctacttagtcgcgtgcggatacggctatcctgttgcgactactcttgccttgttaatgactgaggctgcacggcagcctgtgtcaattgagggtgaaatattccacgtgcccaccggactgcggcattgcgttcaaggggcgcccacgtctccagccttgtgtaatgctattgccgccaaactggacaggcgcttggcaggactggcaaggaagtttggcgtcgcttacactaggtatgcggatgacctgaccttctctggggatctggatgccaaaatcaccggccggctgcttcatcatgtgggcgccattatccaggcagaggggtttacaatcaacagtgctaagacccgaatcctgcaccgtggccggcgacaaagcgtaaccggagtcacagtgaacaaagatgcaggactgtcccgtactgagagaagagtgctgagggccacagcccacagactcaccaccctcaggagagaaggtgcgcctgacgcagccgcagaaagggtgttggctggccagctggcatacctggctatgctgaatccagcccaggcagctgccgttcggaataggcaaggccccgtgtga

SEQ ID NO: 13831 - RNA, 1428 nt, synthetic construct
  source 1..1428: mol_type = other RNA
atgagggtggaatttttcatcttgagaatctggacccgtatagcagctgggctctctagactgccaagatgggcaaaaatccccatctggatcgtcctcgccatattaatggtcctcgtgcttgtgattggtggcctgttggccaccgtttttggactgattagaggcattctgttccggattttcccaccaccccccagtcgcgatgttagccggctggacatggatggggccgagttagatgctattcgtgagactatcgaggacgaaggaaaaccccttcgggagtctcaccggcgtttaatctacagggaccctaggctgttgccaaagccgaagcctcctgccgatgtttggcccaggcctaaacgcaagagagtgatgcaggtagaggaggcatcacggcttttttccggaacactacgcacgaaagaccggaatattcgcgatctcttggcagacgaggagcaactcgagcgtcacaggctgcctagctggcagaccgaaagtgatctggctgacgccctggggctcacaatgggacaactgcgccattacagcatacatagagagtcagagacagctcggcactacgtacagttcgctatacccaagaggaacgggagacaacgcatcatcatggctcccaaaacaagactgaagggcatccagaggcagctcaatgagcagctggtccagcgccttccagtatccccgcacgcgcatggctttaggaagggtaggtccgtcaggactggagctgaaccgcatgttggccgcaaggtgctgttgaaaatggatctcaaggacttctttcccagcgttacatttgggcgagtccggggtctacttattagcctcggctatagttaccctatagccactacattggccgtgctcatgacggaagctgagagacaacctgtgcagcttgaggatcggttagtccatgtgcccgttggccacaggtactgtgtgcagggtgcccctacttccccaggcttgtgcaacgcaatttgtctgcgaatggatcgccgtctagccgggctggcacgcaaatatgggtggtcttatacccggtatgccgacgacctgaccttcagtggcgacgacgaatctgccctgtgcgatatccggcggctggcaagacagatttgccgagacgaaggattcgaagtgcaccccgaaaagacccgagtcatgcggcaaggccgcaagcagactgtgacgggggtgactgtaaatgaagtggccggactcagcagaaaggaaaggcgaagactgagagcggctatccacaggctgaaacacccatcacctgatcgaccagcgtcgatgaccgagtcccaggtgcgaggtcacctggcgtggctacatatgcttaacccagagcaggccgagaggctgcgcgaacagtggacctcatga

SEQ ID NO: 13832 - RNA, 1266 nt, synthetic construct
  source 1..1266: mol_type = other RNA
atgtcctggtggtctagcctctgggagcgtttgacagcctggtggcggggtgaacccactaggtccgtagcaagaattggcggagatgctgacgtcgatcaggttgtcgagacagtgaggctcagcggaacactgaccgagcatggccgacgccgcgttcttcgagatcccaagctgctgccgaaaccgaaaactgccggatggagcatgggtaagcggcctcgcatcctgactagagacgaagcctataggctgtttggcgggacccttcgtactcgcaaccgagagatcagggatctgctaccagacccagaccagctgcagcggcatggcttgccacatttggcctcagaagttgagctcgccgccctgctggacgtgtcactaactgagctcagatttttcagtattcacagagtagctgagcgccagccccaccacgtggtctttcggataccaaagcggggggggggcttcagaacgattaccgccccaaaacgcagactgcgaaccgttcagagaagactgctggcccgccttgtcgacctccttcctgtctctgacgcagcgcacgggtttcggaaagggaggagcgtggctacccatgctgccccacacgttggcaggaaggtggtggttaaactggatctcgaggatttcttccacacagtgacatggcagcgggtacgaggttacctaatcgcaatgggctatggctaccccgtagcgaccaccatcgcggtgctggtgacggaagctgaaaggcagcctgtggacctgggcgacagagtcgttcacgtgcctgtgggacccaggaggtgtgtgcaaggcgcacctacctcgcctgcactgtgcaatgctatcgcacacaagctcgatcgacgtttattgggcgcagcccgcgcactcggttttacatatactcggtacgccgatgatcttaccttctccggggatgacgccactagagtgtctgctcttttgggattagtgcgtaagattgtggtcggcgaaggtttccggctgaatgacgctaagaccagggtgatgagggcaggagggcgccaacgtgttacgggagtgacagtgaaccaagtcctcggcgtgagtcggcgcgagagaagacgagtccgggctatgatccatcagcatggaggtgatcccgcctggcgcgacaggatagcgggacaattagggtgggtcggggccgtaaaccctgaacaggctggaacattgcgggccaggtggaaaagaggcgggggttga

SEQ ID NO: 13833 - RNA, 1257 nt, synthetic construct
  source 1..1257: mol_type = other RNA
atggctctgtttcgatggatagcagataaactgtttggacctcctaagcgagatttgagccgccttgaaaataacgatgtggacctggtggacgagagtgttgatctgagcggtggccctctcaaacccggccaccatcggaagtccctgagggacagaagactgctgcccaaacgcaaggcctcgggtctgtcacccctgaagcgggtgaaactcttctcaaaggaacagagcgataggctcttctcacggaccatgcgcacaagcaatcggaacgtccgcgaccttaccgaagacgaggatcaactccatcgatatgggttgccgctctggaagtccgaacatgacctagcgtctgccctctccctctccgtaaaggagttacgccatttcagtattcaccgatttcaggataaggtgtgtcactatgtgctcttcagaatcgccaaggcacgcgggggccatagattaataatggccccaaagactaggctcaaaaaaatccaacgtgaattgttgcgtcaggtattggaaaaactgcccccacctcctcatgctcacggatttgtcaagggaaggagtgtgaaaacaggggcctcccagcacgttggaaaaaaggtggtcgtcaaaatggacttagcagacttcttcccgtcagtaacctttcccagagttaggggcctatttatcgctctgggctacagctttcccgttgctactactctcgcagtcctgtgcaccgaatgcgagcgtcaacgcgttaagcagggagatgaccttttccatgtgccagtgggagagaggcactgcgtgcaaggtgccccaacgtcccctgccttatgtaaccagatcgccagaaagctggacaatcggctgcacgggctcgctctgaaactcggatttacgtacactagatacgccgatgatcttacattctctggcgacaaccccgaaaagctgaagagtctgctgggcctaaccagaaaaattattgaggacgagggcttcaggcttcattctaagaagacacgcatccttcactctggtgggcaccagcacgtgacaggcgtgaccgtcaatcaggctctggggttgtctaagaaagagcggaggcggttgcgggcggagttacaccagctgagcctgaatcagcagccagatccacaacagattgcacgactgaaagggaaactggcataccttgagatgctaaacccggagcaggccgcgagacttagggctaagtatcctctgtga

SEQ ID NO: 13834 - RNA, 1359 nt, synthetic construct
  source 1..1359: mol_type = other RNA
atgtctggtttcgttactttcatcgccgtaatcctcggggtcattgtgtacacctatttaaagcgcgccaatgctcgaagaaagcacaaaagggtcgtggaggaatttaagaaagcccccgtgcgggatgtgtcaacggtggctggagagggggacgcaggcttgaagacagagactatacagattggcgggcctctcaaaccaaaccacaagcgtctggcgctccgggacgatcgcgttttgccaaagccacccctggggccagattattactcgaaatggcccagaccccctaggccaaagtacttctctgaacgggatgctgaccgcttgttcggcccgtctctccgaacctccgctagagatgtaatggaccttgcgaccgatgaggctcagctcaatcgttacggccttccactgtggcggacagaagctgaagctgcagccgctctggggattcctcacgctcagttcaggtatttttcccagcacagacatagggaacacatctcccactatgtggccttcgctataccgaagaggagcggcggggaacggattattcatgcacctaagactaaactgaaagcagttctgcgtacactggacaagctgctcgttagcaaactgccggtgagtgaccatgcgcatggattcgtgcgaggtaggagtattgccacaaacgccaagcctcacgtgggaaagccaatggtcgctaagtttgatatcaaggactgctttcctacgcttactgtcaaccgcgttcgcgggctgctactggccttaggttattcataccctgtggcagcggccttagccgtcctgatgaccgagcctcccagacaactagtggaggcagagggaaacatctaccataccccaatagggccccgcgtatgcgtccaaggtgcacctacttcccccggtctttgtaatgccatcttgctgcggttggatcgacgtctcgccggattagccaaaaaacgaggcttggcgtacaccagatatgccgacgatatgaccttttctggccccgaggcagagatcaagaaacttctcggaatcgtgcccaaaattgtcagcgaggaggggtttgagctaaacaccgaaaaaacacgcctgatgcggcaaagtggcaggcaggttgtggccggagtcacggtgaataaagacatgggactcagccgcaaagcaagaaggaagctgcgggcagccatccatcacaattcacagggcaagcttgatgtaactgctgccgccagactggaaggcaagctgggatacctccacatgctgaacgtggaccaggcccggagactgagagaaggcagggacggcacagcagctcagcagaggtga

SEQ ID NO: 13835 - RNA, 1344 nt, synthetic construct
  source 1..1344: mol_type = other RNA
atgacaggcatcttacggctcctggtgttcataggtctttttgtggccgtttactacggatataaggcttatcaacgctggagacataagcagacggtgaaggagtttaaaaaagcccccgtgagagatgtgagcactgtggccggtgagggggtcgcatcactgaagaccgagaagatcaacattggaggcctgctgaagcctaaccataggcgtctggcccttcgcgacgaacggctacttccaaagccgcccttggggcccgattactatagcaaatggcctcgacccccaaaacctaaatacctctcagaaaatgatgccgatcgactgttcagtccttcccttaggactagcgttcgagacgccatggatttagcaactgacgaggcccagctcaagcgctacggtctgcccctgtggaagaacgaggctgatgtagccaacgcactgaggattagtcagggtcagttcagatacttctctcaacacaggcatagggaacagacaccacactacgtagcctttgccataccgaaacgcaacggcgaagagcgaattatccacgcgccaaaaaccaaactgaaagcagttctgcgggcgctcgacaagcagctcgtctctaaactccccgtttcagaacacgctcatggatttgtgaagggccgttccatcgctactaatgctcgccctcacgtggggaaacccatggttgctaaatttgacattaaggattgcttccccacaatcaccatgggcagggtgcggggtttgttgctcgccctcggctatagctaccctgtggctgccgcattagccgtcgtcatgacagaggcgcggcgacaaccggtagaagctgaggggaaattgtaccacacccccacaggacctcgcgtgtgcgtccaaggagctccaacctcgccaggcctgtgtaacgccatcctgctcagaatggaccgccgtttggccggactggcaaagaagcgggggctagcgtatacaagatatgccgatgacttaaccttctctggacctcagggagagatcaagaaacttctggggctggtgcccaaggtagccgcagaggaaggctttgcaattaatcacgacaagaccagactgatgagacagtccggcaggcaggcaattacgggcgtgatagtgaataaagatatggggctctcccggaaggtcaggaggaagctgcgggcagcccttcatcaccagaagctggggaaggccgacccagctaatactgacagactgaagggcaagctcgcttatctaaatatgctgaaccctgctcaggcgaaaagattgaaagacgtctacgcaccactttga

SEQ ID NO: 13836 - RNA, 1359 nt, synthetic construct
  source 1..1359: mol_type = other RNA
atgcctcacctcacttacctgcagataggagtcttactgctgatcgtgggtctgttattgactcggggggcacgccgatggcttgtattgcggcgatggagcaaagccccacagagggacgtgtctgctctcgccaccacaggggaagcgcagtttaaaggggaggccatcacgactgcaggtccattgcggccaggccatcgcagactcgttctgagagataaaaggctcctccctaagcctcctcccgaccctgccattcttagacgctggcccaggccacctaaaccaaaatacctgacagaacaggaagcggacagactatttagtccgagtttgagaacgagcaatcggaacgtcatggatctagctaccgacgaggcacagctacagcgatatggacttccggtctggaactctgaggatgatgtggcctctgccctgtccttatccctggggcagctccgtcacttatcacagcatagacaccgcgaaacagccccacactatattacctttgccatccctaagcgttctgggggcgagaggctgatctttgcccccaagcggcggctgaaagcagtgctcagaactttggaccgcttgctggtgtgtaagctgcctaagtcggaacacgcccatgggttcgttcggaagaggtccgtcgcaaccaatgctgctccccatgttgggaaggctgtcctcctgcactttgacataaaggactgcttccccaccattcatttcggccgcgtgagaggtctgctgatcgcactgggctatagctaccccgtagccgcaaccctcgctgttctgatgacagaggctccccggcaaccagtagcagctgagggcaagctgtaccacgtacccactggacccagggtgtgcgtgcaaggtgctcccacctcaccaggcctctgtaacgctatcctgctccgcctcgacaggaggctgtcaggactcgcaagtaagtatggatttggctatacgcgatacgccgatgatctggccttcagcggcgatgacgccaccaaagtggcacggttactgaaacttgttcccgcgattgtggccgccgaaggattcgcggtgaacccggtcaaaacaagagtgatgcgtgccggacagagacaagccgtgaccggcgtcattgtgaataaagccatgggcctttcccgtcaggagcgacgcaagttgcgcgctgctctgcatcagcaaggcacagcaggtgcggacccgggagatgagttgcggcttcacggaaagcttgcatacctgttcatgctgaataagcttcaagccgctgctctaggctggaggcaggggatgaggcctactctgacaaacccaccttga

SEQ ID NO: 13837 - RNA, 1344 nt, synthetic construct
  source 1..1344: mol_type = other RNA
atgactcacctcgccgcgctggtgttagcctacttccttgttgtgggcatacggaccgcttggagaaaccggaaacgcaaacaggcggagaagaagtgggcccaggctccccagagagacgtgtctgccgtcgctgacgtcggccaagctgagttcaagcaggagatcatcaagacctctgggaccctgaagccaaaccacagacggttgatactgcgggacaacagactcttgccaaaggctcctccagacccgaagcaaaggagatggcctcccccccctagaactaaatatcttacggaacatgaagcggaccgactttttgggccctcacttcggacgcgtaatcgcgacgtcatggatctggccattgatgaggcacagctggaacgctatggactcccagtctggaagaccgaggatgaggttgctgccgctctctccctgacccctggtaagctgaggtacttctcccagcacaggttccgtgaaactgctagtcactatgtgacctttgccattcccaaaaggtccggcggggaaaggcttattcatgccccaaaacgtcagttgaaggccgtgttacggcgcctcaatacattgctggtgagcaagctccctgtgagtaaacacgcccacggcttcctccagggacggtcagtggcaacaaacgccgccccgcatgtgggcaaagccgtagtcctgcatttcgatatcaaggattgctttcccagcatccattacgggagagtgaggggtttgttgatagcactggggtattcttacccggtcgcggccgctctagcagtcctaatgacagaatcccccaggcagcctgttgttgcagagggaaagacttatcaggtgccaatcgggccccgcgtgtgcattcaaggagcacccacctctccaggcttatgtaatgccatcctgctccgactcgatcaccggctagcgggtttagcccgaaaacacggctttgcttacacacgatatgcagacgatctaacgtttagcggaaacgacactaaaaagattgctaagctgcttaaactggtgcctcagattatcttcgaagagggatttgcagcaaatactaagaaaacccgcgttatgagagcaggacgccgccaagccgtaacaggcgtggtagttaacaaggatatgggtctgagccggcaagagaggcggaacctgcgtgctgctctccatcgacagaatacatcacctaatacaaatccaagggaaaggatgagactggagggcaagctggcatacctgtacatgctgaaccgcgaccaagcttcggccctggggtggaaaaaacctgccagaagtgtatga

SEQ ID NO: 13838 - RNA, 1341 nt, synthetic construct
  source 1..1341: mol_type = other RNA
atgagcagctttctgttcgccatcgccgccatagcagccgtcattgtctggcagcgaagaaaagagattgtgcggacactgaggtggaaacaccaacccatccgcaatgtagcagcgctggccgtcaccgacgatgcgagtgttgccgaggaagtcatcacgaccgccggaccccttaaaccacagcaccggcggcttattctgcgcgacaagcgactgttacctaagccccccctcaaattcgatagatacgtatggccacgcccgaagcagcctagggtgttcactaaagcagaggccggcaggctctttagcgccactctgcgaactcgcgacagaaacatccgcgacctggcaacagaccctgaacaactagcaagatatggcctccccatatgggaatccgaggctgacctggccgctgctttgagcatttctgtgggccagctccatcattactccatccatcgtgagcgggagcgggcatcccactatgtgtgtttcgccgttcggaaacgtggagggggcgagaggctcatttacgccccaaaaaggaggctgaaagaattgcagagacgcctgcacgatctcttggtgcgcatgctccccgtgagtgctcacgctcacggatttgtccctggccggtctatcgctaccaatgcagcaccgcacgtagccaaggccgtcgttcttaagtttgacattaaggattgctttccaaccattcattttggcagagtaagaggcctgctattagcttacgggtattcttatcccctggcaacaaccctggccgtgctaatgacagaggcgcctcgacagcccttcgagatcggaggagctctctactacgtgcctgtgggccccagagtgtgtgtgcagggtgctcctacatcacctgggctgtgcaatgctgtcatgttgaagctggaccgtaggcttgcgggtctggctaaggcgaacggattcgcatatactaggtatgccgacgatttgacttttagcggcgataaggaggaagctgtggataggctcttagcctgggttccgaggatcgctgaagccgaggggttcgccctgaatgcctcaaaaacgcggataatgcgccgggggggtaggcaaacagttacaggtgttatcgtgaataagtcagcggggttgtctcggcaagagcgcagacgagtgagagcagaaatacatagattgtcccagagtgctacggctccagaaaacggagccacccagcgcttacggggcaagcttgcctacctgaacatgcttaacccactgaccactgcaccactccttgcagctttcgcccgactgtcggggcgtacctga

SEQ ID NO: 13839 - RNA, 1287 nt, synthetic construct
  source 1..1287: mol_type = other RNA
atgggactgattgactggctgcgggcactagtgggcaaacccaggcaggttcggcgcaacgtcagcacaatagctgcaacttccggcgctgcccctgctgaacaaacggaggaaatcgtccagactgaaccacagccgatgaaaccactgcatcgcaggcttaccttccgcgacgctaggttgctgccgaagcccaaaagaaagtcaggacagttcacttggccacggcttaagaaaaagagatatatgcaggcggatgaagcatgcagacttttcagcaccgccctgcgcacgagggacagatctatccgggatctcgctacggacaaggcacagctcagtagatatgggttgcctgtatggcataccgagcaggacatcgcagctgcgctggctctgacaccaaagcaactccagcactactcgatccatcgttgcagggagacaagcccccactatgtggcctttgccgtgcctaaaagaggaggcgggcatcggattattcacgctcccaagcgcagacttaaagccatacagcgaaaactcaacgagctcctcgttgagatgctgcctatctcctcttacgcccatgggtttgtcaagggtcggagtattgcaacaaacgctaaatctcacgttggaaaggccgtcgtgctcaagtttgaccttaaggattgctttccttccatacacttcgggagagtgcgcgggctactgattgccttgggttacggttatcccgtagccgcgacacttgcagtgttgatgacagaggcacctagacagcccgtggaggtcgatggccgcctctatcacgtgccgaccggacctcgtgtttgtgttcaaggcgcccccacctcaccaggcctgtgtaatgccgtcctcgtgaggatggaccgacgtttgggcgggctggctaggaagtacggcttcgcctactcccgctacgccgacgatctgaccttcagcggtaacgataccgcagctgtacgccccctgctgggcattgtcccacgaatcgtgcaggaagagggctttactatcaacagcggaaaaactcagatccgacgtcggggacggcgacaaagagtgactggcgtgatcgtgaatgaatgtgccggcctgagtcgccgagagaggaggagattaagggccgcgatacacaatcagcagaggcacggggcggaagggaaatcacggaggcggctaggagggaagttagcctacctgaagatgctgaatcctacccaagcaggtccattaattgccgcctttcggtctgcttga

SEQ ID NO: 13840 - RNA, 1290 nt, synthetic construct
  source 1..1290: mol_type = other RNA
atgcccggcggcaatcctgtaggcctgctggattggctggccagttggttcggtggacggaggcgctacagggatgtgtcaggcctggccgaagccgatgcagacttgacccgggaaagagttgacacaggaggcggcccactaaagccacagcacctccgccaagcggttcgggatgccagactccttcccaagcctcagcccactgcaggaatgtgggtgccgggccaaaaaaagaaagtcatgtcacagcgggaggcagacaggctgttttccgccacctttcggacctgcaatcgaaacctgcgagatttaaccacagacgaggagcagttgaggagatacggactgcctgtgtggaaatcagaagccgatgtggctcgcgctctgcagatatctgaggggcagctgagacattatagtatccatcgccaaagagagacaagcccacactacgtgacattcgctctcaacaagcggcgtggcggtcaccgcttgattcacgctcctaaacggcgcctgaagcaactccaaagaacgctggacgctcttctggtcaagaagctgcccgtgtctactttcgcccacggctttcgcgcaggcagatctgtcgcatccaacgctaggcagcatgtcgggaaagctatcgtgatcaaactggacctccaggattgtttcccaagcatccattttgggcgtgtacgcgggctgcttgtggcactggggtattcgtatcctgtgtccactactctcgccgtggtgatgaccgagagtccgagacagcctgtagccgccgaagggaaaatttaccacgtgcccgtcgggcctagagtctgtgtacagggagcgccaacgagccccggactttgcaatgcagttctcatgcgattggaccgccgactggccggattagctggcaagcacgggttcaccttcacccgatatgcggacgacttgacatttagcggtgacgatccggccaagatcaagttgctcctgacaattgctgcctgcattgttagggaggaaggatttcggctaaacccacagaaaacccgtgttcttcggcagggcgccaggcaacgcgttactggtgtcgtggtgaacgaccagcccggactttccagaactgagcgtaggaagttaagggcagcaatacatagactggacccagctgatgaggcagcctgtcggcgaatcgaaggtaaactcgcctacttacagatgttgaatcccgatcaggcggcccctctaaggtctgcgttcgtggctgctcggggtagggggtga

SEQ ID NO: 13841 - RNA, 1275 nt, synthetic construct
  source 1..1275: mol_type = other RNA
atgggcttatggaactggcttaagacttggctgcgaccacaccccatcacacggaatatcgctaacctcgacggcgatcaagcacagtcagtgaccgaggtggtggataccagcggaggcccattgaagcctcatcatcagcgtcttgctgttcgcgatgtgagattcctcccgaagcctcagcgcccatcttccttaccgtcttggagccgtcctgcgaagcccgtcgtgttctccaagtcagacgccgaacgttttttctccgcatctcagcgcacaaaaaaccggcagctgcgagacttagccagcgataccgaccaactgcagcaatacgggttgcccgaatggaactccgaagatgaggtagccgccgccctgggtctgacggttagtcagcttcgccattacagcatccacaggcagagagagactagccctcactacgtgatgtttgccgtgcccaaaaggcaggggggacataggatcattcatgctcctaaaagacgcctgaaaaagatccagaggatgctgctagctgaactcgtcagtaaactgcccgtcagtgagtttgcccacggcttccgcagacagaggtcagtcgcaaccaatgctacccatcatgtgggcaaggccgtggtgatcaaacttgacctggcagactgttttccctctctgcactttgggcgggtgagaggcctcctcattgccttgggatatagctacgtagtggcaacaactctggcgatcgtaatgaccgaagcgattcggcagtcagtcgaggccgagggtaagatctattatgtccctgtgggacatcggttttgcgttcaaggtgcccctacatcgccagggctgtgcaatgcgatattgatgaggctcgaccgcagactggcaggactcgctgctaaacacggtttccagtattccaggtacgcagacgatctgacgttcagtggagatcaccccgcaaaagccccctatctggtcgcccttgccgggaagattattcgagacgagggcttccgggtaaacagaaagaagactcgagtcttgaggccatctcgtcggcagcagataacaggggttgttgtgaatcaacacgttggcctctccagaactgtgagacgccgactgagggccgctatccaccaacttagcgccaatgatgtgcacgctcggaaccagattattggcaaaatagcttacctgcggatgctaaacccagatcaagccgcaccactccaggcggctctagacgcaaagttgcagaattga

SEQ ID NO: 13842 - RNA, 1281 nt, synthetic construct
  source 1..1281: mol_type = other RNA
atgtcctttctgaactggcttacaagtctgttcaaacccaaacctcctgctcggaacataagcggattagcaggcactgacgccatcgaggtggaggaacacgttgacctgtccgggggacctctcaaaccaaagcagctgcgactggcgacccaagacaaacggctcttgcctaaggctaaaaaggctatcgatccacgcaattgggtgccgaggaaaaagcctaagatcatgccccgggaagaagccgacaggaggttttctgaatccttgcggacatccaataggaaaatttcaactctggcctctgatgtcgaacagttggagagatatggactccccatttggaatagcgaggccgatatcgccgctgcactggaaatgtctacctcccaattaagacacttctcaattcaccgccaacgagagacatcgccccactatgttaccttcgcgattagaaaacgcacaggtggtcatcggctgattcacgccccgaagactagactgaaacgaatccagcgccaacttaacgagctcctggtgtcgcgcctccccgtaagtgacgctgctcatggattccgcgcccagagaagcgtcgccactaatgcagagccacacgtgggaaagcaggttgtcatcaagctcgatcttgctgattgctttccaaccatacattacggtcgggtgcgaggcatgctcatcagtctggggtactcatatgaggtggctgcggtgctcagcctgctctgcactgaggccgagagacagcctgtagctgccgacggcaagacctacttcgttccgatagggccaagggtatgtgtccagggtgcacccacctcacctggcctatgtaatgccgtgctgctgcgtatggaccggagactcgcaggccttgccaagaaatttgactttcagtacacgcgctacgccgacgacctgacacttagcggggacgatgcttctaaggctaaggtcctgattaggcttgccaaggaaatcgtgcaggatgaagggttcagattaaacagcaaaaagacccgtgtcgtccgccatggccagaggcaaagggtggcaggagtggtggtaaacgaccagaaagggttgtctcggacggagcggcgaaagctgcgtgcagcaattcatcagctggatcccgctgatgagaaaagtgcaaggcacttgaggggcaaggttgcctatctggcgatgctatccgaacagcaggcggccccattaagagcagccttggccgtgaagctaagcggcgatgcatga

SEQ ID NO: 13843 - RNA, 1302 nt, synthetic construct
  source 1..1302: mol_type = other RNA
atgtcctttctggactggctcaagtccctatttaggccgaaaccggcgacacgaatcgttgctgggctcagcgctgcagacacatcagccgacgcagccaaggtgcgagaggtggtggacacctctggcggtcctctcaagcccggacactgccgtagagcactgcgcgatagtaggcttctacccaaaccgaaacctaagtctcaggggtacgtgtggccaaggccacccaagcctaaatatctggaccggtccgaagcggaccgactgttctcaacaaccctcagatgcagggatcggaatttacgggatctcctgcctgatcccgagcagttagatcgctacgggctacccctctggcagaccgaagccgatcttgccgaggccctcggcatctcagtcggcatgcttaggcactactcactgcaccggatcagggagacgacaccccattatgtaacctttgccattcctaaaagatctggaggtgaaaggttgatccacgcaccaaagcggcggctcaaggctattcaacggagactgcatgagcttctcgtctcccgcttacccgtttccgcagccgcacacggattcaggtcgggtcgctcggttgctactaacgcgcacccccatataaacaaggccgtgctgatcaaactggacctgaaggattgcttcccaagcatccatttcggccgagtgcggggcttgcttgtggctctgggatatggctatcaggttgccactgtcctggccgtgctcatgactgagccccctaggcagcccgtagagattgacggaaagcttgtctacgtgcctgttgggcctcgttcttgtgtccagggcgcaccaacatccccagggttgtgtaacgccgtcctgttgaggcttgatcggcgcctggcaggtttggccagaaagtacggatttgcctacaccagatatgcggatgatttgacatttagcggggacgacacggctaaaataaagctgatgattaccctgagtagcaaaattgttagagaagaagggttcagcctgaaccggcaaaaaacccgtgtgctgagacgaagtcgccgccaaactgtagccggtgtggtggtcaattctactgtaggcctcagccgtagagatagacgccgcttaagggccgagatccaccagctgtctcaggctgctaagccaccagacagtcacagagtgcagcgactggcaggcaaactcgcgtacctacatatgctgaatgctgaccaagccgctcctctgctggtgcagttcgctcggttgggagacggcagctga

SEQ ID NO: 13844 - RNA, 1323 nt, synthetic construct
  source 1..1323: mol_type = other RNA
atgcccctccctgccgtgcgtccagtaacaggcacccccccttcccatagcacattgcctgcccttgagcgtgctcggccagcacagccacagaccctccaacctccacccactcctcagctgcagcgcgctccaacccctcctccacaagctagtgaaccccaggaggccggcgtcgaacagtctcagcacagacgactggctgtgcgagacgagaggctggcccagaaactggtcaccactcagcatgcggtgactgctaggcggcccagtaagcggtctttccacagagatgaggcggccaggatgttttcatccactctgaggacgcagcggagaggaataagagacttggttaccgatgaacagcaactggtgagatacggcctgcccatttggcgaacagaggccgaactggcactggccttacaggtaggactcaaagcactcaggcattatacagtgcaccgcgcgcaggatagggtgctccactacgtgacgtttgctatccccaagcgctcaggcggcgaacggcttatcaccgcaccgaaaacccgccttaaggcgctccagagacgccttaacgctctactggtttcgaagctccccgtgagtgaatacgcccatggtttccggactgggcacagcgtgcttaccaatgcaaagccgcacgtgggaaaacaggtggtcctgcgtctggatatccatgagttctttcccagcatccacttcggacgggtgagaggcctgtttttggccctcggttacgggtacccagtggccacagccctggctgtactgatgacggaggctccccgccagcccgttcagattggagaggtttgcttgtaccctccttgcggcccacgaacatgtccacaaggggcgccgacctcccctggtttatctaatgccctgcttgtccgcctggatcgtaggttggccggcctagccaaacaacgggggttctcctatacccggtatgctgacgacctgactttttcaggagacgacattgcagcagcacacgcgctaagactggctgcagcaagggtcgtcagggaagaaggcttcgagctaaatgttaagaagactcgtgttgccagaagagcaagccgacagctggtgaccggagtcatagtgaaccgcgtattggggctttcccggcagacacggaggaggttaagggccgccgtccaccagtatttacaagcccatgccgctggtgctgccgatccacgaacactggcaagactcgacgggcgcatcgcctatctctctatgctcaacagcgagcaagctagacgcttgactatggactga

SEQ ID NO: 13845 - RNA, 1260 nt, synthetic construct
  source 1..1260: mol_type = other RNA
atgggattttttagctggatttggcggttactgggattcgccccccggaggaacgtgagcagattggacaccggggacgaagacgtggtacaggaagtcgtggacctcagcggcgatcccttcaaagaacaccaccggagaagggcgttacgcgacggcagactgttgccgaagagacgccagcacacgttctgggggtctaggaagaggtacctgagtaaagaagaagctgataggctgttttccgacacaatgaggacctgcgataggaaaatacgagatctcctgccagatgaagaacaacttgctcgctatgggctgcccccatggcggacagaggaggatctcgcaagagcattgggccttacactgaagcagttgactttctacgcacttcaccgggagcgagagcgtttctgccattacgtttcctacgcacgcccaaagaggaacggtggagagcgtatcattatggcgccgaaacgccgtctgaaagagctgcagcggaagcttgtcgacgacctagtgcggcatctgcccgtgtcggagcatgcccatggctttcgcgagggccgctcagtgaaaactaacgccgagccacacgtgcgcaagactgtggttgtcaagtttgatctaaaggactttttcccctccgtacacgtcgggagagtgcgaggctacttaatatctctgggctatgggtatcctgttgccaccagtatggccgtcctgatgactgaggcagaacggcaaccagtcgaaatcgatggcgaacggtacttcgtgcctgtgacctctcgatattgcgtgcagggtgcccctacgtctcctggcatctgtaatgccatcttgctcaaactcgatagacgactagccggtcttgccaggtccctggagttcgcttatacaagatacgctgatgacctcactttttcaggcaatgacgtgggagcggtcgagcgcctcagaaaatcagtgcagcggatcgtccacgacgagggattcagggtaaatagcgaaaagacccgggttatgaaaagaggtgcctgtcagagagtgacaggagtggttgtaaacgatggagttgggctgagtcgtaaggagcgaaggagactgcgcgctatggcccatcagctgcggcaaagcgcaaacggtgaagagtccaaggccgcaaggctgcgcggaaagattgcttatctcaggatgcttaatcctacccaggctggggctattgagcgacactggtcaaatcgtgggtga

SEQ ID NO: 13846 - RNA, 1260 nt, synthetic construct
  source 1..1260: mol_type = other RNA
atgtcgctgtgggactggataaaagagagactgttcggtgtcccaccttcccgggatgtgtcacggctcgaacccggatctggacagcgggacgccgttacagaagccgtagacacaggagggggccctctaaagcctggccataggcgcagggcgatcagagacagacggctgttccctaaggcacgcacccctattggcaggaggccacgggtgatgaaacctcacgaggccagacgactctttagcgcttccctccttaccaggaataggagcatccgcgatctggctccggacgaggagcagctaaaaaggtatggcctgccactgtggcggacagaggacgatttggcacgggcgctcgaacttagtctcggccagctccgatggctatcaattcaccgggagcgcgaaagttgcccccactatgtgacattcgcaattcctaaggccacgggcggagagcgactcataatggcaccaaaacggagactgaggagggtgcagcggagactgcacgaacttctggtcagcaggctgcccgtatctcctcaagcccacggtttccgtccccgccgttccgttaagaccggagccgagcagcacctgggtaagccgatcgttcttcatctggacctcgcggatttttttccaactctggcttggcatcgggtgcgaggccttttgatcgcttacggctatagctatccagtggccactgtcctggccttattaatgacggaggccgagagacagccggtcgaggttgatggaaagctgtttcatgtgcccgtttcaccccgatactgtcccccaggagctcccacatctcccgggttggggaacgctctgctgctgagattggatagacggcttatcgggcttgcacgcaagttcggcttcgcatacactcgctacgccgatgacttaaccttttctggggaagccgagcgcaaaattgcttacgggctagtgtgccgtgtccgtgaggtagtcgaagctgaaggtttcagtctgaatgacaggaaaacccgatttatgggaagcggtagacgccagactgtgaccggggtggtcgtgaatcgcgtgctcggcttgtccaggaacgaacgcagaagattgagggcagccctccatcaacaccggggggaacccgatccgcaattgctgggcaagctggcctacctgtggatgctcaaccctcagcaggccatggcgttatggcctgctgactggccacgtccaagacgagcacgctga

SEQ ID NO: 13847 - RNA, 1251 nt, synthetic construct
  source 1..1251: mol_type = other RNA
atgagcctgtggaaatggctgagttcaaagttgactggcaagccgcccagaagagacgtctctcgtttggaatcggaagacgaagaccaagtatctgaggcagtagatgtgtccggcggaccactgaagccagaccatcggcgccgcgctctaagagatcggaggctattaccaaaagctcagccaccggttcggtttggcaagaagaaacggctgatgagtaaagcagaggcccagagactgtttggagcctcaatgagaacccgcaatagaacactgagggaccttctcccagatgtcgagcaactgacacggtatggtctgccagtgtggaagactgaggaggaactcgccacagccctcgggctgacccagagacagctgtggtttttcgccttacaccgcgagaaggagagggcggcccactatgtgacatttgctatccctaaaaggggtggcggcgagagacacattatggcccccaaacgtcgcctgaaggctttgcagcggaaactgctcggtctacttgtcgaaaaactgcctgtgcatgaggcagcccacggattccgcaaaggacggtccataaaaagcggcgcagcattgcacgttggtaagaagctggtacttaaggtggatctcaaagacttctttcccaccgttaccttccctagggttcgcggcttgctgattgcttacgggtacgggtatcctgtggccaccgctctcgccctgctgatgacagagagcgtgcgacagcctgtggaagtagagggcaagctttaccacgtcccagtcggaccccgacattcagtgcagggagcccctacctctcccggcttgtccaacgcgctcgtccttaggatggaccggcggctgactggacttgctcggaagttcggttttgtgtacacgcgatatgcggatgacttagcattcagcggggatcatgatcacaagaccggttgggggttactgcagagagcccgtcgaatcatcgccgaagaagggttcgccgtgcaccccgacaagactgtgttgatggggagcggcaggagacagtccgttactggcgtggtcgtgaacaggacgctggggagatctcgccaacagaggcgaaggctccgcgcagcactccatcgtcgaagacaggctgaggctcggctcaggggacagctagccttcctctggatgcttaatcccgctcaagcatccgcgctgtggcctgaagagtggaagaaaccccaaagttga

SEQ ID NO: 13848 - RNA, 1221 nt, synthetic construct
  source 1..1221: mol_type = other RNA
atgtcctggctggattggctcaaacaaaagctgctgggcattccgcctcagcgcgacatctcacggctggaaggctcaagtgaggaggttcgggaacaggtggatgtcagcggcggtcccctcaagcctaaacaccgcaggcgcgcacttcgagacaggagactcctgcccaaggcaagagcccctttgggaaaacgcccaaaacagatgagtcatagccaggctcagcggctattttccgcctctcagagaactcgcaatcgacagcagagggatttgttgtgtgatcccgaacagttgcagaggctcggcttgccagggtggcgcaatgaggatgacctagcccactcccttgggcttacactccggcagctctggtcttacagctattattgtcaggccgagaacgctcctcactatgtggcttttgccgttgctaaacggagcggcggagagagaattatactggctcccaagcgtagactcaaggccttacagcggaagctgcttgatctactggcccagcatctccctgtgtcgccagctgcgcatggcttccgaaagggccgtaacacgcttagtaatgcacgggagcacgtcggccagaaagtcgtggtccgatttgacctgcaagacttcttcccccattgctcctggcagcgtgtaaggggactgttggtggcttatggctatagctttcctgttgcaacctgccttgcgctgcttatgaccgagagcgaaagacagccagtggaaaccccggccggactggtatacgttcctgtcaggcagcgatactgcgtgcaaggggcacccacttctcccgcactggcgaacgccctgacactcaagctggacagaaggctctcaggtctggccaggaaactggggtttcggtacacacgatacgcagacgacctgaccttcagttcatccgggttagcaaggctcggggtacttaagagagccgtgacagccatcgttgaagccgagggtttccggttgaatgattctaagacccgcgtgatgcggcaaggtcgtcggcagacggtgactggggtggtcgtgaaccaggtcgccggcttatccagacaacagcgcagacagctgagagcagctctgcaccaggctgctggacaaccagacgcgcacctgcgcggaatgttagcctacctacatggactgaactctgagcaagccaggaggctgcaaccaccgtga

SEQ ID NO: 13849 - RNA, 1314 nt, synthetic construct
  source 1..1314: mol_type = other RNA
atgcggcttctgatccttatcgctttaggctttctgttctggcgcctgtggaagctttggaggcagctgcgattgagacaccaggcccgccaccccgttcgagatatagccagactggtagacgatgcggacagtgatgcccgaggcgacactgtcgaacgtattgatatgtccggtggcccattgaagccgggtcataggaggcgtgccctcagagacaggagactgctcccaaagcccaagcgggactggtctgacccgaaacctccgaaagtgatgagccttgacgctgccacgaggctctttgcggggacacttcggacaagagataggcatgcccgagatctcgacactgatgccgagcagctggagagacacggactgcctccttggaggtcagaagctgaagtagccgcggctctaggcattgaggaaaaacgtctccgccattatgcgatccaccgccaaagggagcgcgtggtgcactatatcgcctttgccattgctaagcgcaacggaggggagcgagtgattttggcccctaagaaggaactgaaagcactccagcgcaaactgaacaagctattagttgacaagctgcctgtgagcgatgccgcacacggatttcgccccggaaggagcatcgctagtaacgcggccccacatgcaggcaaagccgtggtcctcaagttggatctggagaacttcttcccttcgctgcatgtgggacgcgtacgggggttgctcatcgcactgggttacgcataccccgtggccgctgggttagcagcgctaatgacagaatccgaaagacagcccgttgtggtggacggcgagactttccacgtccccacttcaagtcgtcacgctgttcagggcgctccaacctctccaggactggccaatgccctggcactgcgtcttgatcgcagattgacggggttggcaagagcgcatgggtttgtctatacccggtacgctgacgacctggccttctcttcagacgacgtcgcaacagcccggcaactgctgaaaagagcagagagcgtcattcgggccgagggctttagggtcaatcgagctaaaacccgggtgatgacccaagcttccgcccagcggatagctggggtgaccgtgaatgccgcaccaggttggagcagggctcagaggagaaaattaagagcagaactgcaccgggccagaacatccggcgctaccgatccctccctctggcagaagcttcgcggcaagctcgcattcgttaggatgctaaatcgggctcaaggagagcggatggcacgagccgattcttga

SEQ ID NO: 13850 - RNA, 1308 nt, synthetic construct
  source 1..1308: mol_type = other RNA
atgagagtgctgctgctgctgttcgtaatctacgtcttttggcagattttcgtccgcttctggcccaagagggcaaccagagatttatcacgattggagaatgcagacgacgatgcagctgatgaggaggtcctcgaaacagtggcagtggatgggggccccttaaaagaacatcacaggcgccttgcactgcgggatgctcggctcttgcctaaggctaagccccgagctcatacttggccaccaaaaccgaagcctaaggtgatgtccatggatgaagccactagactctttgcgggcacgctccggacaaaaaatcggaaactgcgcgacctcaggtctgacgacgatcagttgagaaggtatgacctgccaagatgggcatccgaggaggatatagccaacgccctcggaatttcagtggcccgaatgcgctactattccatacatcgggaaaaagagagagtgagtcactacgtcagctttgcgattcctaaacgtagcggtggagagcgcatcatcatggctcccaaacgggagctcaagaagttgcagagggacctcgacaggctgcttgtgtctaagcttcccgtgtccgagtacgcccacggctttcgcaaggggcgcagcatcgctagcaatgcaagtgcgcacgtagggcgcaaagtagtggtgaagctggacctcaaggacttcttccccagcttacatgtgggccgtgtaagggggctgctgatcgcccttggctactcatatccagtggccgccaccctagctactttaatgactgaggccgtgcggcaacctgtccaagtcggcgacgaaatttttcacactcctgttggaggacgtcatgccgttcaaggggccccgacaagtccaggactggccaacgctctgaccattgctcttgatcgaagacttgccggggctgcccgggagttgggttttacctacacccgttatgctgacgatctaacattttctggcgacgatgcaggcaaagcaaggcagttgatcaggacctgccagcgaatcgttcacgctgaaggattcgccttgaacgacgccaagacccgggtcatgacgcagagaggggctcagctcgtgacatctgttaccgttaaccgtgaaaagggtctgtccagacggaggaggcgcctgctgagagcagagctgcacagagcccagcgagaaggaggtgacgcgacactgtggcgcaaactgcggggcaagctagccttcgtgtcgatgctgaatgccaggcaggcggatgcacttgccaaaaacgttagattccctggctga

SEQ ID NO: 13851 - RNA, 1311 nt, synthetic construct
  source 1..1311: mol_type = other RNA
atgccgcgcgccttccgacgaggaggcactatttttaggagtcccagacgcttcagccatactgtcgaagaggctggccccgagcggaggagaagtccaagaagatggctcactccatgtgcttcttccacccggggcgcctctatgtcactttggcagcgcttacgagactggatacagccagcacccccagccgcaaagcctccagagcaggtgagcatctgcgaggaacctgcacatccaagccccgaatttaataggcgctttacaacctcccttagatctgccgatcctagtcagacgcgtcgtagaaccagatccgggcgcttaaggcaacggggtctacccgtatggcggtgtgacgacgacgtcgcccaggcattggggctgtcactgagcgagctctatcacttcgcctgccaccgactagccgaccctcacctgcactacgtgcggttcacaattcctaagcggggtggcgaagagcgccccatactagctccgaagccgaggttaaaagctatccaacgcgatcttctggaactggccctgcatcagctgccagtacaccgggcagctcacgcgtttttgcccgggagatcaatcgcaacacatgcccggccacatctgcagcgggagtttttactgacgctcgacctccataactttttcggggctttgcacgttggcagggtcaggggcttccttatggccatgggttatgggtgggaggtggcatctacgctcgccctgctgtgcactgaggctcccagacaggccgttctggtccacggagagcgcctgtacacccctaccgcttctcgaagcctgcctcagggagcgcctacatcacccatgctggcgaacgctatcgtgtgccgccttgaccgacgcctaagtgggttggcccggtcccttggcctgaactataccaggtacgccgacgatctgacttttagcggagacgatcctacaagaatcgcatcggtgatgcgactcacacaccagatcattgccgaagaaggcttcgaactcgcgaccgcaaaaactcgcattcagcggagaggccaaaggcagcaggtgaccggcgtggtggtcaatcagacacctggagccccgagagctaggcggagaaggctgcgtgccgcaatccatcggtacgctcaggcttgttcccgcggagaggatgatccactcaggaggcgtcaactcgaaggggagctcgcattcattcacatgttgaatccagcgcaagctcgtgctctggccgcaggtttgccagatggaccccccgttgccaacgccagatga

SEQ ID NO: 13852 - RNA, 1164 nt, synthetic construct
  source 1..1164: mol_type = other RNA
atgaacctgtggcaacgtctaagggactggatgcagcctgcaccatcccctgaacatcccggcgaaatttctatctgtaaagagcgtgaacccccctcccctggattcaatcgcagatttaccacttcgatgcggagcgctcggcacgatgaactcaggcggcgtacaaggagtgggcgactccgaagacttggtctacccgtgtggagatgtgacgacgacctggctagagccttggggctgactacctccgccctttaccacttcgcctgccatcgtctcgctgatcctcacttccactacgtgagcttcactatacctaagcgttctggcgaggagaggcccatcctcgcgccaaaacctcgcctgaaggcaattcagagagatttgcttgaccaggccctgtctcgcctgccagttcatcgcgctgcccatgcgtttgttcccggcaggtcaatagccactaacgccagaccccatctgcggcgcgaattcctcctcacactggatcttcacaacttttttggtgcactacacgtggggcgggtaaggggttttttgatggcgatgggctatgggtgggaggtcgctagcaccctggctctgctctgcaccgaagcaccccggcagacagtcctcgtacacggagagcgcctgtacactcccaccggtagtcgcacgcttccgcagggagctcctacctctcccgtcctcgctaatgccattgcgtatcggttggatagaaggctgagcggcctggcccgcagcttaggattaaattataccaggtacgccgacgacctgtcattctcaggcgacgatccgacacgaatcgccacgctgatgcggttgagtcaccaaatcatcagagaggaaggctttgaggtggccccatccaagacccgcatccaacggaggggcagacgacagcaggtgacaggagtggttgtgaaccagacacctggggcaccaagggctaggaggcggagattgcgcgccgctattcatcattatgcccgagcttgcgcccgaggcgatcacaacccaagacgcagacggcagctggagggagagcttgccttcattcacatgatcaatccggcccaagcaagggccttagcagcagggctgcctgcagcaccaccagcagctaatgcgcggtga

SEQ ID NO: 13853 - RNA, 1170 nt, synthetic construct
  source 1..1170: mol_type = other RNA
atgtcactgtggcagagacttcgtgattggcttcacactgacactcagccagattccacccccacacctgcccccgatagtgcacctccaagcagccctcctagcgcgactcataaccgacggttcaccgcttctttaaggacccatacccccgcccagtctttgcgacgtacacggtctgctcgcctgaagaggcacgggctccctctctggagaaacgatcaggccctggccgcagatctcgatctgtctactccagagttataccatttcgcctgtcaccgcttagcagacccccatagacattatatttcattcaacataccccgccgtagtggagctagccgcgctatccttgcacccctgcctagacttaaagccttgcagcgacgtctgctggccctcgcacttcataggctgccagtgcacgatgctgcccatgcatttgtgcccggacggagcattgcaactaacgcccgcccgcacctaggtaaggcgtttgtgctgtcacttgacctgaaggactttttcggttcactgcacctgggccgggttagggggtacctcttggctatgggctatggctgggaggtagcatcgacactggccctcctatgcaccgaggcacctcgccaacctgtccaggtgcaaggcgaagtgaggtgggccccagttggcagtcgcacgcttccacaaggagctccgacatcccccgccctcgctaatgctatcgcctacagactggatagacgcctgaatgggctcgcgcgctccctgaacctcacatatacgagatacgccgacgacctgagctttagcggagacgacccacaggtcctcggttcgctgttgcggctaacccaccagatcgtggtcgaggaaggcttcgagctagccagtcacaaaaccagggtccagaggcagggacaacggcagcaagtagccggcgtgatcgtgaatcaggttctcgggcggtccaggcaggagagacgacgattgagggctgccattcaccggtatgcaagggctcaggccagaggtgaatctcacccggcctggcgactggaattggaagggcggttggcgtttctgcatatgctgaatcccgctcaggcgagggcactgtcctctggtttacctgacgagcccccaggagcttccgccagatga

SEQ ID NO: 13854 - RNA, 1365 nt, synthetic construct
  source 1..1365: mol_type = other RNA
atgtccaggcgcgggggtaagctttgtcggtccctgcttcacgggtcacactcttcagataagcggggcaatagaagcatcaccgagatcgttgcggcctgcctgctctgtggttggctgttcgcgatatctttaccattgccgcatttccgaaaggagaggaccgcaatgaccaacgccgcagacgtgctgcaagcctggagacttaactggcagcccgacgagtttgagtggcgttctctcacatgggagaatagggtcgacctcaatagagaagagcgggagcagaggaaacgcgaacgggccaggagagacaggctatccttcggcgggaggctatggggggtaggtcaagctcatcggtccgccgaactggattcagaacgtctggctaggtatggcctgcccgcatttgcgaacgagcgtgccttagctgaatggctggggattagcctcaagcgcctacgctggtattcttacgatcgaaaggtatcacccatctatcactacactcggtacacactgccaaaacgtggcggagggcagcgcgtcattctggctcctaaacggactcttaaggctatacagcataagatcttgttcgaactgctggcgaaagtgcctaatacagatgctgctcacggatttattaagggcagaagcatagctaccaacgccgctcctcatgtcggaaaggcttgcgtgttgaacctcgacctgaaagacttctttccgagtatcacctaccctcgcgtgcggggactctttgtggcactgggatacggatttacaatcgccagcgtgctggccttgttatgcacggaaagtgaaaggatcagcgtgcagagaggcgacaaaacacgctacgtggccatcaacgcgcggcatctcgttcagggagctcccactagtccagccattgcaaatcttatggctagaaggcttgatgcccgcctgcatggcctcgcagctaaacagggtgccgcttataccagatatgccgacgatctcactttctccgcggagtcggctgaagtggcaacaagactgttgcgtgccgccaagcgaattatagccgatgaggggctcactctgcacatggggaaaattcgctttttcaggcagagtgccagacaggtagtcaccggacttgtggtcaatgataaggtcagcgttccccgggacttgcgcagacgagtgagagcaatcctgcaccgcgccgttcaaacgggcttagcagcccagaacagggagggccgacaacacttccgggcatacctacacggtttgatcggccatattgccctgcagcacccagagcaagccgcacagatgctcgcaaaactgcgggagattcgagactga

SEQ ID NO: 13855 - RNA, 1188 nt, synthetic construct
  source 1..1188: mol_type = other RNA
atgacatccgacgcgcttagggcctggcgcctgtcttatacagatgaagagttgcagtggaggtccgcagactggaggagcgagcagtcagagtggcgggctgaacgcgaacaacaacgccgcgagaggagacgtagagacagacgctactttggagttggattgaattcacagaatctgagccgaagagccctgaacgaaaagaaactcacagcacagaacctcccaatactaaagaatgagaaagcactcgccgaatggctgaacgtggaattgtcacggctgcgatggtatacttacaatcagactaccagttctgtctatcactacgtgaggtatgtccttcccaaaagatccggcggtcagagggtgattcttgcaccgaagaccgggctgaaagctattcagagaaaaattctggccgagatcttgaataagatagtgctcacagagcccgctcatggcttccggaagggccgtaacatcgtcaccaatgcttcgcctcatgctggtaaacctttcgttctaaacctggacctgaaggaatttttccctagtatcactttccggcgcgtaagagggctcttcactgggttaggatacggctacaccatcgcgtctgtcttagcgttgctctgcactgagagcgaccgggagatgattcagcgaccagacaggccctactacgcaggtctgagccctcgagccctcgtgcaaggtgctccgacctctccagctctggccaatctggctgcaaggcgtctggataagagattggcgggcctagccgttaagcggggggttacatatacacgttatgctgacgatctgacctttagcggggaggaccgcgatgtgctgtttaagctcatgaaaaccgccgggcacatcatcgccgctgaaggcttcactgtgcacccaaagaaaacccgcttttaccagagaggacagaggcagatcgtgacaggccttgtggtgaatgataaggtcaacacgcccaggcaaatgcggcgacaagtgcgggccatactgcacaacgccgcccagaccggactcaatgcccagaacagaatgaaccatcccaactttcggggatatgtacttggcctgattgcacacattgggcagacggcacctgatttagccgccacgttccgcggccagcttgtagcactgagtgattcctga

SEQ ID NO: 13856 - RNA, 1188 nt, synthetic construct
  source 1..1188: mol_type = other RNA
atgtccgaccagtcagtactgcgggattggagactcaactggcacgacgacgagtttaaatggcgtcccgatcagagctgggcacggagaggccagtggcttgaagagagggaactcgctcggcgagctcgaagaagacgggatcgtggttttttcggcgatgagctctgggggactcccttgttcaaggccctgcacactccagcagctctggaacggttcggtcttcccgccttcgaaaacgaggcagccttggccatctggctcggaatccctctgacccgacttaggtggtatactttcagcaggcttggatctccagtgtggcattacgtccggtacgttatccctaagcgctccggaggcgagcgcgttatcctagcacctaagcgagaactgaagggactgcagcggaaagtgctcagagagattctggaaaagctgccactgagcgagccttcgcatgggtttcgcaagaccagatctattgtcacaaacgcggtgccccacacaggcaagaagtacgttttgaatctcgacctgaaagacttttttcccagtataacgttcagaagggtgagaggactgtttgtgtcacttggttacagcttcgccgtgggcacaaccctggccttgttgtgcaccgaatcagatcgtgcagtgatgcaaagaccggatcagaggtattacgtcagcttaaaccctaggcatattattcagggagctccaacctccccctacctagccaatctaattgcgagagatctggacctgcgcctcaatggccttgctcggaaacaccaggttgattatacacggtatgcggacgacctcacattttctggtgacgacctcgatgcgatcctgcggatcctgtccgtcgctaaagtcatcataaaggaagaggggttcgtattaaaccccaaaaagactcgactgtacaggaggtcagggcgccagagtgtgacgggactggtagtgaatgagaaagtgaataccccaagggagatgcgtcgccttgtgcgcgctattctgcacaatgcccagaaaggcgggctgaactctcaaaatcaggccaagaggccaaacttccgcgcctatgttcaagggttaattggccatataggccaaagtgacccgaaccgagctgcagccttgttacgccagctcgcagccatccctgattga

SEQ ID NO: 13857 - RNA, 1128 nt, synthetic construct
  source 1..1128: mol_type = other RNA
atgtccactttcagttcattcatcaagaacatcaagaagggctttaccggaaagaacaagaagcccgaaaaggagattcagagccccaagattgccgtggccctttccagcgatgtctcgaaagtgccccagaaacttgatgatgttagtctgccagtgctccggggaaagtatgcgcttgcaaaatggttaggaatatctgccagcaggctgacctggttcacatatgagacaaagtacaattctgtgtggcattatgtccggcatatcatcccaaaacgaaatggtggagagcgggtaatactggctcccaaacgcgagctgaaggccctccaacgacgagttttagacgggatactcaaccaggtgcccacctctccacaagcccacggcttcgtgatgcaacgttccatcactactaatgctagacctcacgtgaataaagcggttgttatcaacctggacctgaagaatttctttccttcagtcaccttgccacgcgtgctggggatttttcggactctggggtataacaaagaggtggcacttgcactcgccagactgtgtaccgaatgcgaccgggaggtaggccctcacttggattctaagtacaaggacaaggaatttttcgtgagcgtaacccccaggcaccttgtgcagggtgctccgacgtcccctgccttaagcaatttggtctgctggaagctcgacaaacgcctgaatgggctcgcacagacctatcaatttacatacacaagatacgcagacgacttgactttcagcggcgatgacatacagtacgtggagctgatcctgaaagtggctaacggaatcgtaagggatgaaggcttcaaagtcaacaaagataagacgcatgtcttttatccttcctcacgccaggtcgtgactgggctggttgtcaacgacaaagttgccaccccgaggcagctgaggcgtcagatgagagcgattattcacaacgctcagtttacaggcctcgaagctcagaattacgagcaacatcctaactttagataccacttgctaggcgtggccgagttcatcggtagtacacatccagataaggccgaacagatgaaacagattattcacgctctaccatcatga

SEQ ID NO: 13858 - RNA, 1134 nt, synthetic construct
  source 1..1134: mol_type = other RNA
atgatcgattggtatcagcagtggcgcggggaggtggagcaaagaaggcaggaacgggaaagaaggaggttggagcgacctctgcaggatcggcgatacttcggcgaggaaacgtggggggcatccgcagaacatctgaaagccgagacagacgaaccgtgtctgcagcacttgtatctcccactcctacggagtgaaaaggagctggccgcttggttgggaatccccctcacgagactgcgctggtttaccagggaccaaccggcagacacagtatggcattacgtcgcccattctgtccccaagagatcgggcggacaacgccttattctcgctcccaagcgcgacctcaaagcacttcagcgtcatgtgctgcaccacctgttgaaccacgtgtccgtgactgagatggcacacggcttcgtcgctggtaggagtattattagcaacgcgcagcctcatgtgggcaaagaaatcgtcctcaacttcgatctggctgactttttcccttccatcacattcccacgtgtccgcggcctgttcctcagcctgggttacagcttttctgttgcttccgtgttagctctgctgtgcaccgagcacgagagggaggccttcgaccatgatggtactcgatactttatatcagtaggtcccagacacttggttcagggagccccaacctcacccacacttgcgaaccttgctgcggcacgcctagatcggcggcttgctggactggggagggtccaaggattcgcctacaccaggtatgccgacgacctgactttttcaggcgatgaggtggctggggcctattggctattaaagagcgtgccccctatcgttagagaggaaggctttgtgattcacgaggggaagacccggctgtttcgtcaatctgcccggcaggtggttacaggcctggtggtgaatgagcagctcggaactccaagagaactgcgccgaagagtacgggctattttgcacaaagcccaccagaccgggctcgaagcccagaatcacgatgggcatgccgacttccgagcgtacctgcagggattaatcggctttatacatgaagccaatccagcccaggctgcacctcttagggcagccttagccgcactgtga

SEQ ID NO: 13859 - RNA, 1383 nt, synthetic construct
  source 1..1383: mol_type = other RNA
atggcgaactttttcagacgcctcttcagacgcaacgccttaaaaagcgacattgtggcggacgccccacccgttactccaacaatcgtgccgaccccgcccgaagcattggtcatgccaacagcggctctccctttgcagacgcctatacaggtggaacaagtggcccaagccgccggtgctgtcgcttatgttattctgccatccgcatcagccgagccaaccccaacacctgtagcagtgcccgacgctaccccccttcctactgttacggtgaacggcgtcgcttacgctcaggatgacctcgacgaacgcgcactacgtgaccgggcaaccttcggcgatgaactgtggggaatcgcaaacggtaaggaggcaaatacaactgacgccgagaaactcgcccgcctgggcttaccactcctactgagtgagcaagacgtcgccgatctgctgggaattcctctcaacaggctgaggtggttcacttttgatcgcgctgccgataccacttggcactacgtaaggagggtggtgcctaaacgatctgggggggaacgggtcattctggccccgaagcaagaactcaaagctttgcagcggaaggtgctttccgatattgtgggccgagctcccgttgcacttgccgctcatggcttcgtccctgggaagtccacaattaccaatgcaagacagcacgtcgggaaagcggtggtcctgaaactggatttgcaggatttctttccctctatcacatttgcccgggtgagagggctgctgatcgcgttggggtatgcctatgctgtcgcaagtacgcttgcgctcttgtgcacagagtacgatcgggaggagtacacccgcgacggaacgagatacttcatcagcgtggggccaaggcatctggtacagggtgcccctacttctcccactctggctaatcttgtgagctggcaactggaccgaaggttaaccggcctcgcaggagccttcgactttacttatactcggtacgccgatgacctggtcttttcgggagataaccccgatgtagtgcagaagcttcggttccttaccgaacgcataataagggacgagcactttaccgtgaatcgaaagaagacccgggttgcaagacagtcagcccgacagatcgttaccggcttagtggtgaatgaagccgtggcaacaccccgtgacctgcggagaacactgagagctatcctgcaccacgccgagaaagagggactcgcccagcagaacagagagggaaggaaggactatcctgcctacctgcagggtatgatcgcttatgtaaatgcagctagcccccgccatgccgccgttttgcgtacacagctaggcaagctgaggggccaggcttga

SEQ ID NO: 13860 - RNA, 1263 nt, synthetic construct
  source 1..1263: mol_type = other RNA
atggaagccgccacagccgcggacgacattgatgaagtgctggaaggtgaagggcaagatgaggatgaagatggcgccgattggtttcaggtcagcaagcatggcttcgaagtatcagaagacgacgacgatgacattactctgcagggtcctgcctacagtggacatactgggcagcgtgcacctcagcacactgcggacagggcctattttggcgaggagacatggggagtgtcggctcgtcaacggagcgcagagatacagcccgcccagttagctcgctaccagctgcctgtcctgcggagcgaggttgacctcgctacatggctgggcatccctctgtccaggctccgttggtatacacacgatagaccagccgagcgaacttggcactatgtcaggtatgctgtgccgaaaaggtcaggccagggagagcgggttatcttggcccctcgccgggagctaaaggccttgcaaagaaaggtcctgaagggtattgtggcaaaggtgccggtagccgcaacgacccacgggtttgtcgccggaaggagtacactgtccaacgctagcgaacacgctgggaaaggggtggttctcaagcttgatctcaaagactttttccccagtgtgacgttccggagggtacgcgggctttttaccgctctcgggtactcttacgcagtggcgtctgtgcttgccctgctctgcactgagtacgacagacagccattcgagaggagcggcgaacagtactacatctccgtcggccccagacatttggttcagggtgcgcccacatcccccgggttagctaatctggttgcatggcggcttgacaggcgcctagctggcttggcttccaaacgtgggtttgtctatacccgctatgccgatgacctcactttctctggagaggacgcagaagctgctgcacgacttggagctgccgccgctagaattatagccgatgagcaattcaccgtaaatgcaggcaaaacccggctgctgagaagaggaggccgccagacggtgaccggactagtggtgaacgcatctccagccaccccaagagaattacgacgcaggttgcgcgccatcctgcataatgccgcgagagacggactggatgcccagaaccgggaggatcgaggccattatgcggcatacctgggtggcctcatcgcatacgtgggctcagccaacccctcacacggtgacgtgctgcgccgacaattccggaggcttgttaccccaagagagtga

SEQ ID NO: 13861 - RNA, 1536 nt, synthetic construct
  source 1..1536: mol_type = other RNA
atgcagtatgaagtgcgtctggccggttatcccgatctggtatgcctttgcagggctggaggcggtggctccagatcaacaggtttcgccgtcagccggagcgagtgtacatttatgaacctggcctcactgctcctggagctcaaacccttactggctgatccggaagctaattttgaccgcatcacagaactgctggaccggcaccagggactggcagaatacgaagtcgccagattctatgttagacgcgtgtggcaggccccagtggagtcacgattgagatcgatggatgcccgcgagcgattaaaggggattcgtcagctccctctgctgttttcttcagcaaccgcagcaaggctcctgaggcagcgggttaaggatcccgacacccgcgtggcacaagcagcacgtgcaagcgttcgccggcttggcctagctgacgtctctttgccggaccggagagtgaaacccggccgttctgctggctctataggacggtggaatccaacaggctggaatttcgggctgttcgggaacgagctgtacggcttcagtaggaaggcgaagcgaccaccccctagagtgggcgagctacctgaactaagaacgcgggctgatgtggcggaactcgttggggtggaggagaatgcgttggacgccctgatgaggccaggaactgaaagcgggagtggatacgtggagtttgaggtgcccaaacgtaccggaggtgtgagaaggatcagtgcacccaggcagaagcttaaggaggtgcagcgcgctctcttagacaaagtactagctcgcatgactccacatccagcagctcatggtttcattgagggccgcagtacggtgtccaacgccgaaccccacgtaggagcaaccgctgtggtccgggtggacattgaagattttttccccactgttcactaccggcgagttaagggattgttcctcgcttacggctatggagacgaggtcgctggggtacttgccggccttaccactcacagaacaaagcttcctgacggtaccgtcgcctggcctggagtccttccccaaggtgcccctacttccccggcgatcgccaatttggtctgtagacggatggatgccaggctcactgccctggcgaaaaaattttccgccatctacaccaggtatgccgatgatctgagctttagctttagagagcctccagagcggttaggcaggttcttctggtggctgaatgctattctccagcaggaagggtttgccgaaaacggaaagaaacgccgcgtgatgagacaggggtcccgccaacgagttaccgggctgacagtcaaccagaaggtgtctatccctcgtgaagagcgaagaaggtttaaagccatattggccaactgccgacaccatggggtagccgcccaagctagaggcaggcctgacttcgagaggtggctggaggggtacgcggcttatgtgcgcatggtccatccagagttgggcgccaggtggcagcgggaagtgaaggagctgctcgcacggtga

SEQ ID NO: 13862 - RNA, 1428 nt, synthetic construct
  source 1..1428: mol_type = other RNA
atgaatctcgcgagtttgttacttgagctgaagcctctgctagccgatcctgacgcaaacttcgaccgaattacagatctgctggagcgccatcagggtctggcggagtatgaagtcgcccgattttatgtgtcaaggagctggaaggaaccagtagaaagcagactgagatccgtggatcccagggaacggagcaagggggtgagacagctgcccctgatgttttccgggacggtggccgctaggcacttgagatctcgggtcaaagacgccgattcccgcgttgcttcagctgctagggccgctgtgaggaaactgggccttgcggatgtagctccccccgacagcagagtcgctccctcaaggcaccatggccgacggtccgttggaggatggaaccctactgggtggtactttggcctgtttcgctatgagacacagggctggtccggcagcatgaaacggccaccacctacaagcggcgagcttcctcgtctctctacccgcgcagacgtggccaaattggttggggtcgacgaaagtgagctggacgccttaatgcgccctggtaccgaggccggatccggatacgtggaattcgaagtcccaaagcggagtggaggcgttcgccgcatctctgccccacgacaaaagttaaaagaagtgcagcgtgccctgctggatcaggtgctcgctagaatgaccccccaccccgcagcacacggcttcatagagggccgatctactgtctcaaacgcaggtccgcacgtgggctctactgtggtcttgcgggtggacctcgaggacttcttccccaccgtgcattaccgtcgggtgaaggggctgttccaagtgcatgggtacggggaggaggttgctggtgtgcttgcgggactgacaacccaccgccctaagctgccagatggtacagtcgtttggcccggagctctccctcagggagctccaacaagtccggcaatcgcaaatcttgtgtgtaggagaatggatgccagactcacggcacttgccaccaagttcggcgcaacctatactcggtatgcagacgatctgtctttctcctttagggcgcctcccgagaggttgggtcgatttttctggtggattaatgccatcctacagcaggaaggctttactgagaacgggccgaaaagaagagtgatgcgccagggatcaaggcagcgcgtaaccgggctaactgtgaaccaaaaggtcagcatcccacgggaggagaggaggagatttaaagccattctcgccaattgccgacggcatggtgtcgcctcgcaagctcgtggccgtccagacttcgagcggtggttggaagggtacgccgcatacgtacggatggttcacccggaactcggagccagatggcagcgcgaggtaaaggaactgctcggcaggtga

SEQ ID NO: 13863 - RNA, 1422 nt, synthetic construct
  source 1..1422: mol_type = other RNA
atgggcatggacctcgtgggactgcttctggagctcaaacctcttatggcggacccagaagctaatttcaagagaatcactgccctgctggagcagcaccagaatcttgccgagtatgaggtggctagattctacgtgtcccggcagtggttggctccagtgggacgtatgttgaggagcgtcgatccccgcgagaggcaccaaggcacacaacagataccactgctattcgcaagagccacggcgagtgcacaactccgtcgtcttgtcaaggatccagacaaacaagtagccggcgccgccagagcagcagttcataaactggggttagccgacgttgcaccgcctgatcgccgattcaagcccccacggcatcctacaccccaatcacgaggcgggtggaacccaaccggttggaactttggactgcccatgcgatggggcggaaggccaaagaaacagcccccgctgaaaggtaagttacccaaactctccactcgcaaagatgttgctgagttggtgggtgtccaggaagaggagttggcagctctaatgaggcctgggaccgaggcaggaagcggatatgtggaattcgaggttccgaagaggtccggtggcgtgcggagaatttcagcgcctcgcgccaagctcaaagaagtgcagagggctattctcgagaagatcctggaacagatgcccacacacgatgcagcacacgggtttgtcaaggggagatcgaccgtatctaatgctgaacctcatacaggcgccaccgtggtagtccgcgtggatctcgaggacttttttcccactgtgcactatagacgggttaagggcctgtttcaggctcacggctacggggacgaagtggctcgaacattggccgggctgagcacccatcggcctaaactgcctgacggtacggtggtatggcctggcgcacttccccagggagctccaacctccccagccatcgcgaatctcgtctgtcgccgaatggatgctcggctcactgccctggccaaaaaagccggggccacctacactaggtacgcagatgacctgtctttcagctttgagaaacctccagaaaagctgggtaggtttctgtggtgggtcaacgccattctgcagcaggaaggattcctagagaatgccccgaagcggagagtgatgaggaagaacagtcgacagcgggtgaccggattgacagtcaacgaacaggttagtatcccccgtgaggagcgcagaaggttcaaggctatattaaacaattgccggaaacacggcgtcgagtctcaatcaaggggccgcaaggacttctctggctggctgagagggtacgccgcgtatgttaagatggtgcatcccgaattgggagagcggtggcagcgcgaggtgaaggaacttctgggggaatga

SEQ ID NO: 13864 - RNA, 1416 nt, synthetic construct
  source 1..1416: mol_type = other RNA
atggacctggtcggactgctgctcgaactgaaaccacttatggccgaccctgaggccaattttgaacggataactgaactcctcgagcaacaccaaggcctagctgagtatgaggtggcacgcttctacgtttccaggcactggctggaaccggtaggtcggatgttgcgatccgtcgatccaagggagagattgcaaggaacaaaacaggtgcctctcatcttcagccggggaactgccagcggccaattgcgaaggttagtcaaagatcccgatgagagggtttcacgtgccgcacgagcagctgtccataagttgggcctcgcggacgtagctcctcccgataggcgtttcaaaccgcccaggacccctagacctatggccctggggggatggaaccccacaggatggaactttggaattcgaaccgggagatgggctagcccaaagaaagccccacctcttaaaggtaagttacccaagctggccagtagacaggacgtggccaagctagtgggcctagaagagaaagaactggacgcccttatgaggcctggtacagaggcagggtccgggtatgtggagtttgaaatagctaagcggagtggcggtgtaaggcggatctcagccccacgggccagactcaagcaggtccaaagaactattctggaacagatcttgtctcacatgccgacccacgaggctgcccatgggtttgtgaagggccgcagcacagtgtctaacgccgctccacataccggagcaacggtggtagtccgggtggacctggaagacttctttcctacagtccactaccgccgagttaaagggctctttcagtctcatgggtacggcgatgaggtggcgtccactttggcgggcctgacgacgcacaggcccaagttagctgatggtacagtggtttggcctggcgcacttccccagggtgcaccaacctcacccgcgatcgccaacctggtgtgtcggcgaatggatgcccgcctgaccgcacttgctaaaaagtacggcgccacctatacccggtatgctgacgacctctccttcagcttccaggcaccccccgaaaagatggggcgctttatgtggtgggtcaatgctattctccagcaggagggcttcgcagagaacaatccaaaaagacgtgtgatgagacgggcccacaggcagagggttactggccttactgtgaatcagcaggtgagtatcccaagagaggatcggcgccgcttcaaagccattctggcaaattgccgcaagcatggagtggcttcgcaggctcgtggccgcaaggacttcgagtcttggctgagaggatacgcggcctacgtgcgcatggttcacccggaactgggggccagatggcagcaggaggtcaaggaactgctggggggatga

SEQ ID NO: 13865 - RNA, 1443 nt, synthetic construct
  source 1..1443: mol_type = other RNA
atgtcactcgtaggactactgctcgaactgcgacctctgctcgctgacccagatgctaacttcgaccgcgtgtcggaactgttggaacgtcatcaggggctggcagaatatgaggtagccagattctacgctgggcgagcgtttgttgggcctgtgggcaggctgctcgggtcagaagaccccagggagaggcttcgaggcgtcaggttagtgccccttctgttcgctagagccaacgcagcccagcaccttcgccgaatggtgaaggacgccgataatgcagttgctcacgctgccagagccgctgttagaaccctgggactcgctgacgtgtctccccctgacagacgtgcaccagcaccgaggtttccctccccaacagctaggggcggctggaatccaaccggctggacttttggattattcaggaatcactacgtattccggcggggtgccgcagctactactaacgcccccttaacggctccacctaaggcggacgttcccgagctgaagtcccggaacgatgtcgcaaagctggtcggggtaaaagcgagtgccctgccctcccttatgcgtccaggcacgggtaaagggagcggatacgtggagtttgaaatccccaagcggactggtggcttgcgcaagatctccgcacctcgggtgcggctgaaaaacgtccagcgagccattctgcgcgaggtgctggagaagctgcccacccaccctgctgcacatggattcgttgaagagaggagtacagtgacaaatgctacccctcatgtcggcgcgtcagtggtcgtgagagtggatatcgaggattttttccccaccgtacattacaggcgggttttgggctttttcatgagatactatgacgaaaaggtcgccgctgcactcgccggactaaccactcatcgcagcaagctgccagatgggactgtggtttggccgggtgcgcttcctcaaggagcccctacatctccggctttggccaacctggtctgcaggagactggatgcccgtctggatgcactcgcaagaaaatctggtgccacctatacacgctatgccgacgacttgacatttagctttcgcgatcctccagcccgcctgggtaggttcctctggtgggttaatgggattctccagcaggagggatttgccgagaatgtcaaaaaacggcggattatgcggaagggcggaaggcaacgagtgaccggactcgtggtggccgagaagccagccataccacgtgaggacagacggcgcttcaaggcgatccttgccaactgtagaagacacggcgtggaaagccaggctaggggcaaaccggatttccccgcctggttacgcggctacgcagcatatgtgcggatggtgcacccagaattgggggccaagtggcagagagaggtcgaagagatacttctaaaaaaatga

SEQ ID NO: 13866 - RNA, 1425 nt, synthetic construct
  source 1..1425: mol_type = other RNA
atgtccctggtgggcctgttatttgagctcaagccattactcgaagaccgggagcgcaattttgataggattgtcgagctgttggagaagcatcgcaatctggccgagtatgaggtggcccgattctatgtgtcgcggaattggctggaccccatatccaagagacttgcatccattgaccctcgagagaggctgaggggggtgagactcatccctttactgttcgccagggccaccgctgcacaacatctgaggcgcatggtgaaggacgccgatatggctgtagcgagtgccgcaagagccgccgtccattcactggggatagccgacgtcgctcccccagatcgtagagcaccaccccccagataccctgggccaagtgccttgggcgggtggaatcccagtggctggactttcggcttgcatcgcgatcattgggctttcagggcgaacagagcgaaggcgaagaccccccctaaagcagatgttcctcccctgaagacaccaaaggatctggccgccttgctaggtgtcaaggtgacagctctgcgctctctcagccgtcctggtaccggacctggtagcggatacgtggaattcgagatccctaaacggactggaggggttagaagaatctcagcaccgcgaatgccgctgaaacgcgtacagcgtacaattcttgaccagattctggcaaaacttcccgcccacccagcagcccacggatttgtggaggagcgctctaccgtttccaacgcttcaccccacgtgggagccgccattgtcgtacgggtggacatcgaaaacttctttccaactgtgcactacagaagagtgttcgggtttttttttcaacactacggagaagaggtcgctaaggccctcagccagctcactacacatcgacccaagttgcccgacggtaccgttgtgtggccaggtgccttgccacaaggggcacctacttctcctgccatcgctaacctcgtatgccgtcggcttgatgccaggctggcagctctagctaaaaaagcaagcgctaattacacacgctacgctgatgatctaacgttctctttccgggacccccctgacagacttggccggttcttatggtgggttaacgcaatactccagcaggaaggctttacggaaaacgtcaaaaaacggaggatcatgcggaaaggcaacaggatggcggtcaccgggctggtggtgaatgacaaggtgggaatcccgcgagaagatcggcgacgcttcaaagccattctgaacaattgtcggcaccacggagttgagagccaggcgaggggcaaaccggactttgctgcatggctgcgcggctatgccgcttatgctaggatggtgcacccaaagcttggcgagaagtggcagagggaagtcgaagaactcctggccaagtga

SEQ ID NO: 13867 - RNA, 1407 nt, synthetic construct
  source 1..1407: mol_type = other RNA
atgtccctggtcagccttctgttcgaattgcgccccttgcttgccgaccctgaggccaactttgaacgcattgtcctgttgctggagcgaaaccaggatcttgccgaatacgaagtcgcccgcttctatgccagccgaacgtggttaggacccctcggccgtatgatggagagtattgatccaagggagcgtctgagagctgtgcgcctggtcccactgctcttcgctagagcacctgccgcaggacacctgcgaagacttgtgaaggatgcggacagtcgggtcgtcaacgcagctagagccgcagtgcggaaactgggcatcgccgacgttgccccaccggattctaggttcaccgcccctaggtggccaagagcaactgctgtgggcggctggaatcccacagggtggtccttcggcctctacaggtcagggtccgaaaagtccccgccacccgcaacagatttacccgctttaaggtcgcgagcggacgtcgcgagactcgttggagtggacgaggccaggctggtggccctaatgcgtcctggctcaggacctggttctgggtatgtggagtttgagatccctaaacggtccggcggcaagcgcctcatatcagctccgagggcggagctcaaagcagtgcaacgggcgatccttgacaaagtgctcagcaaaatacctgcacaccccgccgcacatgggtttgtggagggtaggagcacagtcagtaatgccgctcctcatgtgggtacccagagggtggtgcgggtagatattgagtcattctttcccactgtacactaccgcagggttaaggggttgttcgaggcttacggatacgacgaggtggtggccgccaccttagctggcctcacaactcaccgggctaagcttcccgatggggcagtcgtgtggcctggagcactaccgcaaggtgccccaacttccccagcaatcgctaacatcgtttgtcggcggttagacggccgactgagcgctctagcgagaaaggtaggtgcaacctatacgagatatgctgatgacctgagcttctctttccgggaacctcccgctcgcgttggtcggtttctctggtgggtgaatgccattctgcagcaggagggatttctggagaatctgcccaagaggagggtaatgcggaaaggggggaagctgagggtcaccggactctctgtggacgaaaaagttagtatcccacgcgaagaacgtcgcagatttaaggccattttggccaactgccggcaccatggcgtagcctctcaggctcgtggccgaccagattttccaagatggttggccggatatgctgcatacgttagaatggtgcatcccgagctgggggaaaagtggcagagagaagttgccgagctgctggcccgctga

SEQ ID NO: 13868 - RNA, 1419 nt, synthetic construct
  source 1..1419: mol_type = other RNA
atgaatctggtggggctcctgctagagctgaagcctctcatgatggatcccgaggccagctttgacagaatcgtcgaactgctggagcacaaccagggcctggccgaatatgaggtggcacgcttttacgttgcccgcgcgtggaaggacgcgatagaatcgcgggtcagatcacctgacgctagagaaagactacgcgccgctcgcctaattccattgttactggatagaaccagtgcagctcgactcctccgacgtctggtgaaggatcccgataccagggtgtcagcatccgcacgagcagctgtgcgaaagttgggcctggctgacgtttccccccccgatagtcgagaggagcctccaagccatcctcacccatgggctatcggagggtggaaccccacaggctggtcctatggcctcttccccgaaacctctaaagccgtgcggaagcgtcctccacctgtgactgaggcccttccacctctccggacaagggaggacgtggctaagctgctgggtctgggtactgctgatctggacgccttaatgaggcctggtgccgaatctggctcaagctacgtcgagtttgaagtacctaaaaggagcgggggagttcggaggttaagcgctccccgcccaaagctgaaggcagcacaacgggccttgctcgaacaggtgcttgccagaatgccatcccaccctgccgctcatggattcgtcccgggaaggagtactgtcacaaacgctcagccgcacgtaggcgccaccgtagtggttcgggtcgaccttgaagacttctttccatcagtgcacttccgcagagtgaaaggcctgtttgaggcccatgggtatggcgaagaggttgccaccgcgttagcggggcttaccacctatcgcgccaaacttcccgacggcactgtggcctggccaggagttctgccacagggtgcacccacgtctccagcgatcgccaatctggtgtgcagaaggatggatgctcgacttgccgccctggccgccaaagttggagcaacgtacacaagatacgctgacgatctcagcttttctttccgtcagccccctgagcgtttgggaaggttcttctggtgggtcaacgcgattctccagcaagaggggttcgcagaaaacgggcccaagcgcagagtgatgcggcaaggaggcaggcagcgggtaactggtttgacagtgaatgaacgcgtcagtatccccagggacgagaggcggagattcaaagctattctcgctaattgtcggaaacatggggtcgattcccaggcaagaggacggccggattttcgccgttggcttgagggctacgcagcatacgtgcggatggtgcacccggagttgggcgagacatggcagagggaagtaaaggagctgctggccacctga

SEQ ID NO: 13869 - RNA, 1419 nt, synthetic construct
  source 1..1419: mol_type = other RNA
atggacctcgtgagtttgctacttgagctgaaaccactgatggaggacccagaggcccacttttctcggatcacagagctgctggaaagacatcaggggctggctgaatacgaggtagcgcgcttttatgtgagccggcactggtcagaggtggtgaccaagagactgggatctgtagaccctcgggagcgcattcaagccgtccggttaatccccctcttgttcccacgggtgacagcggctggacaccttaggcgcagagtcaaagatgcggactcacgcgtggcctctgccgcaagagctgctgtccggaagctgggactggcagatgtctccctgccggatagccgtgaagaaccacccagacgaccatcaccccatgccttgggcggatggaaccctactggatggcactttggcctttaccctcgaaggagggaagatctcgtgaagagaaagccctctgtcaccgcaaaactgccaaaactgcagtcgcgggatgacgtggccaagttggtcggggttgacgtggccgagctcgatgctctgatgaggccgggatccggagctggatccggatacgtggaatttgaaacacctaagcgctccgggggcatgcgcagaatatgcgcccctagggccaagctaaaggccgcacaacgcaacctgctggagggccttttgacccatctgcccacacatcctgcagttcacgggttcgttccaggccgtagtaccgtgacgaatgcagaggttcatgtaggcgcccatgtggtcgtccgagttgatttagaggatttctttcctactgtacactaccgcagagtgaaaggctttttcgaggcccacggttacaatgacgaggtgagctctacccttgccggcctcaccacttggaggcccaagctgcctgacgggactgtggtatggcctggcgttttgccccagggtgctccaacctcacccgccatcgctaacctcgtgtgcaggaggatggacgctcgtctgcacgcgctcgcgaagaaagccggggctagttatacacggtacgctgatgacctctccttcagcttcgtgaagccgcccgaaaggctgggcaggttcctttggtgggtgaacgctatcctgcagcaggaaggttttagcgagaatgccgcaaagagaagggtgatgagacaggggggtcggcaacgagtcactggcctgacagttaatcagagagtgagcattcctcgggaagagcgtcgacgtttcaaagccattttagccaattgtcgcaaacatggtgtcgaaagtcaggcaagagggaggcccaacttccccgcatggctcgaagggtatgcagcatatgtccgaatggttcacccggaattaggcacgcggtggcagcgcgaggtgaaagagctcctaaacccatga

SEQ ID NO: 13870 - RNA, 1419 nt, synthetic construct
  source 1..1419: mol_type = other RNA
atggacctggtgagcctgcttctcgagcttaagccgttaatggaggaccccgaagcgaacttccagcggatcacagagctgctggagcggcatcaggggttagccgagtacgaggtggctcggttctacgtgtctagacactggtcagagactgttagcagacgtttggggagcgtggatcctcgtgaaaggctcgaggcggtgcgactgatccccctactctttccccgagtctcagctgctggacaactgaggaggcgcgtgaaggacccggattccagggtgggaagttgcgccagagccgcagtcaaaaagatggggctcgccgatgtgtcactgcccgactccaggattgctccacctcgccggcctagtccaagagcacagggcggttggaaccctacaggatggaattttgggttgttccccggactcagagcgacgccagtgaagaggaagccagcagatacccccgtcctaccagagctgcgtaccagggaagatgtagctaagttggtgggggtggagccctccgaactggaagcactaatgcggccaggatcaggtcctggtgccggctatgtggagttcgaaacacccaagcggtccgggggggttagaaggatttgcgccccacgggcacgtcttaaagcggctcagcgagcactgctggaaggactcctggcacgcatgcccacgcatgaagccgtgcacggctttgtctctggccgttcgcctgtcaccaatgccagggctcacgtcggcaaccaggtcgttgtgagagttgacgtggaagatttcttcccatctgtgcactacagacgggtgaaagggctcttcgaaagccatggatataacgaagaggtcgccagcactttggccggactgaccacttggaggccccgacttcccgatggtactgtagtttggcctggtgtgctgccccaaggggctccaaccagtccagccatcgcaaacttggtatgtcggcgactggacgcacgcttacatgcccttgccaagaaggctggcgggcaatacacacgctacgctgacgacctgtcctttagttttgccaaaccgcctgaacgcatgggccggttcctctggtgggtaaatgctatcctgcagcaggagggcttcgctgagaatagcgcaaagagaagggtaatgcgccagggcggaagacaacgggttaccggtctgacagtgaatcagcaggtcgccattcctagggacgatcgccgccgctttaaagcaatactggcgaactgtcgaaaacacggcgtggagtctcaggccaggggaagagccgactttccggcttggttggagggctatgccgcctatgtccgaatggttcaccctgagcttggcgagagatggcagcgggaagttaaagagcttctcggccgctga

SEQ ID NO: 13871 - RNA, 1047 nt, synthetic construct
  source 1..1047: mol_type = other RNA
tctcatccgcatgcgatgggagggtggaaccctactgggtggaattttggtctaagccctgggatggggggcagagtgaagaggaaaccgccctccactggacctttgcccgtactgcatacacgggaggacgtcgctaagcttgtcggcgtggacgctgctgagttagatgcgctgatgaggcccgggtctgagtctggctccgggtatgttgaattcgaagcaccgaaacggtcagggggcgtgcgtcgtctgtgtgcaccaagggccaaactgaaggccgttcagcgcgccatcctggacggcatactggcccatctcccaacccaccctgctgtgcacggctttgtcgctggaagatcaacggtgacaaatgcagagccccacgtgggcagcaccgtagtagtgcgagtggatgttgaggactttttccccactgtgcactatcgaagagtgaagggcctctttgaagcccatggatatggtgatgaagtgtcctcggttttggccggtctgaccacgtggagggcaaggctcaaagacggaacagtcgcctggcctggagtcctaccacaaggcgccccaactagtcctgccattgccaacctggtgtgcaggcggatggatgcgcgccttaccgcgttggcaaaacgggccggagctaaatacacaagatacgcagatgatctgacatttagctttcgcgagccacccgaaaggcttggtcgattcctctggtgggttaacagcatcttacagcaggaggggttcgccgaaaacgccgcaaagcggagagtgatgcggcagggcggacgacaaagagtgaccgggcttaccgtgaatcagcaggtcagtattccccgcgaggaacgcagacggttcaaggccatcctcgctaattgcaggcagcacggcgtagaatcccaggctcgtggtcgcgcagacttcgctgagtggctgcagggatacgcagcttacgttcggatggtccacccagaactcggcgagcgatggcaaagagaggtcaaggagctgttggcccgctga

SEQ ID NO: 13872 - RNA, 1416 nt, synthetic construct
  source 1..1416: mol_type = other RNA
atggatttagtggggctcctcctcgagcttaagccattgcttgcctcccccgaagagaactttgacagaatcgttgcgctgctggaaagacaccagggactcgccgagtatgaagtcgctcgtttttacgtgtcccgctcttggctggagcccgtagccagacgcctcaagtcagtagatcctagagagcggctacaggccgtgcggttgattcctctgctgtttgctagggcgagcgcagctggtcagttgagacgaagggttaaggatccagatagcagggtcagctcccatgcgcgcgcttcagtgcgaaggctgggtctagctgatgtgagtttacctgacacccgggctgatccccccagattcccttcggcaacagcagtggggggttggaacccaacgggctggtcatttggtctgtacccatcaatgagggccccagtgaagagaaaacctgccgccacgactgctctgccggtgctaaagacaagagcggaagtggcaaaattagtgggcgttcctgtctccgagctggacgccctgatgaggcctggatctgaggccgggagcggctatgtcgagttcgacgtccccaaacgaagtggtggagtgcggagattgtgcgcaccacgagccaaactgaaagctgtgcagcgcgcaatcctggacaacgttctggctcatctcccaacccacccagccgtgcacggctttgttcccggtcggtccactgtgactaatgccaagccccacgtcgggagtaccgtggtggtcagagtagatctggaggacttcttccccaccgtccattaccgccgcgtcaagggattgtttgaagcccacggctatggcgacgaagtgtcttctaccctagcaggattaaccacttggcggcccaggcttcctgacggcacagttgcttggcctggcgtacttccgcaaggggcgcctacaagcccagcaattgcaaatctggtatgccggaggatggacgcccggttgacagctctcgcaaagaaggctgacgcaacctacactaggtacgctgacgatctctcctttagcttccagaaaccgcccgaacgactgggcaggttcctctggtgggtgaatgcaattcttcagcaagaaggcttctctgaaaacgccgccaaaagacacgtaatgaggcaaggaggacgccagcgggttacagggcttaccgtgaatgagcaggttagtatcccgagagaggaacggcggcgcttcaaggccatactcgccaattgtcgtcagcatggggtggaaagccaagctcgtggccgcccagatttcgctaactggctgcaggggtatgccgcctacgtccgcatggtgcatcccgagctgggagagcgatggcagagggaggtcaaagagctgctggcccgttga

SEQ ID NO: 13873 - RNA, 1416 nt, synthetic construct
  source 1..1416: mol_type = other RNA
atggacctggctggcctgttgctagagctccagccgctgatggccgagcccgaaacgcacttcgaaagaattgtgggcctgctggaacagcatcaggggctcgccgagtatgaggtggcacgcttttatgtctctcggcattggatggactctgcatccaaacggctcggaagcgcggatcctcgcgaaaggttgcgggctgtccgtctcattccattgctgttcccccgtgcgatagctgcaggccaactgcgaaggcgggtgaaggacgccgactccagagttgccgctgctgcaagagccgccgtaaggaagctgggactggccgatattagtccacccgactcaaggatagaaccgccccgacaccccgggccaagaagtttgggcggatggaatccaaccggctggaatttcggcctgttccctgcggatggcgagagggtgaagagaaagcccgaagttgcaacgagattacctgagctgcgcgacagggcagacgtagcccgactcgtgggtcttgatgagcgtgagctggcggctcttatgaggcccggcagtgaacctgggtcgtcttatgttgagtttgacgtgccaaaacgttcaggcggtgtaaggcgactctgtgcaccccgcgctcgtttaaaggccgcacagagggctttactggataatctcctcacacatctgccaactcaccccgccgcccacggttttgtgcctgaacggagcacagtcactaacgcccagccacacaccggggcaaacgtggtggttcgcgtggacgttgaagattttttccccagcgtgcactatcggcgggtcaaaggcctctttgaagcctacgggtacggcgcccaggtagcttctactctcgccggacttacaacctggcgggctaaacttcctgacggaacagtcgcctggccgggcgtattgcctcaaggagctccaacatcacccgctatcgcaaacctggtatgccggcggctggatgcacgcctagatgctcttgccaagaaggcgggggcacgctacactcgctacgctgatgacttaaccttttccttcccgcagcccccagaaagactgggacgattcctttggtgggtcaatgccatcctgcaacaggagggattttccgagaacgccccaaagagaagggtcatgcgcggtgggggaagacagcgagttaccggcttgaccgtgaatcagagagtggcaatccctcgggaggagagacgaagattcaaggcgatcctggctaactgcaggaaacatggtgtggaaagccaagcccgcgggaggcctgatttccctgcttggttggaggggtacgccgcctacgtccggatggttcatcctgagctgggtgccaggtggcagagagaggtgaaagagcttctaggacgctga

SEQ ID NO: 13874 - RNA, 1404 nt, synthetic construct
  source 1..1404: mol_type = other RNA
atggctctcgccgaactgctgcttgacttgaaagagctcctgcagaaacccgatgaaaacgctgacgctatcgtgaaactcttagagcagcacgccgatctggcggagttcgaagtggctagggccgtggcaggcagagccgttgaagtaggggtggagaggaggctgaagaacgtcgacccaaaagagcgtctcgctgcggtgcgaagcctgtcaggactttttcccagggcacctgctgcccggctgttaagaaagatggtgaaagacccctccagatccgtctcggctgcagctcgggctggagtcagaaggctgaagttggcagatgtggccctgccagattccaggtggacccctgacagagaatcccccttggtgcccggcggatggaaccctagcggatggtgggctggcctgtttggccggtcttcaaagccgcctcccaaggtcagtctgcccaagctgagctctcgtgctgatgtagccaaactcgtcggcgtgacagaagaggagctgaccgcctttatgcgtccgggcagtgcgtcagggtcagggtacgttgagttcgatgtccctaagcggtccggtggaactcgcaggatagccgccccacgtgcgaaacttcgcactgcccaacgcgctctcctagaccaagtgctgagtaaaattccccttcatggcgccgctcacggctttgcgattgaccggagcgttgtgacaaatgcccagttacacgtgggggccagtatcgtcgtgaaggtggacttggaggagttcttcccttctgtccactacagacgggtacgcggcctgttcgaggcctacggttataataccgaagtggcatcaacgctggcagggctcacaacgtggcgagcaaaacttcccgatgggcgagtggcatggccgggttgtttgccacagggcgccccaacttccccagcaattgcaaatatagtttgcaggaggctcgatgccagactcaccgcactttgtgcccggtttggagccacttatacccgctatgcggacgacctggccttcagcttccagaagcaacctgagcgactgggccgcttcctgtggtgggtaaacagcatctgccagcaggagggctttagcgagaacgatggtaagaggagagtaatgagatctgggggaagacgcatggtgaccggactagttgttaatcagaaagtttctatcccacgagaagatcggcggcgctttaaggccatcttacacaatgtgaagaagcatgggctcgagtctcaagctcggggaagagaagacttcaagagttggcttgagggctacgcttcctgggtcaggatggtgcatcctgaactaggtgccaagtggcagcgagaagtcaaagcattgacacgcggtcaggggtga

SEQ ID NO: 13875 - RNA, 1422 nt, synthetic construct
  source 1..1422: mol_type = other RNA
atgggccttggggagttgctcgtagacctctctagactgctagccgatccagcaaaaaatgctgccagcatctacgccatgttggaagctaatgccggcttagcggagttcgaggtagccaggttttatgtggccgatgcgatgacagccgacgtcgcagagcggctgaaatctgtggatccacgcgaacgagtcgccgctgtggatctggtgaggctcgtctgcccccgtacctcagctgccaagcttttgcggtccgtcattaaggatcccgaccccaccgttagaaaacgcgcccgcgcaacagttcggaggatgatgattacggacgtggcactgaaggaccccagattcaagccttccccttgggcacgcggtccatttgctcctggggcatacaatccgtctggatggagttttggagtgtacgggaggaagcagaccggcagtgcagaccgaggggctctaggagcaaaagggttgccgcttctggagggagccgatgacgtggccaggctagttggccttgccgacggaaaggcgctgaggcgatttatgcgtccaggctcagccagcggctcaggttacgtggaattcgacgtgcctaaagctactggcggggctaggagaattgctgcgcctagggctccgttacgaagggctcagcgggtaatacttgaccagatcctcgccaaggtgccagcacatgatgcggctcacggcttcgtcagagggagaagcacggtgactaatgccgagccgcacgtgggacgcgcaatagttatgaagctggacctcgtggatttcttccctagtgtccattatagacgcgtcgtcggcctgttcgaacaactggggtatcccaccgaagcagcatcggcactggctggactctgcacatggaggccaaagctgggagatggtgccgttgcatggcccggtgtactcccccagggagcacctactagccctgccatcaccaacctggtttgtcgcagattggatgcgcgcctctccgcccttgccaaaaagatggggggtgtctacacacggtatgcggacgatctgaccttttccttccccgctgagccagaacgaatcggccggttcctgtggtgggtcgatcagatcgctctgcaggagggctttgttgagaacacaaagaagcggcgtgtgctgcggcgatctgcacaacaaagggtgactggggtggtcgtgaatgaacacccagcgattccacggaaggaccgccgtagaatcaaagccgtgctggccaacgtgaaaaaaaacggcttagccgccgaagctagaggcaaccccgactttgaggcctggctgcatggctgggtagcctacgccactatggtgcagcccgctctcggtgctcggtttgctgcagccttggctggagttgccccttga

SEQ ID NO: 13876 - RNA, 1452 nt, synthetic construct
  source 1..1452: mol_type = other RNA
atgcacaccctggtggacctactgattgagttaaagacgttagctacagcaaccggggacgctaatcagctagcccgaattaatgaactcttttccaaccctcgtgcacccgccgaattccaggtgggacggcacttcgtggcccgcttgcttgttccgcaggcagaggccgcaatggcgagttttgacccagctgacagactgtccgccatcgagacttgccgaacagtgttccctcgctctatagcagcccgcctccttcgccgtgtcatcaaagaccccgatcccaaggtgagatcttctgccaaacgggccgccagtgccctgcgtttggacgatgtcgcccctccagacatcaggtatcgcgtagaacgggacagtcccctggggagacacaatcccacgggctgggcattcggcatttttcccacggatgatcatcctcaaagaaagactaaacaggctacaaggcagaccgccctggacgcgcatcaactcccaaaactcgcgaatgtggccgctgtcgctcaactagttgggatcgaccccgacgccctggttcggatgatgaggccaggcactgaggctggtagcgggtatgtggagttcgagatcccgaaggccaaagggggcacaagaaggattgccgcaccaaggacccccctgcggaaggtacagagaaaaatccttgacgacatactcgcaaagctccctttacacgatgcatgccatggctttgtggtcgatagaagcaccgtgacaaacgccactccccatgctagggcagctctggtcataaagattgacttgaaggatttcttccctaccgtacactaccgccgcgttaagggtctgtttcagcacctcggctacaacgaagaggtgtcggctaccctggcagggctgaccacttatcggccgaagctgcctaatggccatgtggtgtggccgggagttcttccacagggagcccctacttcaccagctctagccaatctggtatcccggcgactggaccagaggttatccaaactcgcagaaaagtacggagcctcttacacacgatacgctgacgatctcactttcagcttcaaaacccagccagaactgagaatcggacgatttctgtggtgggtcgatggcatttgtcagcaggaggggttctcagaacgggccgataagcggagaatcctgagagcaaaacaccaacaaagggtcacaggtttggtggtcaaccagaaggttaacgtccctagggaggatcgccgtaggtttcgcgctatcctgcacaactgtgccaaacatggcttggagagccaagctggttcacttccacccggcgcggattttaaggcttatcttgcaggatacgccgcgtatgtgcacatggtggatcctaaattgggaaaacagtacctggcccaggtggctgcgctcattggtaaggattga

SEQ ID NO: 13877 - RNA, 1455 nt, synthetic construct
  source 1..1455: mol_type = other RNA
atgcagactctcgtcgagctactcctcgagctgaagactctggcagctgaacccgatggccctggaaaactcgagagaatcaacgccatgttcgctaatccgagagctcccgccgaattgcaggtgggacgccactacgtgtccaggttactcgttccgggggttgccgcccagttggcttctcttgaccctgcgcacaggcacatagcgatcaccacagccaggcttgtctttccgcgcgccacggctgcacggttcttaagacgcttagtgaaggaccccgacctgaccgttcgcgttgctgcaagacgagccgtgagcaagcttgggctccatgatgttgcaccccctgacgtgcgttatcagatcacctcagacagtgccatcggcggccataaccccaccggttgggcatttggaatttttccaactgatgatggacctcggcggaagcctaaaccagccacaagggccaccgccttagcacagcacggactgcccgccttggctactcgtgccgatgtcgcagcgcttgtaggtgtggacccccagggtctggccaagctgatgcgtccaggagtaggccctggctccgggtacgtggaattcgaaatcgctaaggctaagggcggtacaagacgaattgccgcaccacggggcccattgcgcaaagtccagcgcgtgctgctggatcggatcctggcaaaggtcccactgcatgacgcctgccatgggttcgtgccaggcagaagtaccgtgactaacgcgggaccgcaccaacgggctgccatagtggtcaaactcgatctcaaagacttcttccctaccttgcactaccgcagagttaagggtttgttccaacatcttggatacaatgatgatgtggcgggaactttggccggcctgacgacataccgaccaaagttggagtcagggctggtagtatggcctgggatgctaccccaaggggctcccacatctcccgctctggcaaatctcgcatgccgcagactggaccataggcttgagcgactggcggcgaaatatggcgccagatatactcgctatgcagatgacctgaccttcagctttgctacaatgccagaagtcaggattggcaggtttctgtggtgggtggacggaatttgtcagcaggaagggtttaccgagcgtgatgacaaacgacggattctgcgggcaaagcaccagcagagggtgacaggcctggttgtgaatgagagagtcaacatccctagggaggaccggaggcgattcagggccatactccacaactgtgccaaacatggggtcgcaagccagacgcgggaacacgaggactttccagcttacctggccgggtacgctgcttatgtgcacatggtggatcccgttctcggcagacgctatctagacgaagtggccagactgcttgcccaagagcctaggcggggttga

SEQ ID NO: 13878 - RNA, 1446 nt, synthetic construct
  source 1..1446: mol_type = other RNA
atgatcgggacattagtcgagttgctcgtcgagttaaaaacgctagttgcgtccagtgacaagaacaagctggacaaagtgaacaagctcttcagcaaccccaaagcgccagctgagtatcaagtgggtcgccactttgttgccagtaagcttgaaaaggatgtggaggtgcaaatatccgatcttgatcctaggcagcggaaggctgccgttcagaccgtgatgctggcttttcccagaagttctgctgccaaattactgagaagggtcgctaaggatcccgacatgaccgttagaagcgcggcccgccacaccatcaaaaccttggctctgaatgatgtggccccaccagacatccggtatgctcccgacatgggcgtcatcggacatggaaatccaacaggttgggcattcggcatttttgctcatgattggcgaagcgacagaaaacccaaaaaaccgtctaaggtcactgccctggacgcacataaactgccaaagctgaaatctgtggccgatgtggcagctctggtgggaattgaactggatgatctgcctgcccttatgaggcctggcgtcggaccaggttccggttacgtagagttcgagattcctaaggccaaaggaggcacacgcaggattgccgcccctcgagctccattgcgtaaggtccaacgggccatactggaccagatcgtaggcaaggtgccagttcatgaagcatgccacgggttcgtaaagactagaagcacagtcacaaatgctgcaccccaccagggatcagccattgtggtaaagctcgacctcaaggactttttccctactgtccactaccggcgtgtccgcgggttgtttgagttcctcggctacaacgcagaggtggcaaacgtgcttgccggccttaccacctaccgcccgaagctggatgatggtacaatcctgtggcccggcgttttgccacaaggggcacctacgtccccggctattgctaatctggcatgtaggcggttagaccatcgtctcgaccggctcgcggccaagtacgatgctacttatactaggtacgcagatgatttgaccttctcattcaagacgtcggaccttaaactgggccgctttctctggtgggttgacggaatctgccagcaggagggcttcaatgaaaggcctgacaagaggcgagtgctgcggtcaaaacaccagcagagagtaaccggcattgtggtgaacgccggggtccatgtgcccagagtggacaagcggcagttcagagccatgctgcacaactgtaaaaagcacgggctcgaatctcaggcccgcgggaaagaagattttgaagcatatctacgagggtacgccgcgtatgtgaatatggtggacccccctctaggcaaaaagtttatcgcccaggtggaggcagttctgggtggaactcccgggggatga

SEQ ID NO: 13879 - RNA, 1449 nt, synthetic construct
  source 1..1449: mol_type = other RNA
atgcagacgctggtcgagctcctgatagaactaaagagccttgctgacgcgccacacgacgacggaaagctagaccggattaacaaactgttcgcaaacccaagagctcctgcagagtaccaagttggtcgtcattatgttagtaagttactcgctccctccgttgaagcgaacctggattctatcgatccagctcagaggctcgccggaattgggacagccacggctgtattctctaggaatgttgccgctcgctttctgcgccgcgtggtgaaagatcctgacggcagagtacgtgctgctgccgcaaaagccgtcaaacacctgggcctgacagatgtggctccgcctgacgtgcggtacaagatagacccagattcggagctgggagggcataaccccactggctgggcctttggtatacacccgaatgacaagtcacgccagcggaaacctaagaaacccagccgggtgaacgccttgaaggagcttgaccttccacgccttgcaggagtggctgatgtagcaaagctcgtgggcgttgccgagggcgaattggcctccttgatgcgtccaggttgtggacctggcagtggatatgtggagttcgagattccaaaagcgaaaggtggcgctagacgaatcgcagctccccgaaccccccttcggaaggtccagagggccatcctggataaggtgctggcaaaaatccccctgcacgaggcatgccatggctttgtgcccggacgatctaccgtcacaaatgcccggcctcatcaaggcgctgccatcgtgattaagctggatctaaaagatttcttccccaccgtgcactatagaagggtgagagggttgtttgagagccttgggtacaatgaaaaggtcgccagtactctcgccggcctcaccacatacaggcccaaaatcggcgacaaaactgtggtctggcccggagtattaccgcaaggcgcccctacttccccggccttagccaatctggcttgcaggcgtctggacaagcgcttggaaatgctcgccgcgaagtatgaggctacatatacccgctacgcggatgatctcactttctcattcaagaaggttccagactttagaattggtcgctttctctggtgggtggacggaatctgccagcaggaagggttcaccgaacgagccgagaaacgacggattttacggtccaagcaccagcagagggtgaccggtctggtggtcaacaaaaaggtaaaagtgcctagagcagataggcggagatttcgagccatcctgcataattgtgcaaagcacggactggaatcacaggccagagggcacgcagacttccctgcgtatctggctgggtacgccgcctacgtcaacatggtcgatccagcattggggagaaggctgctcgacgaggttgcacgccttctgggggaaagcaggggctga

SEQ ID NO: 13880 - RNA, 1533 nt, synthetic construct
  source 1..1533: mol_type = other RNA
atgacgcaggccgccactagcgttctgtcccctattgaactgatactcaccttgcgcacactgctggccgatcgcgcatcgaatgctactctgatcggggagctcctcgagaggcatcaggacatggcggaatatcagattgctcggttttacgtcgctcggcacctgatcccacaggtagaagcactcttgagcgagctggacccccgccaacgtttggcagggatagagctggtccggtttggcttccctaggactctcgctggcaagttgttaaggcgggtagtgaaagacccagatatcgcggtgcgcaaacgcgctcgctccacagtgaagcgactaggccttgatgacgtagctccccccgatacaaggtatgatgcccggcgctcctcacttggaagaggaaaccccgcaggctgggccttcggactgttcagaaaccatgctcgctcagattggggaagacgacccagaccagctaccagggttgcagcgctcggagcacaaggccttcccccattagcctcttccagtgatctgtgcaaattgttaggtgtggaggccagcgcccttgtgagattcatgcgtcctggtacccagaccgggagcgcgtacgtggagtttgagattccgaaggcaaaaggcggcacacgacgaatcgctgcacctcggggtcccctcagacgagtccaacgcgtgctgctggaccagattttatctaaggtgccgcagcatgaggccgcccatggcttcattgcagggcgctccactgttagtaatgccagaccccaccagggagccgctctcgttgtgaagacggacctgaaagatttttttcccagcgtacactacagacgtgtggtcgggatcttcactatgctgggctatggcgagccgatggctagggcattagcggcactgaccacctataggcctcagctaccggccgacgaacctccaccatcagacgctgccccttctcctagtgatgctgcccgaccaccagaacctgcacgtggcagggtgctatggcctggcgttcttccccaaggtgcccccacaagtccagcgctcgccaatcttgcttgccgtcggttggacgttcggcttacacggctcgctgcgcggtatggtgccacctacacaaggtacgccgatgacctcacctttagcttcccccaaccaccccagtttgccatcgggaggtttctgtggtgggtcgacggtatctgtcagcaagaagggttcctggagcacccagctaagaggaagctcctgcggaaaaagactcagcagagagtgaccgggctggtgacgaaccaggaagtccacgtgcctagagcagaccggcgcagattccgagccttgctgcacaactgtaaaaagcatggggtggcttcacaggcaaagggaagggatgacttcgccgcctatctggccggatacgccgcctacgtccagatggtccagcctgaactgggcaaagcttgggcagccgaggtggcaagactgctaggagagtctgcttga

SEQ ID NO: 13881 - RNA, 1440 nt, synthetic construct
  source 1..1440: mol_type = other RNA
atgaaccctgtggaactcattctcgaactgagagggttactcgccgacgcccaggcgaatggggcaaagatccgggagctgatcgagagccatcaagacatggcagagtaccagatcgcccgcttttatgccgctagacatctggtgccccaggtggaggcgttgatatccgagatagaccccaaacagagacttgccggtgtggagttaatccggtttggattccctcgcacgctggctggcaagctgctacgccgagtcgtgaaagatcccgacatcgaagtgaggaagagggctaggagtacagtcaagcatctagggctggaagagattgccctgcctgacacccggtatgacggagcgcggtcgattcgcggaaaatttaacaccactgggtgggccttcggcctattcgccgaacacgctcgcagagcttggaatcgcgtgccaaagaaggccacacagatagcagctctgggagcacaggggctcccggttcttgccagcattgctgatgtgcaagctctgttaggcgtcgacgcagcaggcctggcacgacttatgcgacctggcacggaatcaggctcagcctatgtcgaatttgagattcccaaagcaaaaggaggcaccagacggatcgctgcgccacgtggacccttacgtcgtgcccagagggctctgcttgatcagatattggcgaaggtaccacagcacccggccgctcatggctttgttgccggtagatccactgtcacaaatgcccgacctcacgtgggagcagccttggtggtgaaaacagaccttaaggatttcttcccaaccgtccattacagacgcgtaatcgggctgttcgagctccttgggtacaacgaggctgtagccggggtgctagccgctttgactacatataggcccaagctgcctgacggacgggttgtttggcccggcgtactgccacaaggtgcgcctactagcccggcgctggcaaaccttgcttgccggagactcgacgccaggctgactaaactggcagctaagtatggcgccgtctacacccggtacgcggatgatctgacctttagtttctctgagtcccctaagattgctattggaaggtttctgtggtgggtggatggaatctgtcagcaggaaggcttcgttgagcacccagggaagcgcaaactcttgagagccaaaacccagcagaggatcacaggtttggtgatcaatcgagccgtgcacgttcccagggcagatcgcaggcggttcagagccctgctccacaattgcgcaaagcacggcgtggcatctcaagctaaagggcgtgaaaactttgccgcttacctcgcaggctatgccgcctacgtccagatggtgcaaccagaactcggtaaggcttgggccgcccaggtcgctaaattgctgggtgaggcaccctga

SEQ ID NO: 13882 - RNA, 1470 nt, synthetic construct
  source 1..1470: mol_type = other RNA
atgtctctggctgccttacttgtgcagcttaaaccactgctcgccgctcctcaggagaatctggctgcaataacagagctactgcgcagacaccgggatctggcggagtacgaagtcgcccgtttctgggtgtcccgctttctcggcccccagcttgagaaggaactgcgctctcctgacccacgcgtaaggaggcgtggagcagaagccgttcgctatatatgcactcggaagaccgccgggcatctcttacgcccgcttatcaaagaagccgataccagcgttgcagtcagggcgcgggcttccatgcgagtgttgaagctggatgatgttgccctgcccgattcaaggtatcctgccccgaaaagaggcaggggccaactggggggatggaatgtgaccggctggtgttttgggctgtacccccatatgcaccggtggtggcgaaggcgcggaaaacccgaagagcccactaagaagacgctgctggaaaagcacaagctacccaagctcacctcagagtctgagttgcgcgcgtggctcggcatccaaagaaagaaagacttgctacgcttattgcgtcctgggtgtgggacaggggccccttacgtcgaatttactattccaaaggcaagcggtgggtctaggaccattagcgcaccaagactcccactcaaaaagctccagcgacggattttggatgagattctggcaaagctcccagtccatgctgctagccacggattcgttcgcggccggtcagtcgtgagtaatgccaagccccacctgggtgccgctttggtcctcaaaatggacctgcgagattttttcccgacaatacactttagacgggtggtgggactattccagggaattgggtacgcagccgacgtagcgcaaatcctcgccggactctgcacccataggggcaaacttgcagatggatatgtgctctggcctggggttcttccccagggtgcaccaactagtcccgccatcgctaacctgttatgccggaggttggatgctagactgtcgggtttggcaaaacaagccggcggcgtgtatacgagatatgccgacgacctgacattttccttcagtgccgtgccagataagggaatcggtcggttcgcgtggtgggtagaccagatttgtcagcaggagggcttcgtggagaacagtgcaaaacggagagtgctgcaacggcataaccagcagaggatcaccggcatcgttgtcaactcagccctgcacatccctcgaagcgccagacacacattcagggcgctgctgcacaatgtgaggctggacggacttgcagctcatgccagaggtcggaaagactttcgagcttacttattgggcttcgcttcttacgtgagaatggtgcagcctactcttggccgtgccctgctgtccgacgtacgtgctgtcctgaaagctgacagaagcgcccagaagtcctga

SEQ ID NO: 13883 - RNA, 1467 nt, synthetic construct
  source 1..1467: mol_type = other RNA
atgtcactttccgcactgctcttacagcttaagcctctgttggccgctcccagggagaatcttgccgctattagcgacttactgaggaggcaccgcgatcttgcagaatacgaagtggcccgcttttgggtaagccgagcaatggggccccagctggagcaagagctacggagccctgacccccggacaagaagaaaagctgctgaagcagtgaggtacgcctgcacaaggcggtcagccggaaggctcctacgcccattggtgaaagaggcagacaccggtgttgccgtcagagcgcgaactgccatgcacgcactcagactggacgatgtcgcattgcccgatacgaggtatccaaaaccaaagcacgctggtggattcggtggttataatgtcaccgggtggtgcttcggcctgttcccacacatgcaccgatggtggagaaaaaaggccaaccctaaccaggccgccaagcagaccttgctggagaagcatgggttgccggtactggcaagtgaggcggaactgctcagctggctcgggctgaaaagacggaaagatctgctccggctgctgaggcctgggtgtggaactggcgctccttatgtggaattctctattccgaaagcctcgggaggcacacgtaccatctctgcgccacgtgccagtctcaagaagatacagcgccgaattttagatgaaatcctcgctaagctgcccacacatgccgcatcacacggatttgtccggggacgcagcgtgctgtccaacgctaagccccatgtgggcgcctctttggtcctgaaaatggaccttagagactttttcccgactattcattttagaagggtatgcgggcttttttgtcgcataggttactcctctgaggtggcttccttgcttgccggactgtgtacccataggggcaagttggccgacggatacgtggtgtggcctggagttttgccccaaggggcaccaacttcccccgccatcgcaaatttactctgcaggcggctggatgcgcgactaacaggcctggctcgcggactggggggtaattacacgcggtacgctgacgacctgaccttcagcttcaaggccgttcctgaacgcggcatcggtcgcttcagttggtgggtggatcaagtctgtcagcaggagggctttgtggagaataccgggaagagaagagtgctccgtccacagaaccagcagcggatcactggcattgtagtgaattcaggcctcaacatccctcgtgccgctagacacacattcagggcgctgctacacaacgttaaacatgatggccttgccgcccaagcacgcggcagaaaggacctgcgagcttatctgctgggctttgcgagttatgtgcggatggtgcagccaaaggttgggaaacccttactcgccgaggtccgggcagttctcaaagctgccggccaggctgataagaaatga

SEQ ID NO: 13884 - RNA, 1446 nt, synthetic construct
  source 1..1446: mol_type = other RNA
atgaatctggtgaacctattggtgaccctgagggatgctctcgtggacttcgaggcgaatcgtcagaagatcttaaccctgctcaaaacgcatcagggattatccgaatttgaggtggcccggtatttcgtggcagccgaggctgctccccgtgtacacaagtatctggcctcacgggatccaagagagagaaggatcggagtcgaatgcgcccgctttcttctgccccctaacgatgccgcagctgttctgcgtcgcgcgttggtggaccccgataccagcacccgagatagggctgacagattacttgcccagctagaacggcaagaagctccgttacgggcccgcaggtctacacccgaagccgaactggttgacgcctggggaccgacagggtggagattcggtcgcctgctgaggaatcctcccgcacggaaaaaagcgaaactcgccccagttcctcgagctgtctcagccgtcctgaagagtgaggagacattcctgaaggctattgaggtggatagcgtgtcggccctgcaaccgctctatagagcaggggacgggccaggtgcaccttacgttcggttcgaaatcgcgaaacgaggcgggggcgtaagggcaatactcgcaccccggaaagccctgaagggcgtgcagagagccctgtatgaaaaggtcttgtctaagcttgcgactcacgatgctgcccacgggtttgtcccaggtcgatccgtggtgaccaacgcacgacctcatcagggggccgtaactattcttaaagtcgatctggccgactactttcccacactgcactacagacgagttcagggctattttgcgcgggtgctcaaggctaacgccaaggtggcaacgctcattgccggactaaccactcaccgcgatcgcctggctgacgggtacgtgacaaggccaggggtcatgccccaaggcgctcctacatctcccgcactggcgaaccttgttagccggcgcctcgacgagaggctagatggcttggctaagaaggtaggtttgcgctacactcggtacgccgacgaccttacgttctcctggcacgaagcacctccaacaaggcaggccctggcacgcgtgttatggtgggtcagtcaaatcgctagggaagagggcttcgctctcaacgaacggaagacccgcgtgctgcgtccacaccagcagcagttggtaactggcgtcgtggtgaatgccggccttcatgtgccaagggccctcaaaaggaccctgagagccatgctgcatgaggcacgtgtaaaaggagtcgaggtggcagccagaggtagagctgacttttacaatactctcctcggacacgcagcctgggtcaatgccgtggagcctgcattgggagccagactgcttgccgaggttaaggcactggctgctagagagggcgctgcgcatgtttga

SEQ ID NO: 13885 - RNA, 1467 nt, synthetic construct
  source 1..1467: mol_type = other RNA
atggacctagcgagccttctggtggaactgaaacccttgattgccgatcctgacgcccactgggggcgcattgccgaattaatggaggagcacagtggcttggcagagtctgaggtggctcgccattggctggccgaacggttagctcccaccctcgtcgccagaagtaggtccagagatccaagggatcgtctgcgggccgttgaagctgctcgttgggcacttccggcgcgtgacttggctggagttttgtggcgcctcgctaaggacccctttccgaaagtgcggcacagagccgtgtccctgacccgatcagagggcctcactgacgttgcccttccagaccggttgggacgaggggctaaaccgaaggcccgcatggaccccttcaccaagaagatcagcgtggtggccctgcgcgatggagaagctcagcgaggctggttcctcctggacccagataaggtgagatctctaagaaggggacggaaaagccctgcaaaacctgatctgccaaagctcaagaaccctgccgacgtggcgacactgttaggatgcgcctccgataaggacctggtcaagttgttgagagtgggggaaggccctggttcaccctatgtccgcttcactataccgaaggccacaggcggcgaaagagttatcaccgcaccccgaccagccctcaaacgggttcagcgtgctctgctcgacaagatcctcgccaaacttccagcccatccctcagcgcacggatttgtagcagagcggtctgtggtaaccaatgctacacctcataaaggtagtgcattagtcgtcaaaatggacattgaggatttctttccaaccctgcactaccgacgcgtggagggtttttttcgccagtattatctgggccccgttgccaaactgctggctggcctgactactcaccggacaagactcgaggatggttacgtggtgtttcccggcgaactgccacaaggggcacccacatcgcctgctctagccaatctcctttgccgacgtatggatgcaagactgacagggctggcggctaaggtgggcgcaaggtacacgaggtatgccgacgacctgacgttttcttggcccgtggaccctgaagtgccacttgggcgcttcttctggtgggtggatcaggtccttcagcaggagggttttgccgaaaacgccggaaagaggagagtactgaggcctcaccaacggcaactcgttaccggggtagtagtcaatcacactctgcatcttccaagggaggtgcgcagacgcttccgggcaatcctgcataactgtcagaagcatggggtggaatcccaggcaaggggaagggaggatttccgggactacctccggggcttcgctagctgggcagcaatggtcgatcctgctgagggaaggagattccaggaggaggtcagggccctattaggcgcggccgttaccccctga

SEQ ID NO: 13886 - RNA, 1470 nt, synthetic construct
  source 1..1470: mol_type = other RNA
atgagcctctcgaatttgctgctggagttgattcccctgtgcgaaagcctggacgataattgggaacaggtcgtcagcctactggacgctcaccaagatctcgcagagtatgaggttgcacgcttttatgtgagcagatttacatctcggactatccagcagttggtgcggagtgatgacccacgtcagcgagttaagagcgcccatatggtgagactgacatgtacccagagacaagctgggcagtttctcaggttgctgattaaggacccttgtgcccgtgttcgatcagcagcccatagagccatgagaggtctgaggctggacgacgtggccttgcccgacagcaggattaaaaaacctcacccttaccgaggacagctgctcggcggctggaatccctctgggtggagctacgggctgtttggaaacatgtggtcaatcaggcagtacagaaagcagtctaggaaacccaaaaccacactggccgatctcggcgtccctaagcttgaaacccgcaaggatgtgctttcctggcttaagctgggttccattcgggatcttcggaaactgcttagggccggtagtggaccggggtcaccttacgtttcctttactatccctaaggcgtctggggaacccaggactatcacagctccgcgcctgactctgagacgtgtgcagagacagatcctcgacgagctgctgtcaaaactcccaacccacacggccgctcacggattcgttaagaaacgcagcgtggtaacaaatgcaaaacctcacgagggcgcccaactcgtggtcaagttagacctgaaagatttcttcccaacgatatcctatcaccggataaggggcctattgtgcagatatggcttctctccagaggtcgctgacaccctcgccggtctaactacacatcgggcggtactctcagatggctatgtcgtttggcccggagtgcttccgcaaggcgctccaaccagtccagtactggcaaacctgatctgccggagactcgatagtcggttatccggacttgctaagaggatgggcgctcgctatacgaggtacgcagatgacctgaccttctcgttcgcaaaaggtttagaccataagaacgatttagggcgtttcctgtggtgggtgaaccaggtgtgccagcaagaagggtttgccgagaacgtgggcaagcgaaagatcctccggccaagtgcgcagcagcgcattaccggagtggtagtgaactctggactttccgtgccccgcgccatgcgaaggaccttcagagctattctacataattgtcgaatgcacggcttagactctcaagcccgcggacgccgcgattttcgggcttacctgctgggctacgcatcctacatacagatggtccagccctccttggggaagagagtcctcgcggaggtgagggccttgctgactgcctcagaccggcctagcacatga

SEQ ID NO: 13887 - RNA, 1464 nt, synthetic construct
  source 1..1464: mol_type = other RNA
atgagcctttcgagtctgctcttggagctgatacccctgtgtgaaagcctagacgataactgggagaaggtcttggctctcctcgatgcccataaagaccttgcagagtacgaagtagcacggttttacgtcagccggctcgcttctcggcagctagaccagctcgtgcagtctccagatccaagaaggagaacacaagctgcccactttgtcagactgtgctctacccaacgccaagccggccgttacctgcgagtgctggtcaaggatcccaatggccgcgtgcgatccgctgcccatcgaagtatgcgcgcactgcgcatagacgacgtggccctgccagatggaagatttaggccctcacctcacagacaggcacttggcggatggaatcctacaggctggagctatggcctgttcgggaatatgtacttcgtgcggcaacaaaaggggaagcagcgcaaacccaagcccacactgtcagacttaggcgtgctcaaactccagactcggaaagacgtgcttcagtggcttcagattccatcgctcacagaccttcgtaagctgttacgggctggctccggtccgggttctccctatgttagcttcacgattcctaagagtagtggtgaaccgaggacaatcaccgcgcccagaatgacgctcagaaagttacagcgcaagatcctggatgacctgctgtctaaattgcctacacacgcagcagcccacggattcgtgaagaaaagatctgtcttaaccaatgctaaacctcatcagggggccaaactcctgattaagctggatatcaaggactttttccccaccatttcctattatcgtgttagggggcttctccgcggatatggactgtctttcgaagtgtgcgatacactggctggactcatgactcatcgccccgtactatccgacggctacgtggtgtggccaggtgtattgcctcagggcgccccgacttcccctactttggccaacctaatttgtatgaggttagacgcgaggctttcagggttggccaaaaaagttggagcacggtacacgcggtatgctgatgacatgaccttttcattcgcctccgggatggataaccactccgatgttgggagatttctctggtgggtaaatcagatctgccagcaggagggatttgcggagcatgtttctaagagaaaggtgctgaggccatcaagtcagcagcgcgtcactgggatcgttgtgaacagcggcttgagcgtccctcggcagctgagaaggaccttccgggcgatcctgcacaactgtcggacccacggcgtggctagtcaagccagggggaggaggaacttccgtgcctatctgctgggatacgcttcctacctgcgaatggtgagcccagaattgggtacccgagccctgactgaggtccgagcactactgggctcagatgagtcaagctccagctga

SEQ ID NO: 13888 - RNA, 1479 nt, synthetic construct
  source 1..1479: mol_type = other RNA
atggacgttgcaaccctggtaagcgccctcatgccattgctcgatgacccagtcggcaatagtgccagaatcctgaagctcctgagagatcacaggacattagcagactatgaggtggctcgattcctcgtcgccaagagaaccgaacccttcgtctgcgagctgctgcagtcccaagatcctaagtctaggcggactgctgtgaggtgggtcgggctaacctttgcgcgtgctcccgctgcaagagttctccgggacgccacaaaagacagagcaaaaatggtccgccaggcagcctttcgtgccactcgggagctacggctggatgatgtggccttgcctgacacaacagatcacgctgcttgggttcacgaggccccccagcagcgacgaatgaaccctttcactggagaggaaatggtggttagaggttcaccccccagggcagccaggcaaaggggttacgacgtgtccggctggcgcttcgggctttacccaacggtgaatcgccgtcgggatcctaaaccggcttttagtgcgctccggtcacgcgaggacgtcgagagagtgctaggcgtttccagagcccagctttcaaggatgattcgtcctggtcatgggtccggccggccctatgtcgcattcgagattccaaaggccaccgggggagtgcgcacacttcatgcgccaagacctgcacttaagagggtgcagagattaatacttgaacgcctgctggcacccctggaagtgcatgctgccgcccatgggtttgtacgaggcaggtcaaccatcactaacgctatccctcatgttggcgctaggatagtcgtgaagatggacttgatcgacttttttccgaccattcactttggtcgtctggtcggactgtttcagcactacggcgcgtctgttgatgccgctaggacccttgccgccgtagtgacctatagacccacactgccagatggacgggtgtcttggcctagcgtgttgccacagggcgcaccaactagcccggtgctgtctaacttggtgtgtcggagattagacagccggctgacagcactggctgcttccgtcgctgcccactacactcgctatgcagacgatctgacgttctcgttccgcgaagaacctacgaagggattaggccacttcctctggtgggtgaatcagattattggacaagagggattccgcgaaaacctagggaaacggcggatcctcaggccaaccggtcaactgcgcgtgactgggctcgtcaccaatagtggcctgagcgtaccgagagacgctcgccgacgctttagggccatcttgcatgattgccgtcagcggggagtaaccgcggaggctactgggcacgaagagcccagagcctacctcctgggtttcagcgcctacgtgcagatggttcagcccgcaacaggcgccaaactgcgagccgaggtgttggccctgcttgcgaggcgatga

SEQ ID NO: 13889 - RNA, 1473 nt, synthetic construct
  source 1..1473: mol_type = other RNA
atggacattgccactcttgtggccaccttgatccccctgctgggcgatcccgaaggaaacggcgatgagattgtcagactgttggataggggcagggccctggctgattatgaagtggtgcgcttcctggtggcaaagagaactgaatcctttgttcgtcggctgctggaagaccctgatccaagggtccgcaggacaggcgtgcgatgggttgagctaacattcgcacggtcaccagccgccaaatctctccgcgacgctaccaaagaccgggcaaaagtggtgagacaggccgcttttagggctacccgagcccttcgcttggacgacgtggctctccctgacttgcgggtaccatttagatctctgccaggagaaagtcggaccgcaatcaatccatttacacagaagccaatggtactggaagcctctgcttcccgtcagagacatcggggctttaatcctactggctggcgattcgggctgtaccctgtccccagaaggccaagacggccttcacccgaactgtcagcgctgaagtcccggcgggatgtcgaggtgctgcttggtgttaccggcgaggagttagctcccttgctcaggcccggtgctggtagaggttgtccctacgtagcttttgaagtgcctaaggcctcggggggcacaagaatactgcacgcccccagggctgcccttaaacggctgcagcgcattttactgaagcagctcctcgcgcctcttgagctgcatccggctgcccatggattcgtgccgggacgaagcacagtcactaacgcggcccctcacgttggggccaggatcttggtgaagatggacctagttgacttcttcccaactgtccacttcgggcggctcgttggcctgtttgaacactatggctgcgccagggaggccgcggaagtcttagcaacgatagtcacattcagacccgtactccccggaggtagagtggcctggcctagcgttttaccgcagggggcacccactagtccagttctcagtaatcttgtgtgtcgtcgcatggacgctaggctggctgcactagccacgaaggtcggggctgtgtacactcggtacgccgatgatctgacctttagccttcgcgaggcaccttcccagggcctaggccatttcctctggtgggtgaaccaaatcatcggacaggaggggttcgtggagaatctgcgtaaaagacgcgttttgaggccggcaggtcaaatgcgggtgaccgggatcgtcacgaacacacagctgtctattccaagggaggcacgacgccgattcagggccgtgttgcacgattgcgagcgacgtggagtgagccccgaaaccaccggacatgaggagccccgcgcgtatcttctcgggtttgcggcatatgtggccatggtccaaccagagctgggagcaaaactgagaaccaaggtaagagctctcctcgcccgcccttga

SEQ ID NO: 13890 - RNA, 1473 nt, synthetic construct
  source 1..1473: mol_type = other RNA
atggacgtggctacgttgataagcaaactgtaccccctcctcgacgatccagtcgcaaacagttcgaccatcctgtctctgcttcggcgtgggggagggttagctgagtacgaggttgctcggtctttagtttcaaagcggaccgagcctatggttcggcaaatgctggccgaccctgatccagtggtgagacgacgcgccgtcaggtgggtgcagctcacatttgcatactcccccgcggtccgcattgtgcgtaatgccgcgaaagacaggtcccggatggtgagatcagccgcctttagagccgcccgagcactgagagttactgatgtggctctgcctgcccggagactcgccaaagtgcctgcgaccacgcagcgcgaaggcatcaatcctttcactcgggagcgaatggtaattgccgctcgcagcccatccgtgagggaaatcagggggtacgcccctgcgggctggcattttggcctgttcagggcaaggccgcctagcagacgaccagcaccacctctcgctgcactgaagggccgccaggacgtgttggagcttttgggcgtctccgagcaagaggtcacccgtctccttagaccgggaagcggacccggtacctcttacgtggctttcgaaataccgaaggccagtgggggggtaagaactttgcatgctcctaaacacgtgctcaagagactgcagcggaagattgccactgagcttctcgatcccatcgagccgcatgctgccgcacatggtttcgtgagggggaggagcacggtcacaaacgcccagccacacgtcaatgctcgcctacttgtcaagatggacatcgctgacttctttcccacagtgcactatggccgagttgttgggctgctggaacaccacggagcgggaaaagaggcagccaagctactggcagctattactacatatcgccccaaactcccagacggacgagtgagttggccctccgttttaccccaaggggcccccacatcgccagttctgtcaaacttggtatgcaggcggttagatgccaggctaaccgcactggctgcccggttgggagcaacatacacccggtatgccgacgatctcactttcagcttccagggggatccagagcagggtctgggacgattcttttggtgggtcaatcaaatcctgcaccaggaaggcttcatagagaacatcggcaagagacgcgtgcaccgcccttcaggccagatgcgtgtgacaggtctggtcactaaccagggtctgtctgtgccacgggaagaacgcagacgctttagggctattcttcacgcctgtgaacagcgtggagtctcttccgaaaccaccggccatagtgaacccagggcctatctgctgggctttgcggcatatgtggagatggtgcaacccgaggtaggcaaaaagttgagagctcaggtaaagaggcttctggcaaaaagctga

SEQ ID NO: 13891 - RNA, 1461 nt, synthetic construct
  source 1..1461: mol_type = other RNA
atggacctggccaagcttcttttcaccattaagccactcctcgctgatcctagggcaaacctggcaaaaatagtagagctgctggagaagcataacgacctggccgaatacgatgtggcgcgcttctacgtgagcaaatctgtgcggcctgcaattgaggaaaaactgagttccccagacccaagagagcgaactgccgccacaaagagcataccccgtctgatggggaaaagtgaaggagccgctctcctacgcagagtgtacaaggatgcatccccaactgtgcgtgccgctgccaggtctggggtaagcatgttgggcatcgaagacgtggcgttgccggactcgaggtttcccgctcctcgaaataattggcagagacagggaggttggaacgaaacaggatgggcctttggtctggctgacagccgcgctcgcaaaccaaatcggcgggtacccgaggacattgccagcatccggaaggtttttaaggagctgcagacctctgatgatgtcgccaagaagctaggcatgaaaaaagccaaggagttgaaagccttaatgcggcccggacaacaagccggctcagggtatgtggagtttacggtgcctaaagccactggcggcttacgcaccatttgtgcaccgagagcccccctgaaacgggttcagagaaccattctccgcgagctgcttgcaaaagtccctacacatgacgctgctcacggctttattaacggacgatcagtggtcagtaacgcgcgtccccacgagggagccaagatcgtggtgaaaattgatctcaaggacttcttccccactgtgcacttctaccgggtggctggcacactcaggtacttagggatgggagaggctgccgctagtaccctggctgccatcgtgacccacagaaataagctgcccgatggtacagtcgttatgccaggggctttgccacaaggcgcacctaccagccctgcaatcacaaatatcgtatgcaggaggctggatgcccgattggacgcgctctctaaaaaggtgggagctaagtatactcgttatgcagacgacctgactttctcatttcgcgatgaacctgaaaaaggtcttgggcgctttttgtggtgggtcgatcaggtcatccagcaagagggcttcgttcagaatgcccctaagaggcggatcctgagaggctccaaccagcagcgaataaccggggtagtggtcaatgatggtctttccgtgccgagagacgcccgcagacggtttagggctatgctcgagaacatcaggcgaacgtcagttgatgaacaggcaagagggaaggcggatttcaaggcctacctgaaaggcttcgcttcctatgtcaagatggtgcagcccgaggttggtaagaagctactcgcagaagttcatgcagtccttgccgaagacgtccggaagagggacgcggcaaaatga

SEQ ID NO: 13892 - RNA, 1443 nt, synthetic construct
  source 1..1443: mol_type = other RNA
atgaacttaccggctcttctcttagagctgcgccctttggtggccgacatagacaagaactgggacagaatcgtggaactgctctcaactcacaagcgtcttgcagaatacgaggttgccagattttttgtggcgcggcacgtcgaaagccgagtgaccgaactcttgcgcagtagagatccccagcagcgtgctcggggggtcaagatgctcgagctagcatatccatccacccgggccgggaagcatttacggcatctagtgcgggatgctgacgtcgaggtggcacgggatgcaaccgaggctgtcagtaatctggatatcgatgacgtggctctgccggatttccgcctgaaaccgccaagggatcctcggcatggatggggtgggtggaatcagagcagctggcggttcgggtttcctctcgccgactgggtaagaaggaaaaagcgcgtcgggcccaagaagctcaaactccccaagatcgccgataaagccgctttgttcgaactgttgggtatagccgacgagaagcactacaaaaggctgattaggccaggagctcagtctggcgccccctatgtggaattcacagttcctaaacgatcaggtggagagagaattatctccgccccacgggctgaactgaagcgcgtacagcgaacaattctggacaaaattctggccaaaattcctgtccacgacgccgcacatggcttcgtgcctggcagatccactgtgactaatgcgcagccccacgtaggggcttcccttgtagttaagatcgaccttaccgagttttttcccagcatccatttccgaagggtgtatggcctcatgggttactatgggtacgaacacgaggttgctacagccctggcggccctgatgacgcacagaatcaaactcgatgacggaaagaggatggtagaaactggccttgttccacaaggagctccaacgagccctgccctggccaacatagtgtgtcgcaggctggatgcaaggctctctggattggcacagcgggcgggagctcgatacaccagatacgccgatgatttgacattcagttttgccgatgcaccccctgacaagggcctaggcaggttcctatggtgggttgacgcagtgtgccagcaagaaggctttgtcgagaatgcgggtaagagacgcgtgctgaggccctcgcaccagcagagagtcacaggcgtggtcgtgaactcacaactgtctgtgccccgttctgaacgtcgaaggtttcgggccatgcttcataactgcagacataaaggcattgccagtcaagcaaaacagcacggacgcgacgaggcagagttccgcgactacctgaccggcttcgcttcctatgtcaaaatggtgcagccagagctggggaataagttagccggcgaggttgctgacctgctgaagggagcatga

SEQ ID NO: 13893 - RNA, 1437 nt, synthetic construct
  source 1..1437: mol_type = other RNA
atgctgctgccaaacctgatcctggagctgcgcggactgctcgatgatcctgaggcaaagctcgagaggatcgtcgagcgcctcagggcacatgacgacctagcggagtacgaggtcgcgcgccattacgtggctaagcggttggaaccagtgatccgtgcttggttagcctcgcctgacccacgagtcagggtcgaggctatcgccgccgtgcgacaaaccttttccaagcctgctgccgcgaaggtgttaaggcacctcgtaaaagacgcaaccctgtccgtaaggggcgcagccagaagggcagtggcagaactgggactcgatgatgtggccctcagaaacacgaccatgcgcgaaccccgcaggagttcatggcctggtggctggaacccaagcggatggcagtttgggacggggcggaatcgtggacggcctaagcttgctccagctcccgttcgggcagggttaccggcactggctgacgtggacgccttggctgtgtggttgggttatgagggcgcaggcgaactgcggagattcatgcgacccggtagcgaaaccggctccccctacgtggatttcgagatagccaaagcccgaggaggccagcgcactatatccgcccccagagcgcccctaagggctattcaaagaaagatttacgctgaactgttagcaaaagtgccagtccacgatgcagcccacggattcgtagtcggcagatctactttgacaaatgctgcccctcacgttggggcaggcctgcttatcaaaactgacatccgagagttctttccaagcatccattattggcgggtgagagggctttttttttcactggggtatggcgaagaagtggcttgggccttggccgccttgtgcacaagacgccccgttattgaccccgagggggagagacgtgttgcttggcccggtcttctgccgcaaggagcccctacaagtccagcgcttgccaacctggtttgtcgacgcctggatgccaggctgtctggcttcgctgccaagattggcgcaaggtatacacggtacgcggacgatctgtcattctctattcacgatccgggacgggcacagggattggaagtggggcgcgtgctttggtggatagaccagattcttcagcaagaggggttcgccgagcatcccggcaaaagacaggtcctccgcccgcataggcgtcagctggttaccggaatcgtcgtgaatgatcaccctactgtgcctagagatgcccggaggcgcttcagggccattctacacaatgtagctcggagagggctcgccagcgaagctcgtggtcgagacgactttgccgattatctccggggctttgccgcatacgtggagatggtccagccagaactcggtgctcggtgggttgctgaggtagacgcgctgctgcagagtgcctga

SEQ ID NO: 13894 - RNA, 1422 nt, synthetic construct
  source 1..1422: mol_type = other RNA
atgctgctggcagacctgattctcgagcttagagagctgcttgtggacccccgagccaatttcgaggtaataatcgaccgtctggctgcacacgacgacttggctgagtacgaggtcgccagacaatacgtggttcccgccatcgaaggcctaatccgcgaaagattggacgaccccgatccacaggtgcgcgtacaggccattgtggcggtgagacagtgcttttcgaggagcgccgcggctaaactccttaggcatctggtcaaggacgcgaacctgagcgtaagaggagccgcacgcgaggccgtgtcttctcttggcttcgacgaagtggctttaccgaacgctgattttaaccctcggcaccagcgctggaatttgggcggctggtacttcggtacaggggactggagaagacctggcttggctccacaagcagtccgggcagcccttccaagtctccccgatgtggccgctttggccagctggctcaatattgatgatcctgctgagctccgacggtttatgcggcccggtagtgacaccgggagtccctacatcgatttcgaaataccaaaggctaagggcggagtgcgggtcatatctgccccaagagctcctctgcgagcaatccagcgcaagatttatgccgagctgctggcagcaattgccaaccacgacgccgcccatgggtttattgccggccgcagcacagtctcaaacgcggctcctcacgttggcgctaggctggtactgaagactgatatccgggaatttttccccactgtgcattattggagagttaggggactgttcagatggctgggattagggtccgttgcaggcgagcttgctgccctgtgtacacgacgacccgtggtcgagcgtaacggccaacggatggttgtctggccgggggtgttaccacagggagcaccaacgtcacctgccatcgccaatctcgtgtgtaggcgcctagacgctcggctccagggtttggccgagaggctggatgcgcgctacaccagatacgccgatgatctgaccttctcattccacggatccgacgggggtggagaacctggagtggctgtagggcgggtgttttggtggattgatcagatcttacagcaggaggggtttgccgagcacgcaggtaaacgccaggtgttgcgacccggtggaaggcagctagtgaccgggatagtggtcaatgaaaggcaatccgtcccaaggccggttcggcgcaggttcagagccatcctgcataattgcaaacgtgatggactggcatcccaagctcatgggagggatgacttcgcagactatctccggggctttgccgcgtatgtgcagatggtccagcctcagctgggccaacgttgggttgcggaagttgaagcactcctcgccggcaggtga

SEQ ID NO: 13895 - RNA, 1446 nt, synthetic construct
  source 1..1446: mol_type = other RNA
atgctgctggcaaatctcattttcgaattgcgacccctgctcgatgacccagaagctaacctgaggcagatagtcgctcggttgcgggcccatgacgacttcgctgagtatgaggtcgcaagacactatgtggcgggcaagctggagggggtgattagatcgtggttagctaaccccgatccgcgggtcagagctgaggctattgaggcagtacggcaagtcttctcccgtcctgccgcggctaaactgctacggcatctggttaaggatgccaccatctcagtgagaggagcagcaaggcgagcagtcgatgagctggggctggatgatgtcgctctccgcaacacttctctcgcagttccacgatctcctaggggcaggggggggttcaatcccaccggatgggaattcggcactggtgcccatcgtggacgcccaaggcttgaacctgctgccactcgtgcgggattgcccaccatcccagatctagcagccttaacctcatggctccgcatcgacgctgacgggcttagacgcttaatgaggccgggcggccatacaggagccccttatgtcgatttcgaaattcccaaagccagaggaggccgcaggaccatctctgcacccagagcccctctgcgcgctgttcagaggcagatactggcggagatcctttccaaggtgcctactcatgatgcagcccatggtttcgtgccaggccggagtaccgtcacacacgcaaccccccacgtaggagcacgcctcttgctggccacagacatccgggacttttttcctacaatccactattggcgagtgcggggactctttttcaccctcgggtacggtgaggctgttgcaggcgctctagcggcactgtgcacacgcagagacgtgataaatcccgaggccgaagcccctacgaggagggtagtttggccagggtggatgccccaaggagccccaacatccccagccattagcaacctggtctgtcgtcgcctggatgcgcgattaagtggcctggccgccaaactaggtgcccggtacactcgatacgccgacgacctgagctttagcttccacgacccggaacttgtggagaggctggagatcggtcgggctttttggtggatagaccagatccttcagcaggagggctttgccgaacatctcggaaaaagacagattcttcgtccgcacagacggcagctggttactggcttggtggtgaacgaccaccttacggtgccaagggatgcgcgcagacgctttagggccattttgcacaattgcaagcagagaggtgtggccagcgaggcaaatgggcgagacgacttccctgattacctccggggctttgctgcttacgtgcacatggtgcaacccaagttgggggctagatgggtggccgaagtagacgccctgctggtggatcacgcctga

SEQ ID NO: 13896 - RNA, 1491 nt, synthetic construct
  source 1..1491: mol_type = other RNA
atgctgctggccaatttgattctggagttacggcccctgctggcagacccacaggctaatctgccccagattaccgccaagcttagagaacaggaagattttgctgagtacgaggttgctaggcattacgtcgcaaagaagctggagcctacaatccgcgcctggctggacgatcctgaccctagggtaaggctggaagctatcgccgcagttcgacgaacgttctccaagcccgccgccgctaaggtactcagacatcttgtgaaagatgcccacttacgtgtcaggggggtggctcgggaagtcgtattcgagctgggcctggatgatgtcgcccttcgggataccacttttagggtgccacgtaatcctgctggcggagggggatggaacccgtctggatggcactttggcaccgggtcccaccgaggtcatccaagactcgcgccagaagcagtccgcgctggtctacccgacttgcccgacctgccagcccttctgcggtggttgagccttgacgacgaggccgcattgcgacggctgatgaggccaggatcagccgctggagccgcttatgtggatttcgaagtcccgaaaaaatcgggtggcacacgcctaatctctgccccccgagcgcccttaagagccgttcagcgcaaactgctggcagatatcctggcccctgtaccttgccacgacgctgcgcacggctttgttccaggacgctccacagtgactcatgcggcgcagcatgtgggcgccaagcttctcctccagaccgatattcgggatttctttccctcaatccacttttggcgcgtccgtggtttatttttcactctcgggtatagaggcgacgttgcacgcgcactcgcagcactctgtactcgtaggcccgtgattgccgccacaaggacagacgagcggagagtcgtgtggccaggggttctacctcaaggagccccgacgagccccgcattgtccaacctggcatgccgccgcctcgatgccagattaagtggactggcagctcggcttggggctcggtattctcggtacgccgatgacctgagcctgagcttccacgacgatgaggccctcgccaagctagacgtgggcagagcattctggtggatcgaccagatactccaacaggagggcttcgctgagcatcctaagaaaagacggattttgaggccacaccgaaggcagcaggtgaccggaatcgtggtgaacgaacatctggctataccgagagacgagaggagaagatttcgcgctatgctgcacaactgtagggcgcacggcttggacagtcaagcaaaagtgtgggcccaagccagaggccacgatcctgagcatgaaggcctgcgcgccgacttcctggcctatttgcggggttacgctgcttacggggcgatggtgcagcctaagcttggggcacgttggctcgctgaactcgatgccatggtgcagccagacaccccctga

SEQ ID NO: 13897 - RNA, 1365 nt, synthetic construct
  source 1..1365: mol_type = other RNA
atgaacccggtagaagctatactggagctcgagcggctgaaggccacaaagcccgtggatttggccgccgttgccagggtcctcgaaggagtagaaggcctggctgaggaagatatcgtagggactgtggcattcgagctgatcagcccccgagcagtgtttacccttttaaagagccctgagccctctgaacggttggctggcgtcgagcttgttgcaaggctcgggagactgcatgccgggtcctttctgcgccatgtggtcaaagatcccgaccctcgtgtggcctcatgtgctcgccggcaccttacccgtctgagactgccagaggtcggtctaccactgcctttgccttcgtttgccagggcctttgccagaccgtcctggaccgtcgcaggttggcggtttggagcagcacctcggttctctgacgctagatacccggttcgtgctgacctgagtagtgctgccagagctgaggcgcatctccgagtgcccctggcatctctaccatccctgcgccgctacgccgagtttacagtccccaagagacggggcggcgtacgctcattagccgcacctcatctggcactcaaacaagtccagcgccggcttctggacgcggtgttatccaggcttgccgtgcaccgtgcctcaacggctttcagttctgggagttcagtcgtgaccaatgcggcggctcacgttggcagagccatggtcattaaactggacctgcaggattttttccccagcattcacgaagagagggtgcgcggattatggggagcactgggggctgatcgccaagtagcccacgccctcgctaggctaacaacatatagaccacgccttgcgtccgggagcttgtccaccgtggcagtgcttccacaaggggcccccactagtccagccatcgcaaatctcatcgccaggaggttggacgccagactggctggtctgtctaaaaagtggaaagcttcctacaccaggtatgcggacgacctcacgttctctttcgccgaggagcctagacaggttggccggttcctctggtgggccaacgccatttgccagcaggaaggattcgtggagaacgctagcaagaggcgagttatgcgagccactggccggcaacaggtgacaggcctggttgtgaatcagagggtgactttgcctcgacacgtcaggagaagcttcaaggcaataatccataactgcgaacgccacggcgtggctagccaagctagaggacgacccgactttgaacagtggctactgggtttcgctgcgtgggcagccgtggcacaaccagatgtgggagtcgattggctccggcgggtgaaacaggttttgggccgttga

SEQ ID NO: 13898 - RNA, 1551 nt, synthetic construct
  source 1..1551: mol_type = other RNA
atgagtgcctcacagtccgccccagcgtggttgttgcttcccttacccgctaatgcagatgctgacgccatcctgatcgcaactattgagcaatatgcaaccagtcttccgcaggagtttaaaaagcttcacgacgcactggacgaagtgcgggcactagcgagctacgagccggctgtaaatagaagcaacaccctggtctgggagaagttggagacattactgaccgctccggaaggaacagcacggatcgctctgattagatacgctcgggaacatatgccagagcgggcctgcgccagggtgttaaggagactggccaaggatgccgatatgaatgtcaggcgtaccgtggctaaggccattcggaaggcgaagatacaggaagtggctattcccgccaagaaagacggcgattgggatccctctggttggttgctcccagatgaagtgtcaaaagtgacgcggcataaaactggcaagagagcccaggagaggtccggcgtacctgcactgactaagctggccgaactgagaaaactcctcggaattaagtccaccaatcaactgggtttctttttgctcgcatccgatcacaaaggaggcccctacacaactcataaaatccctaagagggacggctctgatcgccagatatgcgctccaaaaaagcaactgaagtgggtgcagaaacagatcctgaaacacatcctcagcaaagttcccccgcaccctgccgcacacggttttgtgtcgggccggtctacggtatcaaatgctactccacacgtgggggccgagctggtggtcaagttcgacctgaaagatttcttccctacagtgcattattttcgagtgatggggctttttgccagcctcggctatccagttggtaactgtatgtttggaactgacgatggcgcaaatcagatcgcccctgtcctggctcggctttgttgttacacccccgatcctaagcagtggggctctgcagcattgcctcagggggctcctacaagccccgcgatctcaaacctggtttgtcgccgactggacgccagactccaaggccttgccgagacgaaccacggcacctacacaaggtatgccgacgacctgacattctccttcccaaaggctgagggaatgaacttagggaggttcaggtggtgggttgaccaagtctgccagcaggaaggcttcgtcgtcaatcaggagaagttccgtgtgattcgcgacagtcagagacaggtcgttactgggatagtggtcaacgatgcagtaagagctccccgtgaactccgcagagagattagggcgatcctccataactgcgaaaccaaagaccttgagagtcaagctaagcgacaccctcgctttcgcggaaatgttccagcctttagccagtacctccgagggatcgccgcctatctaaacatggtgcaacctgaacatggagccgcgttgctgcgacgcgtgaacgaactactggggggacccatagagggggataccccatctcaggaccagggtaaagctggagacgcctga

SEQ ID NO: 13899 - RNA, 1548 nt, synthetic construct
  source 1..1548: mol_type = other RNA
atgagcgcaccccgttccgcccctgcttggttactgttgcccttacccgcaaacgctgatacggacgctggactcatcgccacagtcgagcagtattgcgcaacactacccgaagcgtttaaaaaattgcacgatgcactcgaccacgtaagggcactcgccagctatgagcccgcggtgaacagggccaacgtgcttatatgggagcatctggaagccctgctgtccgccaccgagaagaaggcaaggttggaacttatacggtacgcccgcgatcacttcccggaacgggcttgtagtcgggtgctgcgacgcttcgccaaagaccctgacatggaagtgagacgtgtcgtggcacgggctgtgaggaaagccaaaattgaggaggttgcaatccctgctcagaaggacggtgactggaacccaactggttggctgctgccaagcgaaggcctgaagataacccgacataagcctggcacaagaactcaggagcgctctggtgtgcctatcctcgggaagctaaaagacgtgcgaaaactgctgaacattaaatctcccaatcagctggggttttttcttcttgcctctgaccataagaatggtccatatacaacgcacacaattccaaagagagatgggtctgaaaggaagatctgtgcacctaagaaacagctcaaatgggtccagaagcaaatcttgaaacacattctgagtaaggttccaccccatccagcagctcacggattcgttaatggtcgatcaaccgtgtccaacgccaccccgcatgtaggcgcggaactgatcgtgaagtttgacctgaaagactttttccctaccattcactacttcagggtaatgggactttttgcatcgttcggctaccaggtcgacaactgcatgttcggcactaaagatgatgccaaacagattgcccccgtgcttgctcgcctgtgttgctacacccctgatccaacacagtggggaactgccacactccctcaaggggcccccacctcaccagctataagcaatttggtatgcagaaggctggacgccagactcatgggactcgcgaaggctaataaggggacttttaccagatatgccgacgacctgaccttctccttccccaaggccgaggggatgaacttaggcaggtttcgctggtgggtggatcaggtctgccagcgcgagggatttgtggttaaccaagagaagttcagagtgattagagactcacagcggcaagtcgtcaccggcatcgtggttaatgatgccttgcgagtcccgcgggagctgcgtagagaactacgggctatcttgcacaattgtactactcatgatattgagagtcaagccaagcgccaccccaaatttaatggcaatgttccagctttcacgcagtacctccgggggatcgcagcttacctgaacatggtgcagccggaacatggaggcgcgctccttaggcgcgtgaacgagttactgggagggcctatcgagggcgctgatgagacaccagatgtcaaggccggcgatgaatga

SEQ ID NO: 13900 - RNA, 1551 nt, synthetic construct
  source 1..1551: mol_type = other RNA
atgagtgcgtccccctcccctcctgcatggctactgctccctcttccagccaatgccgcacacgacgccgccctacttgcttccgtcgaagaacactgcactaagctgccacgcgacttcgctaagctccagaaagctctcgagcgcgtaaggtacctggcaagctatgaaccggccgttaacagggccaatgcactggtctgggaacagttcgaggccttacttagcgctccagaaggtcgggacaggatcgcactggtgggctacgcaagaaaccacatgccagtccgggcattagcccgcgtgttacgtcggctcgcgaaagatcctgatatgactgttagggggcagatcgcttatctcatcaaaaggtctaaaattcgcgaggtcgccctgccggctaagaaagatggtgattggaacccaaccggttggatgctacctgcagagcgggggcgaccaagtcgaattaccaggcacaagaccggaaagtccgtacaggcccggacaggcgtgcccttgttagccaagctggcacaactccgagccctgctgaatatcaagtctccgaagcagttgggctatttcctgttggcctctgattacaagaacggcccctatacaacacatgtaataccgaagagagacggcagtgatcgtaagatttgcgcacccaaaaaacaactcaaatgggtccaaaagcaaatcctgaagcatatcctcagcaaagtgcctccacaccccgctgcccacgggtttgttaacgggcgcagcaccgtctctaatgccacgcctcacgtgggtgccgagcttgtcgtaaagtttgacctcaaggacttttttcccaccgtgcattttttcagagtgatgggactgttcgcgagcatcggctaccccgtgggcaattgtatgtttggcactgatgacgattccaatcagatagcacctgttctggctagactctgttgctacacacccaaccccaagttgtggggttcagccacccttcctcagggggctcccacaagtccagccgtgagcaacctggtgtgtagacgtctggacgctagactggcaggcttggcagaggctaacaaaggaacctatactcgatacgccgatgacctgacattctcattcaagtcagcggagggaatgaaactgggccgattcagatggtgggttgaccaggtctgtcagcaagaaggatttacggtgaatcagcaaaaattcagagtcattcggtcttcacagcgccaggtggtgaccggcatagtggtgaacgcagggttgcgcgtgccaagggagcttcggagggagctgagggcgattgtgcataattgcgagaaacagggcgttgaatcgcaggcggctcggcatcccaattttgggggaaacgttggcgccttcactcagtatctacgcgggattgccgcctacctgaatatggtacagcctgaccacggtgctgctctgttgcggagagtgaacgaacttctcggaccagccgctgacgcggatgatgctgaggccaagggagggggagcctga

SEQ ID NO: 13901 - RNA, 1548 nt, synthetic construct
  source 1..1548: mol_type = other RNA
atgagcgcaacgactaggaccggcccggaatggctcttcaggcctctgcctgcaaacgccgaccatgacgacgctgttattaagaaagtggagcagcactgctccaagcttcccaacgagttcctgaaattgcaaaaaaccctggacgatgtccgcgcttttagtagctacgaaccctgtgtgaatcgcgccaatgaacttgtgtgggagcagtttgaggccctggtcaccaatccagatggtaagtgccgtcgtttgctgatcgggtatgcgacagctcacatgcctgagcgtgctgcagccagagtcttacggcgacttgcgaaggatccggatatggaagtaaggaatcatgtgtctagggcactgcgcaagtccaaaatcagggaggtcgccctgccacacaagaagggaggggactgggatacatccggatggcttttgcagagtgaggagactaaagttacgcgacataagccaggtaagagaaccttggaaaaaaatgaactccctgtgctcacaaatcttgcgcagctgcgcaaactcctgaatataaagtcaaccaaccagctcggctattttctgctagcctcggacaacaaagacggcccctacaccacacacactatcccgaagcgggacgggtcagatagaaagatttgcgctccgaaaaagcagctgaagtgggtgcagagacagatcttaaaacacatcctttccaaggtaccaccacaccccgctgcgcacggattcgttaacgggcgcagtacagtgtccaatgccggaccccatgtaggtgcagaactcgttgtgaagtttgatctaaaggaattcttcccaaccgtgcactacttccgggtaatcggactgtttgcatctatggggtatcctgtgggaaactgtatgtttggaacagaggataagagcaatcagattgcacccgtcctggcacggttgtgctgttacacgccagatccaaagaaatggggctctgctgtcttacctcagggcgcccctacaagccctgccatttcaaacctgatgtgccgacgcttggatgccagattagggggcttggccgaggctaacaagggtacctatacccggtacgctgatgacctcacattctcattccccaaagctgagggcctgaacctcggcaggttccgatggtgggtggaccaagtctgtcaacaagaggggtttactataaaccagcagaagtttagagtgatccgcgacagccagaggcaagtggtcaccggaattgtggttaatgacaagctgcaggtgccaagggagctgcggagggaactcagagctatactccacaactgtgagaaaactagcgtcgaggaacaggccaagcggcatcctcggtttactgagaacgttggcgccttcagtcaatatcttagagggatcgccgcctacctgaatatggtgcagcccgaacatggtgcagccctactgaaacgagtgaatgacctgattggcaaacctgagggcgaaactccccccaaagaaggtgagcagtctaaaaactga

SEQ ID NO: 13902 - RNA, 1530 nt, synthetic construct
  source 1..1530: mol_type = other RNA
atgagtgccactcacacaggcccagagtggttgtaccgtcctctcccggccaatgccgacttcgacccagcagccttagccaaagttgaggaacatgccgcagcattgcccgctgcttttgcaaaattgcaaaccgcccttgacgccgtgagggcccttgcaagctacgaaccttgcgccaatagggccaatgagctggtgtgggagcgattcgaggcactggtggcggacccagatggacatcatcgcgcggctctactgcgttacgcggtggctcacctcccagaaagagcagctgcacgcgtcctacgtaggctcgcaaaagatcccgacgtgagcgttaggacgcgagttgcccgcgcattgagagcctccaaaattcgagaggtggcacttccacaccgcgaagccaacaactgggacacgagtgggtgggttctgaggacggaggataccaaggtgactcgccacaagacaggaaccagggcgcttgaaaaagccggcctgccagtggtgaccaagttagccgatttgagaaagttacttaacatcaagagcactaatcagctgggatatttcctgctcgctaccgacgctaaggacggcccctacacaacgtataccatacccaagagagacgggactgatagaactatctgtgctcctaagaagcagctcaaatgggttcagaggcagattttagaccacatactgtccaaagtacccccgcatccagcagcccatggcttcgtccctgacaggtcaactgtcaccaacgcagggccccatgtaggagccgaactggttgtcaagtttgatctgaaggaattctttcctactgtgcactactttcgggtgattggactgttcgcttctatggggtacccagtcggcgactgcatgttcggcaccgctgacacatcaaaccaggtggcccctgtattggcccggctctgttgttatacacccgacccgaagaaatggggtactgctgtgttgccgcaaggggctcccacatctcccgccatctcaaacctgatgtgcagacgccttgatgctcggctggccggactggcagaggctaacacaggcgtgtataccagatatgccgatgatctcacattctcctttaagagcgctgatggcctgaatctcgggagattccggtggtgggtggaccaggtgtgccaccaggagggctttaccgtaaaccaggctaaatttcgagtaatccgggattcccagaggcaggtcgtcaccggaattgttgtgaatgagaagctgcaggtgcctagagagctccgccgggagcttcgagccatcctgcataatgtcgaaaagacctctgtggcagagcaagcgaaacggcacccccgctttgaaggtaatgctggcgcattcgcgcagtatctgcggggtgtcgccgcctacctgaacatggttcaacctgaacacggtgctgccctactgaaacgggtcaacgagctgctcgggacaggtgatgcggacggagatcctacaccatcgtga

SEQ ID NO: 13903 - RNA, 1566 nt, synthetic construct
  source 1..1566: mol_type = other RNA
atggccagtgttgtcgccgagattatcagagaacggtggtttcagctgcagattagggccaacgccatgaatgttatcgagcgagctcccgcttggctgcttaggccactccccgtccacgcagtcgctgatgacaagctgaacgacagaatcgacaaattggcggccaagttgcctgagagcctccccagactccaggccgtgctggatggagtgcaaatgtaccgcgagtatgagcctgccgtgaatcgggcaagtgcccacgtttggaacgtcttggatcagcttttcgcggccgacgcagactcagtgagagtgtctctgttggtgttcgcagaagcacatatggtagagccagcccgtgctcgaatttatcgacgcctggtcaaagacccttccaccaaagtccgcaatagagctcgccgcttagtccagaggtgtgacttacacgaagtggcccttcccctccagaaggacggcgactgggatcccactggttggctgaggggggtcgtggataggagactctcccggcatgcccagggcaaacgggttcaggagagacatgacgtccccgtaatcgggacgctggctcaactcaggaagcttctaggaattaggagttctcgccaactaggttattttctactggcgtcagatgcagatgggggaccttatgtaagatttactattcctaagagggatgggagggagcgcgaaatctgcgcaccaaaaaagcagctgagatgggtacagcggcaaatactggacaaagtgctcgcgcaggttccagtccatgatgctgcccacggtttcatagtgggccggtctatcgtgaccaacgcatcccagcacaaaggtgcggagatcatcctgaaatttgacctcacagatttctttccaaccatacactactaccgcgtgttaggcttttttgcatccctgggatacagcgtgggcaatggccgattcgggaccaatgactctagcaagcaggttgcccctacgctggcccgacttgtctgttatactccagatccacagcagtggggcgacgctagactgcctcaaggagctccgaccagccccgctatttcgaatcttgtgtgccggagactcgatgcacgccttgctggactcgctaagcggaacgaggcagtgtacactcgctacgccgatgacctgacattctcattcaggaaggcgaccggcgacttaggccgtttccgttggtgggttgaccagatctgtcatcaggagggattcttggtaaaccagaaaaagttccacgttattcgtgcctcacagagacagctggtgacaggaattgtggtgaacgatgagctgcatgtgccgcgagacgaaaggcgtcggtttcgggccatacttcacaattgcaagacacacggtctggattcccaagctagggggcatgcccaatttgctgaatacctgcggggcttcgccagctatatccacatggtacaaccggacgaaggcgcagaattgttgcaggccgtggaggaactgctcggacctgagacaggggaagatggggtgccctga

SEQ ID NO: 13904 - RNA, 1488 nt, synthetic construct
  source 1..1488: mol_type = other RNA
atggccgatgtcctcgacgtgccagagtggctcctccgtcctttacctgcgaacgcctctgccgacgcaaagctccacgctgaaatcggaaggctggccagcaacctgccagccagtctggcagagattgccaaagcattggaggccattaagaattactctgaatacgatgcggctgcaaattgggcttccgcacacgtttggcaagccgtggcgaagttcagtgctgccgatttgccgggagtgcgagtgggcctgcttaagttcgccgcggcccacatggtagctaaggcacaggcacagatctgcaggcgcctcgcaaaggatccagctgtggctgtaagaaggagggctcgaaaactggtggagaacgccggttttcatgaggtggccctcccagatacggctgatgggccctgggatgccacaggatggctgcgtggctctgccacaggggtgctatcccggcacaaacagggaacaaaaatacaggcagaaaggggactcccaaagctgagtaccgtgggggagcttaggaacctgattggcatcaagtcagaacgtcagctgggatggtttcttttggctactgacgcagaggatggtccttacgtcaagtttacaattcctaaacgggatcagactgagcgcgagatttgcgctcctaaaccccagctgcggtgggtgcaaagacaaattttggacaaaatactcgcaaaggtggctactcatgacgctgctcatgggttcataccgggcagatcgatcgtaactaatgccgcgccccacacctcagccgccttaatcctaaagttcgacttgaaggattttttccccactatacattattaccgggtgatggggctgtttacctcccttggctacaccgtcggaagggccaaattcagcgccaaagacgatgcaagggaagtggcgcccacgctagctcgcttatgttgttatacccccgatccccaccagtggggttctgccttggttccacagggtgcccctacctccccagcaatcagcaacatcgtatgtcgccgactggacgcccggttgagaggcttggccgaacggaacaagggtgtctatacacggtacgctgacgacctgaccttcagctttctgaaagacgaggtcgaacttggccgatttagatggtgggtggaccagatctgtcaccaagagggcttctttgttaatcaggctaagtttagagtcatccgctgctcacagcgccaagtggttaccgggattgttgtcaatgacgcgctccgaatcccccgggaggaaaggagacgcttcagagcaattgtgcacaattgcaagaaacacggaatcgaagcacaggccagaggccataaaaagttcctggactatctgcgcggctatgccagctacattaacatggttcatcctgaagagggggcagagcttctggaggaagtcgaagctcttgccggcccggagacaggggagtga

SEQ ID NO: 13905 - RNA, 1482 nt, synthetic construct
  source 1..1482: mol_type = other RNA
atggacccacttccagccgcgcctgcatggctactacgaccccttcccgcgcatgccgtggaggatgagaagctccacgcaagaatagataagctgtgccaaaggttaccagctgggttggcggagctcggcgttgcacttaaggccgttgaaatgtatagggagtacgacgccgccgctaaccatgccagtatccatgtgtggcgtctgctggatcaattttactcatctcccgcgagcgtccgctcacagctgctcaatttcgcccgacagcacatggttcctcaggcccagcacagaattttgcgacggttggcaaaagacccctctctcgccttgagacgcagtgtccggcggctcattgagcgtggagctgtccgggaagtggcccttcctctggaggctgacggcgattgggacgcacaagggtggctgcggggtaacagcctacccctgactcgacacaggcagggaagacaggctcagaccgatcatggtgtaccacggctggctaagttggcagacctgaggaaactgttggacattaggtcggccaaacagcttggctggttcttactcgcaactgatgctgacaatggaccttacaccacttttaaaattccgaagcgaagcggcagtgagaggctgatctgtgcccctaaaccgcagttgagatgggtgcagcgtaggattctcgacaaaatcctggctcctgtagccccccataatgcagcccacggcttcataccagaacgctccaccgtgactaatgctgccgtgcacacgggagcggcagtggttctcaagttcgacctgacagatttctttccaaccatccactatttccgggtggtcgggctttttgcctcccttggatatcatgtgggagacggccggttctcatccgatgatgatagcaagaacgtggcaccgacgttagctcgcctgtgctgttatacacccgatccacaggactggtctgctgccaaattaccacaaggcgcccctacctcccctgcaatctcaaacctatgttgccgcagactggacgccagactgcaaggtctggctgagcggaacgggggcaaatacacaagatatgccgatgacctgacattttctttcgaaaagcccgaactggctctcggacggttccgctggtgggtggatcagatctgccatcaggagggtttttttatcaatcaggcaaagttcagggtgattcgcgcttcccaaaggcaggtcgtgaccggaatagtcgttaacgacgaactgcgagtccctagggaggagagaagaagattccgggccgttctgcacaattgtcgccaacatggggtaaagagccaggcgaaggggcacaaaaggtttaaggaatacctccgtggctttgcaagctacgtgcacatggtacagcccgaggaaggcgctgaactgctccgccaggtggacgagctgttgggtgccgaagggcagagttga

SEQ ID NO: 13906 - RNA, 1428 nt, synthetic construct
  source 1..1428: mol_type = other RNA
atggccgatagtcccgtgctgtccatccctacctggctgctgcgcccactgcctatcaacagcaaacgcgatagcaagttggagagtcaaatagaaaagctggccaaaaacctgccggggtcacttgctcagttgacaacagagctttctaaggtcaaaatgttccgggaatacgattctgccgccaatctggcttctcgccatgtgtgggtcagtaggtaccattttttaaactcatctcttgacgaagaccggaaagcgcttttggagtttgcacagctgcacatgacacccacggctaaagcccggataattcgtaggctctccaaggatccccagatgggggtgagacgtgcggtccataggatcatccagaaggccccaccttacgaggtggctctacctgaggcacgagacggtaattgggatgcaagtggatggaccagaggagttcaaccaggcagattaatgcgcgtgcgccgaggacaaaagaagactcagaaagagtgggggctccccgggctatccaccgtaaagcaactgagaactctgctgggcatcaagtccgagaaacagctggggtacctgcttttagcgaccgacgaaggcgggggcccttatacaagattcagcattcagaaaaggaatggctccgacagggagatctgcgctcccaaaccccagctgctgtgggtgcaacggaagattctgcacgagatattagacaaggttcccttgcatgaatctgcccatggcttcgtgcgcggacgtagcactgtgaccaacgcgacaccgcaccgaggtgcagcctttgttctgaagtttgatctcgagaacttcttccctaccgtccactattacagggttatgggcctatttgctaatctcggttattccatgggaaacggacgcttcgaggctcgggataagagccgacagatcgcccctgtgctggcaaggctctgtgtctttgttgaagaccccaatgcatgggggactggtttcatgccacagggcgctccgacttcgccagctattagtaacctggtgtgtcgcgggatggacgctcgacttgccggcttggcagaacaggtaggcggagtctacacacggtatgccgacgacctcactttctcttttccagaaaccagccctgtgaatgttggccgcttcaggtggtgggtggaccagatttgccaccaggagggattctttttgaatcagagcaagtttcgggtgatcaggcggtcccagagacaaacggtgaccggaattgtagtaaatgatgagctcagagtcccaagacgtgaacggagaaggttcagggcaattcttcacaactgcaaagcccagggggtggaatcacaggcccgaggtaaccccgcctttagagattatctccggggcttcgcctcatacctcaactga

SEQ ID NO: 13907 - RNA, 1521 nt, synthetic construct
  source 1..1521: mol_type = other RNA
atgactgatactcccacctggctgttacatgctttgccagccaatgccgtcgtggacgagaagctaaatgctacgttatcagctctggccgccgcattggccgacaatagagataagccactagttaccgctggcctgttgacagagatccagggccaccttgctcacgcccaaccgttcgcggcatatgaggccgctgtgaacgggatcgctggtcaggtgtggcagctgtttgaagctgtgcatcagaggcaaaatcgcccggctaaactcgcctttctgaatctggtggtgaggcatctcactccaggggcgctcgcccaattgtgccgtcgttgggccaaggacgcagaccctgcaattcgcagagctgtaggccgcgtgattgagacaggggccattcacgaggtcgcccttcctgcgaccaaagacggagcctggagccctgccggttggagaaaaggcacggtcgaggtcgacctttccagacacaaggtcggtacagccgtgcaagaagcgaattccgtgcccccactggcaaaccttagacagcttcgcgaactgctcggcatacgtagtgcaaagcagttgggctacttcctgctggcctctgacaaagatgacgggccctacacacggtttacggtgccaaaacggggtggcggagaacgggtcatttgtgcacctaagcctcagctgaaatgggtgcagcgccgaatacacgagcggatcctgtctggggttcctctggccgatgcagcgcatggatttgttcccggacgttctatcgtgagtaacgcggcagctcacgttggtgcagcagtcgtggtgaagtttgatctgaaggacttcttcccgaccatacacagctacaggatgattggcctattcgcccgcatgggctactcagtaggcactgcaaagattgctaccgctgatgaatcagcaagtgtggcccccgttctcgcacggctgtgttcctacactcctgatccccgagcctggggaaaagcccatgctccccaaggggccccaacatcgccagctgtctccaacctcatctgcaggcacctggatgctaggctcgggggactggctaggaaactggggggggtgtatacccggtatgccgacgatttaactttcagcttcgcggccacaggaatcgatttggggagatttcgctggtgggtcgatcaagtttgccagcaggagggattcgttatgaacgccgataagtttagggtgatcaggcggagccagagacagctagtcacaggcctggtggtgaacgacggcgtacgaccaaccagggaacagcgccgagcattcagagctgtgctccataactgtcggagaaatggcgtcgtaaccgaagcccgaggtgaccccaggttttctcagtatttacgggggttcgcatcctacctccacatggtgagaagcaccgagggagctgacctggttcgccaggtagccgagctccttgaccctcctggcggtggagaagacaagccctga

SEQ ID NO: 13908 - RNA, 1566 nt, synthetic construct
  source 1..1566: mol_type = other RNA
atgagggaagatacacagagcacgtcaagtgtggtccttcacgaggcagagcttaagaataagcttcctattggggccacattcgacagcgcactgctcgagcagatatccaccctggccgatcagctccccgacagtatgtcagaactttataaggtgttatccgacatcgacatgctggtggagtttgatgctgccagagtatttgttgtgagactagtgctggcgaggttgcgagtactgacccacgctgaggagaaacaaagactggctctgctggatatggccagggattacatgactacagatgaatgtgtacccgtttgtaggagattcgcaaaggacccatcagcccatgtgaggggaagagtcaagactctgattcgaacgaaaaaacctaaagatgtggctttgcctctcgaggagggagaaagatgggatgcctccggctggtccaagggcatcaatgctgatcccgaacaagaaacatcccctctgttcaagcacgaacgcggctctcggattcagcgcaaacatggagttcccgaaatcgagactgtcaaggacttaaggactctcctgaagattaagtcagaaaagcagttgggctatctcctattgtccaatgagcttgaagacggcagtgggccctacaccctatttgagatcccaaagaaggacaaatcgcccagactgatctgtgcaccgcggcagcctctgaaaggaatacagcgtcgcattctggataggatcctcagcggagtgccgccacacgaaaccgcacatggatttgtgccaggtcgctccatcgtgaccaacgcggccgtgcaccagagcaaggagattgtcatcaaattcgacctcgagaacttcttcccatctatgcattactatagagttatgggcttgttcgctcaactggggtacgacgtgggagagggcttttttcagagcgacgacgagagtgaagctatcgcaccggttcttgcaagactgacaacctataccagcaatcctaaggagtggggccggggatatcttcctcaaggcgcgcctacatctccctacatagccaatctaatctgccgaggactggacgcacggctgtctgggttggcccgttcactggatggggactatactcgttacgccgacgacatgaccttttcttttgccgagctgccccgcacaaaaatcggtaggttccggtggtgggtggaccaaatctgccagcaggaagggttcgccgtaaaccagaagaaatttcgggtcgtgaggcggagccagagacagatggtgacgggcattgttgtgaacgatactctccgggtcccacgaaaggaacgacggcgctttagggccattttacataattgcgagcgctatgggctcgagagtcaggctcgtggccgcaaggatttcccagcttacctgcagggttacgcgtcttacattaacatggtccaccctgatgaggggcggaaattcattgagcaggtcgaacacatcttgcaattagatcgcgagggtaaactcccaatagagaaagaccccgaaaacggttga

SEQ ID NO: 13909 - RNA, 1470 nt, synthetic construct
  source 1..1470: mol_type = other RNA
atggcagccactaaatcatccatccctgcatgggcctaccgaccgctcccattgaatgcccagcccgccacagaacttattcaacagttagacaagctcgagcagggcctgccaggaagttcttgggagatcctgagactggtgggcgagcaggatggttctgcaacctacgaagctgtggccaatcgcgctatggagattatctggacgcaccttgacgagtgtattgcaaacgaccctcacaccgtacggcagtttgcggcttctcatctccctattagggtcaggaaccgcgttcttcggagactggctattcacccctccttcagcacccgccgatcggtcaggtatcagattaacgagtccgccgtccgcgaagtggctcttcccagtgcccccgatggagagtggaatgccgagggttggttactgaattccaacagcagcactctgatgcgacctagaaagttgaaagctcccgacccaagactgccgaaactgaagaacgttaaagctgtcatgaaggagttgggcatcgtttcaaatcggcagctagggtggatgctccttgcaaccgacgaggacggagggccctaccacacctttgaaatcgggaagcggaatggcaaggctagaaaaatctgcgcaccatgctggcaactcaggcgggtgcaacagaggattctgcacaatatactggaccatttgccaccccatccggcagcccacggatttgtgaagggcaggtcagtggttaccaatgcggccccacatctcggaaaacccttgctactgaagttcgacctgcttgatttcttcccgacaatacattaccaccgtgtgatcgggctgttcgcctccatgggttacggtatgacttctcctttctttgatactgagaatcgcagccgtaacgtcgcgccagtgctcgctaggctttgtacatataccgaggatcctcgggtgttccgagatggaacgctgccacagggagcccctacatcccctgccatcagtaacctgatatgtcgacgcctcgatgcaaggctggacggcctggcacgaaaacatggggccgcctacactcggtatgccgatgacctgacattcagttttgaccaagatgagatttcagtgggccgttttcggtggtgggttgatcagatctgccatcaggaagggtttctggtacaccaggcgaagtttagggccatacgtagctcgcagcggcagagcgtaacaggcgtcgtcgtgaacgaacgcatgagggtgccacgcgatctgcgcagacggttcagagcaatcttgcacaactgcagaaaaagaggcgtagctgctgaagctaggggcgacgccgggttccctagctacttactcggcatggcgtcttatatgtatatggtgaaccccgacgaaggtgggcccgtgctagacgaagttagaaagctcttagcagaacaaggaaactga

SEQ ID NO: 13910 - RNA, 1488 nt, synthetic construct
  source 1..1488: mol_type = other RNA
atggccagccatcgggacaggtatgatgaccgtccgccacttcctgtcggcgctgaaaccaacccagaagatctcgcccgcgttgctgagttagcggcgcgactcccaggctctgtgtctgcactgtcagacttcctacaggcgagggactcttacaacgattttgatcctacccgcttagcagccaacgacgcaatccttgcccgcctgggagccttccatctagccgctgaagggacccaccggcagctgctaaattacgcgcaggcctatatggcccctagcgaggtgatggcagtgtgtcgcatggtgttacgcgggggctctacacgcctgagagaacggtgtgttgatctgctcaggggggcacagcctgatggacttacactcccggctagacaagggggtgcttgggattggactggtctgctgcggggagtagagcggggcagactttttgccaaacagcccagccagagactgttggagagaaatggactgccccagcttaccacggtaggggagctgcgggccatgctgaagctgtcctcccccgagctgctggggtacttgttattatccacaagcggttcaggcggcccatatgcaacctttacaagacctaaaagatccggcggagagagactcatatgcgctcccaacccaaccctgaagcaggctcagagagccgtgttggagaacatccttgccagggtgcccgtgcacgatgcagctcacggatttgttgaaggacgctcgaccgtgacgaatgcccgcgcacaccttggcagggagctcttgattaaattcgacctccggaacttcttccctagcatcacttactaccgcgtcatgggactctttgcccacctcggctattacttggagggcggagtcttctcttcccgggacagcagtagggcagtagctcccacccttgccaggctgacgacctatacaccacccggcgctacttggcgtgcgtcttatactcctcagggggcaccaaccagtcctatcatttcaaatctgatctgtaggagactggacgctcggttgtacggcttggccgcacgaataggtgccacatacactcgttacgctgacgatctgacatttagtatgaatgccctgcccgaatcgggtctgggcaggtttcgttggtgggtggaccagatttgcgttcaggaggggttctttattaatcattcaaagttccgggttatccgcaagcatcagcggcaacaagtgaccggaatcgtcgtcaatgaagctctccgagtccccagggaggaaaggagaaggttccgggccattctccacaactgccgaacacagggtgtggaaagccaagccagagggcgagccggtttccgtgagtggctgctggggtatgcaagttacatgaatatggtcaacccaactcgaggagggcaggcgctggctgaagtgcaagctctcctagccgcagagggcccgtccacttga

SEQ ID NO: 13911 - RNA, 1422 nt, synthetic construct
  source 1..1422: mol_type = other RNA
atgcacgacgaggtgcttctgggacgggttcgatctctggtggcggccttacccggcagcttgtccgaactgggtgcttgtttagcggaggtcgaaagttttgccgagttcgatagcgccgctgtgttggccgctcaggcttttgatgcccggcttgacgatctactgcgccggcctccgaaggggctctttgaattcatgcggagcaacctccctgtggatcagcagctgcaagtctgcaggcgcctagtgaagcatcccaatctgcctactaggaggagggccgttactctcttgaagcgcttaagaccagatgatgtcgctctccccctttcagcaaaaggcgaatggaactggcgaggctggactaggggaacagagcctggacgactgttcaagcacagaagaggagtgaaacgccaggccgaagtaggtgtgcctcaattgaaagacttagaggccctacggaggcgactcgccatcgactcgctgaaacagcttgggtggtttatgacagccaccgccggagagggagcaccatactgctcttttgaaatccccaaacggagcgggggtcttcggagaatagatgccccaaggggacagctgagggccctccaacgaacggtgctgcatgagatcctcagcaaagtggcagtacacgaggctgcacacgggtttgtgcccggtaggtccacattgaccaatgccgctccccatttgggccggaagctcgttctgaagttcgatctgagaaacttcttcccgaccatttcctactggcgcgtcgtggggttactggcctcactggggtacgatgtggggacgggcctgaacgtagtcgaggacagcagtcgggcagttgcaccagtgctggcgaggctcctgacatttcgcgacgacgctaagttgttcggcgcaggctatgctccacaaggggcacctacttccccggcaatatccaacctggtgtgcagaggcctggacggccgtctgtcagggttggcagcgagaatcggaggtacctatacccgatacgctgacgaccttaccttcagtatggatgctgaaccagccggcggactaggccgcttcagatggtgggtggacggaatttgtcagcaggagggcttcctccttaaccgtgagaagtttagggtgctgcgggcctctagacgccagcagatcacaggaattgtcgtcaatgactcacttagagttccacgggaggtccgccgtaaagttcgtgccatggttcataattgtcagaaaaatggtgtcgaagctgagtctaagggggaccccggcttcgtagacaggctcagaggcctggcagcttatattcacatggtgcaccccgaagaaggtcgccctctgctggatgcgatcaagctctttggggaaggcggcgaggatgactga

SEQ ID NO: 13912 - RNA, 1275 nt, synthetic construct
  source 1..1275: mol_type = other RNA
atgctcgacaaactgttgccttatctgcagattttcatcccactctcagttattctgttgttcattgcacagttcctcgaaaagcgtaaaaacgagacaagacaggctgccccaccccgaagaataggagagcggtctgcctcttcccgcaggcctacacgaagttttcctcctgccccggtgaatgccggcgtaaatactacaaacccaaggtgtcctaataagaggcatgcttacatcagagcgccacgcagaccccaaagtgatccatcagccgctgcccgattcgggatcccagcgttgatgaaccggggagacgtcgccaagtggctgggcatgagctggaaacacctcgtatggctctgcaacctctttcacaattgggatcgaaaaggagttgggcactatcacgcctggaaagtgcccaagagagccgggggcgaacgcgttatcactgctcccaaaccctacttgcgggctgtgcagaggaagattctggcagatattctatccagaatccccattgagcctcaggcgcatggttttgctcgcaaccggtcaaccgtcaccaatgcatctgtgcatatccagcggcccatagtagtgaaattggacctcgtcgacttctttccaaccatcacctaccgcagagtccggggggtgtttggcacactgggttatagcgaggaagtgtcgggcgtcctagctcggctttgcacgatcgccccaactgatatgctgcccctcgctaatgacctgcgtcgaagcctgctattacgacggcgccatttacctcaaggcgcacccaccagtcccgccttatccaatctggtttgcagaaggatggaccgtaggcttgccggcttgtgtgcaaagtttaacgcagtgtacacaaggtatgctgacgatctgacatttagcggagatgagaagttcgctgccgccctgggtgatttctttgacattgcttgtaggatcatcgcgctggaagggttccggataaattgggccaaacgccgcataatgcggaagggagccagacaactggtgaccggcgtggtcgtgaaccgcagaacgactcttcctcggggcgaacgcaggcaccttcgtgctcttctccatcactggaggaccaagggggacttcactgcgccgccacacgtggagaacaaagttgcatggctgggaggtaagctggcatacttttccatgattgatcctgcaaagggagcaccgatgcttgcccagttcaaggctctggccagggggagatga

SEQ ID NO: 13913 - RNA, 1308 nt, synthetic construct
  source 1..1308: mol_type = other RNA
atgtttcagtggtcttttcgacccctgaaatatagtgctcaagagtccgatgtgaaacctagtcctccgcccgcctctcgaatacccgattccaggttccagatcacggattgtagactgagatcaggcgagtcaagtgcggtgaacgcgttctggattattggggcgcttatcgccgcatggctggtgttgcggtggctgacaggacgcggaaccgctaggcctgctggagatcccttcgtgacaaaacgcaacccaaagaccggtgaaccggtaccaccaggcagcggcaaaggacgggaacggcttcgagccaccgctactcacaggccgcagctcctggcagaaaatggtcttcccaatattgcccgccgtgatgacttggcacgcgctctgggtattactcggggcacactggactggctggcattccccgacgacagggagcagcctcctcactactccgcatttgccgtgcctaaaagatctgggggttacagggtcctatacgcccccaaaccgaagctcaaggccgcccaacactggatcagaaaggaaattctctcaaagacctttgctgaggaccccgcacatggcttcgttgccggacgcagcattcataccaatgcacagccacatgccgggaaagacatcgtggttacactggacctggataactttttccctagcgtgacctacagacgggttcgcggcatcttccaaagcctgggctatggggaggaggtagccatccccctcgccatgctgtgcactgttaagccagccgaaaaggtgcgcgaattcgtcggcggtcagaggcaccgcatgttaccacagggggccccaactagcccagcacttgctaacctagcttgcaggcacttagatctccgtttggcaggactggctaaaaagttcggctgtacctacacgcgttatgctgatgatctgaccttttctggcgacgacactttcagacggtcgttgaaacgatttttaaagctcctccaccagataatcgccaaggagggatttaaactcaaaaaggggaagacacactttgctcggaggggagcgagacaggaggtcactggcctggtggtgaacgacgggcccagagtccctcgagcctatcgacggaggctcagggcaatcctacataacgctagacgcggggggcttgaggcccaaaatcgggagaagcatcctcactttcgtcaggcactgaggggcagaatagaattcgtccggtccacacatccagacttggccgagaagctgattgccgaattgaatgcgatcggatga

SEQ ID NO: 13914 - RNA, 1167 nt, synthetic construct
  source 1..1167: mol_type = other RNA
atgagtgtgttctggatcgtggtggccctcatcgcagcatggattgttctgcgagcccttaccggcaggagaaccgcacgggttgtgggtgacccgtttgtgcggatgaggaacccaaagaccggggagccaattcctcccggtagcggaaagggtcgaatgcgcttaagggccaccgctgctcaccgacccgaattgctggctgagaacggcctacctaatctagcttcaagagaagagctcgccgctgctttggggatcccaagaggaacactggactggctggccttgcctgaaaggaagaaagaacctcctcattacactgcctttgcagtgccaaagcggtcaggcggctatcgcgtgctgtacgcccctaaggctaaactgaaagcagcccaacactggataaggcgggagatactggcaaagacattcgcggaggatccggcccatggtttcattgccggccgcagcatccacacaaatgccgccccccatacagggaaagacattgtcgtcacccttgatctcgacaactttttcccgtccgtgacctacagacgggtcagagggatcttccagtctctgggttacggcgaggaagtggcaattcccctcgctatgctgtgcaccgtcaaacctgcggcgaaggtacgggagttcgttggggggcagagacaccgcatgcttccccagggagcgcctactagtcccgcactcgcgaatttggcttgtcggcatctggatctgaggctggcaggcctagctgccaagttcggatgcacatatactaggtatgctgatgacctcacgttttccggagatgccgcattcgagcgctctctgaagcgctttttaccattgctccaaaagatcgtgaaagccgagggctttaagctcaaaaaagacaagactcacctcgccagacgtggagcccgtcagaaggtcacgggcctggtggtaaatgatggccccagggttccacgggcatatagacgaaggctgcgtgctatcttacacaacgctcggaaaactggacttgacgcccagaaccgagacaagcacccccattttgctcatgccctgcgcggaagaatagaattcgtaagaagcacacacccacagttggcagccaaacttcttgccgaactgcgctccctggggtga

SEQ ID NO: 13915 - RNA, 1110 nt, synthetic construct
  source 1..1110: mol_type = other RNA
atgaccgaacgacgggccgcgatggggttcttcgattggctcactaggcgcttactgggaagagggaagccagcagcccctccagaggaaagactgggtcggaagcgtcttcgtgctaccgccgctcacaggcctgatctactggctcagaacgggctcccgtccttggcatccagggacgacttggctgccgcactcgggatctctaggggagtcctggactggctagcctttccagagcgcaaagaagaacccccacactatgtggcttttgccgtgcctaaacgcagcggaggatatagggtgttgtatgcccccaaggccaaactcaaggccgcgcagcaatggatccgacgcgagatactggctaagaccttcgcggaggatcccgcccacggtttcgtagcagggagatcaattcatacaaacgcccagcctcacgcgggtaaagacatcgtgattacacttgatctccaggattttttccccagtatcacataccggagggtccgaggcattttccagtcgttagggtacggagaagaagtggcgatcccactggcaatgctgtgcaccgtcaagcctgctgagaaagttcgcgagttcataggcggccagcggcatcggatgctccctcaaggcgcacccacatcacctgcccttgctaacctcgcctgtcggcatctagatgttagactggccggactggccgctaaatttggctgcgcttatactcgctacgccgacgacctggcttttagcggagacgcaacgttcgaacgaacccttaaacggtttctgccgctcctgcatcagatcgtcaaagccgagggctttaagctgaaaaaggggaagactcatctggccagacggggcgcaaggcaagaggtgacgggtttggtagtgaacgacggccccagagttccgagagcataccgacgccagctgcgggcaattcttcacaatgctagaaagaatggcctggaggctcagaatagggagaagcatccacactttgcccacgccttgcgtggccgcattgagttcgtgagatctactcacccccaactggccgcgaggcttctcgcagaattgaaggcattagcttga

SEQ ID NO: 13916 - RNA, 1110 nt, synthetic construct
  source 1..1110: mol_type = other RNA
atgggtttctttgactggctgactcgccgactgctaggagcaggacgtcccacccccaacaggccagagtgggcagaagtgagtgaggaggccggacgctctaagaggcttagagccacggcagctcatcgaccgcaactgctagcacagaatggccttcctcccctggccactagagacgacctcgctcgtgccttaggcatctcacgaggggctctggattggctcgctttccctgataaggccaaagagccgcctcactacagtgcctttgcggttcccaagcgcagcggtgggtatcgggtgttgtacgctcctaaagggagacttaagaaggcccagcagtgggtctaccgtgagatcctggctaaggtaaaaccttccgccgccgcccatgggtttgcaaaaggccgaagcattcacaccaacgccgccccccacgcaggaaaggatattgtgatcacccttgacctccagcacttcttcccaactatcacttatcggagggtgagggggatcttccagtccctcggctatggcgaggaggtggcaatagccttggccatgctgtgcaccgttagaccagcagagaaactccggggcttgttggggggacagcgacatcggatgctgccccaaggcgctccaacttcaccagctctggcaaatttggcttgcaggcacctggatgctcgcctggctggtctggcacgtaagtttgggtgtacgtacacacggtacgcggacgacctcacattctctggagatgccgcgtttgaacgcaccctcaagagatttctgcctcttctgcatcaggtggtaaagaaagaaggattcgaactgcaaaaaggaaagacacatttcgcgagacggggcgcacgccaggaagttacaggtttagtcgtcaatgatggccctcgggtcccaagggcatatcggaggcgcctcagggccatactgcacaacgcccgcaagacaggccttgaggcccaaaacagagacaagcatccccactttgcccacgcgttaagaggtcggattgaattcattaggagcacccacccgcagctggccgtgaaactgctcgctgaactaaaagctttgagatga

SEQ ID NO: 13917 - RNA, 1113 nt, synthetic construct
  source 1..1113: mol_type = other RNA
atggggttccttgactggctcgcaggcctgtttggtggaggacctaccgagagcggtggacgctcgtggggagtgtttgagccaccacctccacgcgagcggaggaaaaagctgcgagcaactgcgcaccatgatcctgatcgcctagccgcccaagacttaccatccctgagggactgcgcagaactggcaggcttcctcggaatttccccgaatacactccgttggctgacccacgttgacgaaggggatgagcccgagcattatgttgcctttgcggtgccgaagcgctcaggggactatcgggtattgtatgctccaaaagctaagctgaaacaggctcaacgccgggtctatgatgctatcctgagtcgagtaccccttcccgacgcagcacacggctttgtgcccaagcggtctatcctcaccaatgccgaaccccacgcagaacagtacgtcgtgatgaacgtggacctgcaggacttcttccctagtataacgtacagaagagtgagaggcattttccaggctttaggatacggcgaggaggccgctatccctctcgccttgctttgtaccgtgaaacccgctgggaagctactggaatatatggggcatgttaggcataggcagctgccacagggagcccccacttctcctgccctggctaacttggcctgccgtcgactggatgcacgcttgggtggacttgcccgcgcatttggggcgacctacactcgttacgcggacgatttaacattcagcggcgatgacgctttcagcgacgctctgggtcgttttgtgaggcacgctcggacaattatcgccgatgaagggttccgggttaatgccagaaaggtccatatcgccagaaaaggcaggcggcaacaggtgaccggcttggtggtcaacgatgctccgtccgtcccccgaagatacagacgggagctccgagccattctacacaatgcccgcacaactggcctggatgcacagaacagacacaaccacccagacttcgccaggcacctgaggggcaggatagcgtttgtaagaacaactcatcctggtcttgccgatcagctccaacggacgctcgactcactgctgtga

SEQ ID NO: 13918 - RNA, 1068 nt, synthetic construct
  source 1..1068: mol_type = other RNA
atgcagactatactgtggctcctcattctgctggcatttctcaaggtggtttccaacatcaagcagcgtatccgcatctttctgaatggagacttcaaccgactgcataaactcgggttgccccagatagaggatttctcacagctggccaactttctgaaaattagcgagacagaacttaactggctcatcgacaagtccagcgccaatccccaaacgggcatttcaagacactatgtgctaaaagagatcagtaagaagaacgggaaaaaaagacttctgcatatcccaaaggctaaactgaaagaagtacagtggataatcctcgataagatcctgaatttgctgtcgtatcacccagcagcgcatgctttttgtttccggaagtcaatcgtgactaacgcagaaaatcacctcggtaaggccattgtgattagggccgatctgaaggacttcttccatactattagaacacaccgcgtgcgcgccattttccggaggttgggctactcttacaaagtagcatacagtctggcgctcttatgcacatccaggttacccaacagccagaaaagagctttgccacaaggtgctcctacgtcccccgccatatctaacctgatcgcatttagccttgatcggagattgacaggactggcccttaagttaggcttcacctacacccgctatgctgacgatctgatcttcagcgggaaccgcaaaatcgtgaaagcccttctgaagaacctaaagaagatagtttccagtgagagatttatcttgaacaaagagaaactcctgatcgccagggctgaacgacggcaaaaggttaccggaattactgtcaatcaaaagctttctattcctaggaatgagaggaagaagatgcgagccattttacacaattccctgaagaccggccttgaaaaacagaacctgattcagcatcctaatttcaaagagcacctccggggcaaactgtcttttttcaagatggtcaatcctgaccaggctcgtccgttgatcgagtcatttaataagaccgtcaaaaaggaactagcgagctga

SEQ ID NO: 13919 - RNA, 984 nt, synthetic construct
  source 1..984: mol_type = other RNA
atggccgcctggctcgcaattacccccgcgaaactgaggtggcttgcctggcccagatcccatgctccccatggagtccgcaagaggtacttcggaccccctgatcctgttcaacactactatgaggcagtgagaatcaaaccggacggcaggaagaggtacctggggtgccccaagcgggagctcaaagaagttcagcgtaaaatacttcgtgggatcctcgaaaagctgccgcctccaccacgcgcacatgcctattgcagaggcaggtcgtccctaaccaatgctagagaacacgtgggccacgcagtggtggtccacttggacttgagccatttctttaattcaatcaacgttaggcgggttgtggggctcttcgcggctttagggtaccccaggcctgtggccgtgactttaggcctactgtgcacataccaagtccacccagaagtaggctgggagttctttaacagataccgcagagtagtacaccgagggttgccccagggtgctccgacaagcccagctctgagtaaccttatctgtcagcggcttgataggagactgtcaggtttagcccggcggtttcacgcccggtatacgagatacgccgacgatctgactttctccggtaaccgggacttcgctaagggactcgagaattttctcaagatggccagacgaattatcgccgaagagcggtttgtgttgagcgagcgcaagctgcgaatagcgcgcaaagggtctaggcagtgtgtcaccggtattgtggtgaacgatcagccaggggtcggacgtacacaacgaagacgcctgcgcgcaattctgcatcactgtggccggggacgccctgaagagcagaatcgaggcaaggaggaaaattttcgcggatatctgcaaggctgggtcagttatgttggaatggtgaacccagctcagggccagaaactgcagtctgcactggagagggtgcgttggccttga

SEQ ID NO: 13920 - RNA, 1203 nt, synthetic construct
  source 1..1203: mol_type = other RNA
atggtgaaatatagatcccccccttttttctacgaagggaacgtgggtttcttgaagtggttaaagaacgtacttttcggcgggggcgaggaagagaggttcaagagcttcgagaaggagatttacatcgagcgcgtgagctataggggggccggcaaaaaagaagtgtcgcgaccgagaagaaacgtacgtgcaagcgagaagattcctcccggaggggaccgtaagctgctaaacgagctgggtatccctattctcgccggtaatcccgacatagctaggcgactcggagtgtctaccggggagttgtgttggctggcattcccaaagcggtttgacaccgtggatcactatagggagttccatatcccaaagttaaatggcggtgaacggcggattctggctcccaagaagaagctgaaggccgcccagagatggatccttaagaatatcctgactgccgagcgcgtcagaggcctcgttcatgaaaacgtccacggtttcaggagagggaagtctgttgctacaaatgcccgtccacacgtgggggcagaagtggtggtgcatctcgacctgactgattttttcgaaaccattactctgccgcgtgtcagaggcatctttcggaagctgggatacagtcacgtggccgcaacaacccttgctatcctctgtacggtctacattggacgggtcgacgaaactaaaaccggctcccgcaaacaggtgttgcctcaaggagcacccacttcccccgcgattaccaacctggtgtgcaataaactggataggagactggctgggcttgccagaaggtacggagtcaaatatacacgatacgctgatgatatcacattttcaggcggaaaatctttttgcaatgcgctccgccggtttctccctaccgtacggcgcatcattagggaggagcgatttacgatcaacgaaaaaaaagtacacgttgcgaggaagggcgcccggcagtcagttacaggcatagttgtcaatcaacagatgaacattccccgcagcgaacgaagacggtacagggctatactgcatcagctacgcaaaatcccacctggcacagagaagccaaaaaaattaaacgcacacctgtccggagtggccgcttatttgtcaatgataaatccagaagccggtcgcaaaatgcatgaggaggtgaagagtgttttcaactga

SEQ ID NO: 13921 - RNA, 1044 nt, synthetic construct
  source 1..1044: mol_type = other RNA
atgggcctcatctcggacttttttaagaatctgtttgggagccctgtcgaaaataaaggaggtgaaaatgagccaacacagaaatccgcgggtaatgactccggaccatctgagctcaccagattagaaatgaataggcttcctcttatagccggacgggcggaattgcttcaagaacttcaaatcagcgataaggaactcgattggtttgtgaaacatcctgagtggcactacactgtagttagcattcccaagaaatcagggggagcacggaccatttacgcacctaaaaagaggatgaaaagaatccagcggtggatcctgagtgagattctgagcaaagcccgtgtcgagggatctgcccacggcttcgcaaagggcaggtctatcactactaatgctttcccacacacgggcacggagatcatagtcaacatagacctggagaacttcttcgactccgtgaagctctggagagtgtactgcgccttccggaactttgggtatagtggcgagctgtcttccattttcgcacgattgtgctgcgtgaaaggagctttaagacaaggcctgcccactagccccgccctgacaaacgttgtgtgtgctatgttagatcgtcgcctgaatgggctggctgtaaagttcggctgtacatatacccgatatgccgacgacatgaccttctcaggcgatttgaaattcaaggcttctctgtcccggtttatcccgatcctgaagaagatcattcgcggtgagaaatttaagattaacaggagcaagatgagaatcacccgaaaggggagtcagcagaaagtcaccggtctagtcgttaacgaaaaggtgaacatcccacgcgagaaaatgagactctggcgcgccattattcataattgtcgcataaaggggctcgagtcccagaaccgggataagcacaaacatttcgcagcgcacttgaaaggcctggtgtcatttgctgcccaggtggcccccgccaagtcagaaaggatgagggaggaactaagtcaggtgacaaagccgtga

SEQ ID NO: 13922 - RNA, 1047 nt, synthetic construct
  source 1..1047: mol_type = other RNA
atggggttctttgacttcctgaaggacctgtttaacccagtaaaaggaggtacaggtggccccaaaccagccggcaacagtccggctagagcactcgcaccccgcaagacatatgctagcccaggagggcctagacctctggcaccaggtctgccccagcttcctactcctgccagcctggccgctttgcttaggatcgcccctgaaaagctggcttggcttgcgaaagagaagggccgtcattacgctacatggaaaataccaaaagctaaggggcatcggaccattgaggcacccaagaagcagctcagagccgcacagagagcaattcacagagagattctctcaaaagtcgcccccaacgctgcagcccacggattctgcacaggacgctcgccgaggacgaatgcggaaccgcacgtgtttcgaaaactcgttgtgaagctggatctgcgcgatttcttctggcaagtcaaacggaatcgagtggctggacagttcagagcgctagggtttcctcccgatgttgccgcgatactgtggcggatttgttgccatcgaggaaggttaccccagggggcacccacttctcctgccttgacaaatatcgtgtgtaggcgtctggacgcacgtttgtctggccttgctaagaagtacaaagcccgctatactaggtacgccgatgacttgaccttctccttcgatgcccccaatctggccgtgcaggaaccactacgcgccatccggaccatcctttccgaggagggctttagtttagcacgggagaagactcggtttctccgccggatgtccaggcaaacggtgaccggcatcaccgtaaactccaagttaagcccaagccgggaggaagttcgatcactgagggccctgctccacgaggctagaaccaaaggccctaaggtggcgaaccgcaatcaggaggaagcctttggcgccagggtcaggggtcgaatcgaagcagtgcgcgctattgacaagtctaaaggggaaaagctcctggccgactatagaagagtcgcttggtga

SEQ ID NO: 13923 - RNA, 1023 nt, synthetic construct
  source 1..1023: mol_type = other RNA
atgggtctgttcgactttctgaaagatctattcaaccccgtcaaaggacctccacctggcaagggaggcccaccagtctctagaccagggtctggagggcgaccggttagacccttggctgcgggtttaccacccgctagagatacaggcgagctggccgcaatcttgagaaccacgcccgagaaagtggcttggctggttcgcgagacaggacggcattacgctacttggcaggttcccaaagctcacggtcgtcggactatcgaggcacccaaaaagcaacttcgaggcgtgcaacgcgctatacacagagagatcctctcccgggtttcaccggcagaagcggcacacggctttagaaaggggaggtcgcctcgcaccaatgccagtccccacgttgccaaggaaatggtcattaagctggacctgcgcgacttcttctggcaggtgacgcggaacagagtggccggactctttcggagcctcgggtaccctgaagatgtagccctcgttttatggcgcctgtgctgccacaaagggaggttaccccagggggcacctacctcccctgccattacaaatctcgtctgtaggcggcttgatgctagactcgctgcagccattcgtagcatgaacggcgactatacacgctacgccgacgacctgactttttctttccgagaagccagactgcctatgccccgacttgccaggtttctgagacgcatcatttccgacgagggctttcgggtggcacctgaaaagacccggttcctccgtcgaagtagtcgccaggccgtgaccggcctgactgtgaacgccaagctgagcccaccgaggagggaggtacgagccctgagggctctattgcatgaagccaggttgaggggtccagaggcggcgaatcgggatcatctgaagggattctcagccgtggtgagggggagaatcgaggcagtcagggccatagatcgcgctaaaggcgaaaagcttcttgcagagtatcgtcgggtgagctggtga

SEQ ID NO: 13924 - RNA, 1029 nt, synthetic construct
  source 1..1029: mol_type = other RNA
atgggcctgttcgacttcctgcgggacttgttcagacccgtgaaaagacctgcaccagatcctcctcctccagcgggtgccaaagccaaggggcctccaaataggggtgcttctccccctcccgcaggacttcccccaatcgaatcgctagccgtgttggctggacgcttaggtatccctcagaaggatctcgcttggctcatgaaaccccgagccaagcactatcacacacatgagatcccaaaagctgacggccgcgtgagaaaaatagagtccccgaagagtcggttgaaaaaggcccagcgttggattctgcgtgagatactagatagggttcctgctgcccccgcagcacatggctttgtgaaagggagaagccccgccactaacgctgcccctcatgctttcaaggccattgtggccaagctggacctgcgggatttcttttggcaggttaccctgcgtcgggctcgcggaatctttgaagccctcggttactcaggcgatgttgccaaggctctcgctcggctttcctgtcgcgacggcagacttccccaaggcgctccaactagcccggcactgaccaacctcgcatgccgaagactggataggcggctggaagctttggcgcgcgcctttggcgccagttacacacgatatgcagacgatattaccatctcacacaggacgggctgcgccccacttgacaggttgctggcgtggacgaagactattctgcgagaggaggggtttcacctcgcgccagagaagaccaggatcgtccggcgggggtctaggcagacagtaaccgggctcactgtgaatgcacgcgtaagcccgccaagaggaaccgtccgggcattaagggcgctgttacacgaagcaaagacaaaaggcgcggccgctgccaatagagacggactgccccacttcgcagcccatgtccgcggaagggtggaagccgtacgcgcagttgaccgagccaagggggagaaactgcttgctgcctggagatccgtcaactggtga

SEQ ID NO: 13925 - RNA, 1239 nt, synthetic construct
  source 1..1239: mol_type = other RNA
atgagtctaaagcgctggttcggaaggtggctggccacagccgaacaccggttagaacggcaaagggccgagaagagaagggcaggccctcctccttggcggtatccagacccgttcaccggagagttgataactcccccagatgatggcgacagggacaggcttgcagcagctggcctgccagtactgtctacacttgaggatctcagccgagcaacagggttgtcctggcagaggctattgtggctcgctgccccttctagtgcctacgcaggcggatcgccacactacacattcttcaccgttcccaaagctcgcggggaaccccgcattatcctggccccaaaaccagcactgaagtcagttcagcgttggattctgagaaacatcctgaaccgcataccccttgccgaccccgtccatggctttcggagaggccatggcacgcgcactaacgccagagtacattgcgggaaggacgtggtcgcgacttttgatctggaggacttcttccacacagtcacctaccgacgagtgaggggtctgtttcggagccttgggtattccacagaactgagtgtcctgttgggtttgctgaccacgtttagacctgccgcattcccctatgactatatgagacacgtgcccaccctggtttggctcaaatcaatgtcaaccgctcggcgtagctggagagggcacccaactacccccccatttctgccccaaggggcccctacgtctccagcactgtccaatctcgtcgctcggcacctcgatcgaagactcgctggacttgccaggcgcttaggggctgcgtacactagatacgcagatgacctgacttttagcggccatgcggagtttaggcacggcttggcccggttcttacctcttgtgaagcgcatcgtgcgcgaggaagggttctacctggccaccggtaaacagaggattcggcggaaaggcggacgacaggtggtgaccggagtggtggtaaatagacgtaccaacgtgccgcgagagacatatagacacctcagggtcctgctccataaggccgcggttcatggtcctgagagcgtgcgcttagaaccggctgcccctactgatcctggagtcctccggccacatctggagggctgggttgcctgggtgtcccacctaaatcccgcccgtggtgctcgcctcagaaggacatttgaggctatcgcatggcccgctccgtctggagaagcgtga

SEQ ID NO: 13926 - RNA, 969 nt, synthetic construct
  source 1..969: mol_type = other RNA
atgctggggatcacattacgcgaccttgcttggttagccagtgccgctcccctgtcaccaccacactacgtcctggctgtccggaagaagagaaatggcggcaagcggctcatcctcatgccaaagaagcgtattaaagctgttcagagagagatacacagacgcattctctctcgccacgcgccttctccctgggcacatggatttgccactggtaggtcaatcaggaccaacgcagccccacacgtcggaaaggaggtggtggcaaaatttgacctgcgcgaattcttccattccataacgttccctagagtacgaggtctgctacgtcagcttggctacgcacccgacgtcgctcgcaccattgccctgctgtgcacgttccatcctgggcgcatccgtgagaggatgaggcctggaggagtgagctacgctgatctcgccgcagcatttcgagccccggggagatatggtttcagacgaatcctaccacaaggcgctcccacttcccctgcactggccaatttggctgccagaggacttgatcgacggttagccgctttggcgaagaggttccgggcggattacacacggtatgccgacgatctcaccttttcgggtggcgcagaatttcaccgcgatctgccccggttcatccctctcctgaggagtatagtgagggacgaggggtattttctggcaagagagaaaactagagtaattcggcggggaaattgtcagagggtgaccgggcttgtggtgaacgagaaacccaacgttccaaggggcacctatcgggagctgaaggccatcctgcacaattgcgtgacaaaaggcccggaaagccagaaccgcgcgaaggtccgcgactttcgggctcatttggccggccgaattgccttcgtgaaatccgttcatctccgtcacgggatgcgattggaagaaacattcagcaggattagatggtga

SEQ ID NO: 13927 - RNA, 1209 nt, synthetic construct
  source 1..1209: mol_type = other RNA
atggatgacggttatcagtttaagaataagcgcgtattcctggaaaatctgcgcaggatcaaccaaagggctggagtcgagcccgagatcatcgatctaattgaagttcgattctggggaaatcggatagaaatcaacgacaaagaactgcaggggttcttgcacaagaaccctcatcttgaccagagggtcttaaattttctggccagttactttttggagatgaaaaggcgcggacttagatgcattttcactccctcccacctggcccatcttctggagattagcctgaagcggcttcactggctagccgatgataagagatcccactatacatgtttcagcgtgaaaaagcgaggtggcggcgtacgcgaagtcttcgcacccaaacccaatctaaaggccgtgcagcggcagattttggatgacctgttacaccgggtgcgtctgaatagccacgccgagggctttcgaaagcgtcggagtattctgaccaacgccaagagacatgtgggaaagaaagtggtcataaagatggacgttaaggacttttttccaagcatcacctttgagagagtgctcggaatgtttgtgtctctcgggtatccacgccaagtggcagtcctgctcacgcgcctcgtgactcataatggcaagctccctataggggctccaacatccccggcgatcagcaacattgtctcacgacgcctggaccgaaggttcagtcggctcggtgaaaaagctgggttcgactactctagatacgcagatgacatcactatatcatctaacaacaaaggcgttaacaggatgatacccttctttaaagaaatcctgagagaggaagggtttgaagctaatgaggcgaaaatgaggatcttaagaagcggcgggaggcagaagatcaccggcattgttgtgaataagaagcctaacctggataagcatgagattaggaaactccgggccgtgatctacaattgcagtcacaaggatcttagacaggaggcaaaacgctgggcagaaaacgagaaaggtttgacaaacccatcatcttatggcttgcgggagttccggtcctccctgaaaggaaaagttaatttcgtgagaatggtaaacccggagacaggcaagcgtctgattgaggctctcgactacaaggggtcgtcattctttcaaacccctcctaaagccgaagtcatctga

SEQ ID NO: 13928 - RNA, 1221 nt, synthetic construct
  source 1..1221: mol_type = other RNA
atggagcaaaaaatggatcatcgatacctctgcaacaacaaggagaagtttataaagaacctgaggctcttcaatcaacgcgtcgaggtcgaacctgagattgttgacctgatcgaggcttatgcccgattgagacttgaccagggcaaagaaattcggtactatggtaaccgcatttccagcaaaaacaaggaactgcaggaatttcttgacaagaataggcacttagatcataggattcttaatttcctggcgtcatatttcctcgagatgcaaaagagaagcttccgctgtgtatttacaagttctcacctggcacattttctcaagatcagtacaaaacggctcaactggcttgctaacgaccgtattaagcactacacctgttttaacatcaaaaagagagatgggaacaaaagagaaatcttcgctcccatgccctatctgaaaggcgtccagaggaagatcctggacgatctgttacagcgggttggcctgaattcgcacgccgagggattcaggaaaagacggtccattctaaccaacgcacggcgacatataggtaagaaggtggtgatcaaaatggacgtgaaagacttctttccatccatcacttttaaacggattttggggatgtttatcagcctgggataccctcggcaggtgtctctgctcttgaccaggctagtgacacacaacggcagattacccattggcgccccaacttcacctgccatcgccaatattgtctcaacccgcttggacaaaagattcagccgtctgggtgataagatgggatttgactatagccgctacgctgatgatataacagtatcttccgataaccgcggcatcaataagatgattccattcttcaaggagattatccgtgaagaggggtttgagatcaatgagacgaaaatgagggttcttagaaacgccgggaggcagaaaatcaccggcatagtcgtgaatgagaagccgaacatcgataagaaggaaatcaaaaaactgcgcgcagtgatatacaattgccaccacaaggacattaaacatgaagtgaaaaagtgggcgaagaaagagaagtccctgaataacccttcagactacactctcagtgaattcaagtctagcctcttgggaaagatcaatttcgtgaaaatggttaatcccaagataggaaatcgactactgaagcagctggggcagctgagtatttga

SEQ ID NO: 13929 - RNA, 1215 nt, synthetic construct
  source 1..1215: mol_type = other RNA
atgtatgatcgacgactgtgcgagaataaggacgtgtttatcaacaacctcagagctacaaatgaacgagcagaggtagaacctgatattgtggaccttgttgaagcctacgcccgcctgaggctggatcaagacaacgagctgcgcttttacgacaacaagatatggattaatgacaaggagttagagcagttccttgataaaaatcggtacgtggatcatcgggtattaaacttcctagcctcctactttcttgaaatgaagaagaggggcttaaagtgtattttgaactcgtctcacttggctcacatcctcagggtccctcggaagaaggttaattggttggcaaatgaccgagccgaccactatgtgtgctttcacactaaaaaaagagatgggagcaagcgtgaaatcttcgctccaaagccttatattaaaaaggtgcagaggcaaattctggatgagctgctgcatcgcgtccgcctaaatttcagagctgaggggttccggaagaaacgtagcgtagttacgaatgcgcggcggcatatctctaaggaggtggtcataaaaatggacgtgagggattttttcccatctattaacttcaagagggtgctgggaatgtttgtgtctctcggttacccgcggcagacctccctgttgctgactcgcctggttactcacaacggcaggctgcctatcggcgcacccacatcacccgcaatcagtaatatcatttgtaggagaatggataagcgcttttccaagctcgggagaaaaatggaattcgaatactcacgatatgccgacgatatcaccatctcctccaacaataaaaagatcaccgggatgatccccttctttaaagagatcatgggcgaagagggcttcgtggtgaacgaggccaaaatgcggatcctcagaagtggaagcagacagaagattaccggagtcgtggttaataagaaaagtaacatagccagagaagaaatcaaaaaactacgtgcggtcatatataattgcggtcataaggacattaagcaggagatgattaaatgggccaggaatgagaaaaagctggcaaacccctacggatatacactcagccagtttaagctctcattgcttggtcgcataggattcgtcaaaatggtcaacccagggattggcaacaaactgctccaacagtttgacacacttagcctgaacgcttga

SEQ ID NO: 13930 - RNA, 1248 nt, synthetic construct
  source 1..1248: mol_type = other RNA
aggcaaaaaatggcgggcggactgcactgcaaagacaaagagtctttcataaagcatctccgtatcataaaccagcgtgctggcgtggaaccagatatcatcgatctgatcgaagcttatgccggcctgcgccttaatcaggacgaggaagttagattctttgacaatgcagtgaatatcaagcacattaaggacaaagagattaaagagttcttcgacaagaaccggagacttgaccacaggatactaaacttcctggcctcttactttatagaaatgaagaagagaggtctgaagtgtatcctgaattccagccacctggtccacctcctcgagctctcgatcaacgagatcaattggcttgccaacgatgggaaaaaccactacagacattttacccgaaagaaaagggacggaggcacccgggatatttttactccccgcgctcgcttaaaagaggtacagcgacatattctggacgatttccttcatagggtcagactaaactcacatgcacaaggattccgtagaaagaggtccattattacaaatgcagcccggcacatcgacaagaatatcgtgattaaaatggacgcgaaagaattctttccctcaataacattccagcgcgtgtctgggatgttcgcgagtctgggttacccacggcaagtctctgtgttgcttaccaagttagtgacccacaggggaaggctcccgatcggagctccaacatcccctgcaatcagcaatatcgtttgccggcgcatggataaacgatttgccaggctgggggagaagatgggcttcgattacagtagatatgccgacgatttgacaattagctccaacaacaaaaagctgacgaagatgatccctttctttaaggaaattatgagagatgaagggtttgaggtgaaagaagctaagatgcggattctgcgaaacagtgggcgccagaaggttaccggtattgtggttaataagaagaggaatatcgagcgcaaagagataaaaaagttgcgcgccgtcatccataactgtaaacacaaagatatccgacaggaggccattacgtgggcaaagcgggagaaaaagctcgatgacccttatgcctatactctccgggagtttaagagctcactgctgggcaagattaatttcgtgaagagcgtcaaccccgaaatggggggcaagttatttcagcaggtaactgctttgcagtttcctgaacccagaaaaatgggttga

SEQ ID NO: 13931 - RNA, 1215 nt, synthetic construct
  source 1..1215: mol_type = other RNA
atgatcgacaaaaccctggcgggaaagaagcaagaatgcatcaagaacatacgctttatcaaccagcgggccgaagttgagccggagattctggatctgattgaggcttacgcaggtctgaggctggaggaagacaacgaagttctgttctatggcaataaaattacggggaaaaatcgagagttgaacgagtttatagacaagaatcggcacctggaccctcgtgctctcaattttttggcgtcttacttcttggagatgaagaaacgtgggctcaaatgcatcttctcatctagccacttaagccatttcctcaagatctccacaaagaagctgaactggctggcctccgacaaagaagaccactatataagtttcagcgagaaaaagcgaggcggagggataagacagattttcgcgcccaaatcaaccctcaagggcatccagcgccagatcctagattttttactacagtccgtgccactcaattcgcacgctgagggcttccgcaagaagaggagtattgtaacaaatgccaaacggcacattggtaagaaggtggtgatcaagatcgatgctaaaaacttcttcccatcgattacttttgagagggtcctgggaatgttcgtctcacttggataccctcggaaggtttccttaatgctcgcaaaactgacgacccatcaaggaagacttcccacaggtgcccctactagcccagccatctctaacttgatctcccggcggctcgataagaggcttgctggccttggtgaaaaaatgggctttgattacagcagatatgccgatgacatgactatcagtagcaacaacaaaaacgcctccaggatgattcccttctttaaagagattatcagagaagagggctttgagtctaacgaagcaaagctgagaattctccgcagtggaggccgccagaaaattaccggcatcgtggtaaatcaaaaagtcaacgtggatagaaaacagatcaagaaacttagggctactatctacaattgtcgacataaggacattaagcaggaaatgataaagtgggcaaagaaggagaagaatctgaagaatccctatgggtacacacttaaggaatttcgtgccagcttgctcgggaagataaattttgtgaaatctgtgaacgcaaaggccgggaaaaagctgctgaaacagctagacgaactgtcactgaaaacctga

SEQ ID NO: 13932 - RNA, 1209 nt, synthetic construct
  source 1..1209: mol_type = other RNA
atggacaagaagaagtcatgtggcaataagaaacagtacctgaagaaccttagactcattaaccaacgcgcaaatgtcgacccagagataattgacctgattgaggcctatgcgagactgaggctggattacgacaaagagatttgcttctactccaataaaacctcttctgacaagctggaattgaacaaaatgctcgcaaaaaaccggcatctggatccaaggtgtcttttttttctcaaggcctacttcattgcgatgaagaataagggcttgacatgcttaatcaactccgcacacctcgcccacctcctcaacgtatcaatcgaccatttaatatggttaagcaacgataagtcgaaccagtacacccgatttcacatcaaaaaaagcagcggtgctaaacgtgaaattctggctcccaagcctaagcttaagattgtgcagcgacaaattctggacaatatcctgcagaaaatccagcttaacagccacgcagagggcttcagaaaaaaaaggtctatcctaaccaatgccaaacgccacattggaaagaaagtggttattaagatggacgtgaagaacttcttcccctcaattacttttaaacgggttctgggactctttatcgctcttggatatccgcatcaggtgtctatgaccctgacgaaactgatgactcatgatgggaaattgccaacaggggcccctacttcccctgccataagcaatattctaagtacgaaactcgacaagcgcttcgctaatctgggcgagaaaacagattttgactactcaagatatgcagatgatatctccataagtagcaacaaccgtaatatcacccggatgatccccttcttcaaaaaaatcgtgcaggaggagggtttcgagataaatgaagccaagatgagaatacttaggaatggaggccggcagaagatcgctggtatcgtcgtgaatcagaagttgaacattgaaaagagggaaatcaaaaagatccgggcggtactgtttaattgccgcaacaaggatatcaatcaagaaatcaagaagtgggctcagaaggaaaaaggcctaaaggccagtctgttctatactatagatgagtttaagtcctccatgttggggaagattaactttatcaagatggtcaacccccagacagggcaaaatttgctggaccagctgaacgatctcaatgcctga

SEQ ID NO: 13933 - RNA, 1224 nt, synthetic construct
  source 1..1224: mol_type = other RNA
atggctctttgtaccaaacaggaaacctacctaaataacctaaagacgataaacactcaggctggggtagagccagatttggttgacataatcgtggcatatgctaggctgcggctcgagcgcaaccttgccattactttctatcaggagggtatcgagaagaaaaccacaaagtaccccagcctgaggactatcattgacaagaaccaagaagctgaccccagagcgttgaacttccttgccgcctattacctggagatggaccgacgcaatctgctgtgtatattcaaccgtcagcacctggccgtcacacttggcgtgagcatttctaacctggaaaagcaggcttctaccgcttcctcaaaatacagccactttttcgcaccgaagaagtcgggcggacagcgtgagatccttgctcctcacccggaattaaaagcccttcagaggaaaattttagacagtctcctggacaaggtaccactgaatgcgcatgcagaagggttcagaagaaagcgctccattgtcactaatgctcagaggcatccagacaaaaagattgtgataaagatcgacatcaaggacttttttccttcaacaaccgcaaaccgcgtgttcggaatgttcgccgccctggggtaccccaaaaatatcgcagccatcctcaccgacctgacaacgtaccagggtagactcgcgacaggagcccccacttctccagcaatcagcaatatactctgccgacggttggataaaagattcgctcggttgggacaagcgaacgattttagttacagtcgttatgcagatgatctgacaatctcttccaatcatcctaaagtgaccacaatgattccattttttaggcagatcgttagtgaggaaggttataccgttaatgagaagaagttgcggattatgagatccggctcacggcaacaggtcactggcatcgtagtcaatcagaaactgaatattcctaggcacgaaatccgcaaactgcgagcagtgattcacaactgcaagcaaaagagcctgaaagtggagatccataagtgggccaagctagagaaaaaccaccctaatcccaccctctatactgaagatgatttcgagaaaagcctctccgccaaaattcattttgtgaagatggtgaacccctcagccgggacgaagctgctcgtggattttaagtctctgggcttacggaccgtcgttgcctga

SEQ ID NO: 13934 - RNA, 1215 nt, synthetic construct
  source 1..1215: mol_type = other RNA
atggctctgtgtagggagaaagaacagtatctgaagaacctgagactagtcaatttgagagctgacgttgacccagagttagtagatcttctggtggcatatgccggaatgaggctggagaacaacagagatgtgaatttcttccaggacgatgttaaggagcgggcagggaagcacccttacttgctccggttcctccagaaaaacaaggaaactgacccccgcgcccttaattttctcgtgagttatttcctcgagttgaagacgagaggaatcccctgcgtgttcaatcgacaacacttagcagatacattgggcataagcttagtcgccatggacgaactcgcacaaaactcaccaaaatactacacccggtttagcgctgctaagaagaacggggctcagagggagatcctggcgccaaaagccgaattgaagacagtgcagcgtaagatccttgatttccttctcatcaaggtgcccctgaataaccatgccgagggctttcgaaagaacaggtccatagtaaccaatgcacagcgccacaccgacaagaaagtcctaattaagatggacattaaggatttcttcccgagtacaaaagctaaacgcgtcttcggcatgttctttagcctgggctatcccgaaggtgtggcctccaccttaaccaatctgactactttcaaagggagactggccacaggcgctcctacgtctcctgctatttcgaatgtgctgtgtaggcgcctggataaacggtttgcacgtctgggagagaagtgcgatttttcctacagtcgctacgccgacgatctgaccgtctcctccaataatactaatctggccgggctgctgcctctgtttaaagagattgtgctcgaggagggttatgaattgaacgaaaataagctacggatcatgcggtcagggtctagacagaaggtcacaggagtggtagttaacatcaagccaaacatagacaagaacgaaattcgcaaactccgtgccgttgtctataattgccgacataaagacatcaacaaggagatttacaagtgggcccaaatggaaaaatctcatcctgagccgtcacagtacactctggacacctttaagaggagcgtgagcgcgaaaatcaactttgtgaaaatggttaaccacaaagcaggcgaaaagcttctcgcggattttaaagccctttcttggcccggttga

SEQ ID NO: 13935 - RNA, 1317 nt, synthetic construct
  source 1..1317: mol_type = other RNA
atgcccaacctggcttctcatgtgccagtgcttagccaggttcgcgacaattcaataaaatgccctggcatcatcttcttccctaagaataaccttaagattatgacggagtgtaccgaacattccattttcctcagaaatctagtggaggtcaatcaaagggctggagtcgatagcgaggtcctggatctaatcgagtcctacgcaaggctgcgccttggccggaacagagaagtggacttttacaactgctcgaggcccgtctccgaaaaggatcaggatttaagagcgtttttggagaaaaacaagaacctggacgaaaggacgcggaacttccttgtcgcttactaccaggagctgaaagaccgccacctctgttgcatcttttcaagtgatcatctagcacacttactccagacctctcttcctcggctgcacgccttgacacgagactctcggaactaccacgtcttcaccatcaagaaaagttcaggggcagatcgcatcattcaggcaccacataagcagctgaagactgtgcaacggaagatcctgtccaccattttacacccagtgcctttgaataagtacgccgagggctttcgaaaaaaaagaagcatcctgactaacgccacacaccatgtgaacaaaaaggtgatcgtaaagctcgacattaaggatttcttcccctcaattgacagcaatagagtttttgggatgtatctgcatttgggatacccgaggcgagtagctcaactgctgaccgatttgtctaccgtccagaagaagctgcccaccggggcacctacaagtccaactattgccaatataatatcccgtcggctggacaaacggttcgttaggctcggaatgaaaacagacttcacttatagccgttatgctgacgatattaccataagcagtgacactgacaacatcctcaagatgataccgttttttaaggagatcattcacgacgagggctttactgtgaatgaagggaagatacgcatcctccgatctggttccaggcagagtgtaacaggtgtggtggttaatgaaaagccaaacatcaaacgccgcgaaatcaagaagctgagagccgtgttgcataatagcaaacggggatctctgcacaaacaagcggccatttgggccatgagagaaaaaggcctgaaaaattatcgttcctattcagtggtggatttctatcagagcctgcttgccaagatccacttcgtaagaatgattaatgagaaagccggtaacacgctcctcgctgatttttacaggatcccctggcccgttattacatga

SEQ ID NO: 13936 - RNA, 960 nt, synthetic construct
  source 1..960: mol_type = other RNA
atggaaatgaaaaacgctggactgacatgtttatttacttgtagccacctgagccatattctcgacgttccgctcaaaagattgcggttccttgcaagggataacggcagctattacaagttcagcatacccaaagcgaatgggacaaagagagtgattatggccccaaagcccgacctgaaggtcgtacagagaaagataaaccatttgatactgcagaaagtgaggctcaataaccgggccgagggctttcgcaagaagcgctccattgtgaccaattccctgcaccatttgcagaagaaggtggtcgtgaaaatggacattcgggattttttcccctcgatcgactttgagagggtattcggggtgttctgctcattaggctaccctcgcggagtgtcactgcttctaaccgatctgtctacttgccagagagttctgcctaccggagctccaacgtctcctgctattagtaacatcatttgtaggaagcttgacaagcggctcgtcctgctatgcgagaaaagtggtttcgaatattcccgatatgccgacgatatcacagtgtcaggcaattccgagcaagtcgttaaaatgattcctctttacaggcgaatcatcgtggatgagggcttcaaagtaaatgaggaaaagctgagaatcacacgctctgggcggcgtcaaaaagttaccgggatcatcgtcaataggaagatgaatatcgaccggagagaaatacgcaagctccgtgcagtcctgaataactgcaggcatggtagtatcgaagagcaggccgatatgtgggcatctcgagaaaagaagtgtactgctccatttaactaccccgtggagaaattcaaaaaaagcttgcacgcccgcatttcctttgttaagatggtgaacccacagatgggtcacagactcctggacgagttccacagcgtgttttcagccggatga

SEQ ID NO: 13937 - RNA, 1215 nt, synthetic construct
  source 1..1215: mol_type = other RNA
atggctcggtgggacgaggataaagaagcattcatccgcaatctcatccaggtgaatttaagagccggggtcgagcctgagctggtggatctgctggctgcctacgctcgcattcgtctgcaacagggagacaaagtcaccttctactcagaggacgccgacctgcctggctctaggaggaaagctgtgagggctttactggaagctaacagacaccttgacccccgtgccttaagctttctgagtacatacgcagaggccatggtccagcgaggtctgattcccattctgacccgaacgcaccttgcaaaactcctcgaggtgagtgagaatgaattatccgacctagccacttgtactgataggtattacgatgtttttagcatccctaaggctaacgggcagagaagaaagattcaagccccgcggcccccccttaaggaaattcagcagcgcatagccgctctgttggagagggtgaaattgcatccagacgcacatggcttccgcggagagagatcaatcctgactaacgcaaggctccacctcgacaggcaggtggtgatcaatttggacgtgaaggactttttcccgtctatcaccttcgagcgcgtacttgggtgccttggctctctcggatatccccatggcgtggccctgttgctgacccagctgaccacgtatcatgatgttattccaacaggtgcgcctacttccccaatactttccaacctgatctgtcgacggctggatctgcgtctcagccggctcggagatcagctgaacttcaggtattcgcggtacgcggatgacatgaccatttcttcagaggatggcggaattgtaaggcgattgccctttttcaaggagattatacgcgaagaagggttcgaagttcacgaggaaaagatcagagttatgcggaaggggtccagacagcaggtcacaggcgtaatcgttaacgaaaagccaaacctccctcgacaagagttgaagaaactacgggcggtgatacacaattgcctaactgccgacctcgaaacacagagaatccggtgggccctgacagaaaaaggtttgcaagatcctgacggttttgcaatggaggcctttcgtcggagcctttgcgggagggtcagtctggcgagaatggtcaatccaagagcaggcgtgcaactgctcgatatgctaaagcgcgtggagtggcgcatctga

SEQ ID NO: 13938 - RNA, 1176 nt, synthetic construct
  source 1..1176: mol_type = other RNA
atggagtgttcccatgaagagttcgtgtcgaacttggtggagattaatcaaagggccggaaccgctcctgaactgattgatctgctgggagcttatactcgcctgtgtctcaaacggagtaaggagattgaattctatagtgacagcttgactctgtctaccaataaagccgccattcgaaagttcatctcacagaaccggcacatcgaccctcgctcactttccttcctggtttcatatgccgaaatgatgctagacagaaacttaccatttatcttcaacatcgcacaccttgccaggtttcttgacctagataaggagaatcttttaaggctgatccagaacaaagagtcctactaccattctttttacattccaaaaagccacggcggtaagagacatatttgcgccccaaaagccgagttgaaagcgattcagaaaggaatcctgacagaaattctcgaaaaagtcttcgtacacccgtgcgcgaatggatttagaaggggcagatcgatagtgagtaatgcacaaaaccatgtcggccaggagatcatcattaagatggacatcaaggactttttcccctccataacatttgctcgggttaagggtgtctacctggatctcgggtaccccgaagggacagctgaggccctgacagaactcagcacctataagggccgactgcccatgggagcacctacctccccctatcttagcaacatagtgtccagtcgtatggacagaagattcgccgggctggcccagaaaatggattttcactactctcggtacgctgacgatctggctttcagctctaatgatcctacgtttaatcgctggataccattctttaggcacatcatcgaggacgaaggattcgaggtgaacgaaaagaaggtcgcaattgctcggaagggcgggcgtcagaagctcactggcgtggtggttaatagaaaaataaatacccagcgagacgagtataagaggctccgggcagtcatccataactgcttgaacggggatattcaagagcagatgaagcgatggggtgtatctgaattagatcgctttaaaaactcactgcgcgggcgtatcagcttcgtgaggatggtgaaccgcgagaagggcaataaattgctctctggctttgagcggatcagctggccggcatga

SEQ ID NO: 13939 - RNA, 1176 nt, synthetic construct
  source 1..1176: mol_type = other RNA
atgaagtgctccgatgagcaatttataagcaacttgatcgaactcaatgaaaaagctaaggtggctcccgatctgatcgatattattaccgcctacgcacggctgtgccaaaggtacggcaaagaggtcaaattttatgacaagaatcccgctatttctacaaacaagcctacaatcaaggactttatagacaaaaaccctcacctcgacaagcgaagcctgtcattcctggtgagttatgccgaaatgatgagaaagcgcggactgccattcatattcaatatcacccacctggcaaatttcctcgaggtagaggatgtcagactgaaacagttgatcaaatacaaggagaagtcttatcacaacttttatatccccaagagcaatggcggaaaacggttaatttctgcaccgactgaccatttgaagaccattcagagaaaaatcctcaaagacatcctagagcgggtttcacttcacccctccgcaaatggtttccggattggacgcagtgtaacaactaacgcggaaaaacatactggccaggaggtggtgatcaagatcgatattaaagatttcttcccgagtatcacgaaccagcgcattaaaggcatttacgttaaccttgggtatccagatggagtggccgaaaccctgacagggctgagcacttataagggtaggttgcctatgggggcaccaaccagtccttatcttgccaatatagtcgctacccgattagatcgccggttcgctaacctgtcgaagaagattgacttcgtctactcaagatacgccgacgaccttgccttctctagcaaggataagacatttgctcgctccatccccttttttaagaaaattatccaggatgaggggttcgaagtcaatgaggaaaaggtggttatagcccgtaaaggaggccagcagaaagttactggcgtggtggtgaatcgaaaggtgaacattgagcagaaagagtacaagaggctcagagcggttgtgcataactgtgtaaacggagacttaagggaggagatgaaaaaatggggggcctcctccctaaatgaatttaagtcaacgttcctgggtcacatcaactttgtgaagatgctgaataacgaaaagggttaccgtctcctggacggctttaggcaaatcagctggccagtctga

SEQ ID NO: 13940 - RNA, 1131 nt, synthetic construct
  source 1..1131: mol_type = other RNA
atggctaactgccccgacgaacgattcataagtaatcttatcgagctcaacaagagagctgatgtcgatccagaaattattgacctagtcgccgcatacgcacgcctctgtctgaaggatggcaaggagctgaacttttacaaggagtatctggccctctccaccaataaacctactatccagagattcattgagaaaaatgcctcacttgacaagcggagtttgtcatttcttgtctcttacgctgagatgatgaggaaaaagcggcttcccttcctgtttaatcgagcgcacttagcaatattcctgggcactaaagagggagagatcgaagccattatccaaaataaggaaagctactatcacactttcttcatccccaaaaggaacggggatgagcggcgtattacagcgcctaaggaccgcctgaaagagatccagaaaacgatcctgcggaagattctcgagaaagtgtccgtgcatttcgcagctcgcggtttcaagcggagaagtagcataatctccaacgcacacggacacattggccaggaaatcctagtgaagatggacatcaaagatttctttccaagcatcacctacgaaagggtcaagggcatatttatcaacttagggtaccccgaaggtgttgccgaggcactgaccgaactgaccacctacaaaggccggctgccaatgggagcctcgactagcccttatctgtctaatattattgctatccgcatggacaagcgctttacaggcttggcgaagaaaatggactttacatactctaggtatgccgacgatctagccttttcatctaaggatggaaacctcaagaggcatataccgttctttaaggagattattaaggacgaagggttcgaggttaacgaacagaaagtggtgatcgccaggaagggtgggcagcaaaaagtgaccggtgtagtggtaaatagaaaagtcaacgtggagaagagagaatataaaagactccgagctgtgatccataactgcaaaaaaggcaacttgaagacggaaatggctaagtggggggcctccaatcctggagagtatgagttgccacgtagcaaactgacaggatatcagaagaatgttaattgttgctga

SEQ ID NO: 13941 - RNA, 2643 nt, synthetic construct
  source 1..2643: mol_type = other RNA
atgaaaaaggagaagcaagctactcgaacactgtccaatcccattcaaaacgacgtgctaaaaaataggctccagagcatctttcggtcctttaggaaagccgaccggacagatattaaatccgtggaggacgctctggaccggctccaattcctggccttccctgagttctaccaggcctgtttgttcctactttgcatcgagtgcgaaagatgtgtagaggccaatgtgccaccgagcgtcattcgggccgaacgcattgtgcaggctgttgaagcgaaggccgccgcaggtatgcagggaaggctagcctattggattaaccagaagctgactaccagttatcccctcggattagtgcagcgcctcacggcctattcacataagattaacgagtcacgaaacacccagtgcattaccctcgtggatgcaggtagacatgaggaagccctcgccgtggctgaatctattgaggatacagaacaacagtccaaggcattgtgtgcgatcgccgccgactttgcaaggttgagccagaaggaaacagctgaccccctgttcaaaagggctctggacctgatcgaaattttctatgcctacacatttgaagatgcagatgaatcaggatatgggggcgactacgatgagtacctgcaggtgaagggtaaatgtacccggtatatggtgggaaagatggctgaaataggctggtttaaacgggcagaagagctaagcaataatatcgaggacgagtggctccgaagtgaggctttttgtaatatagcaaaagatctcgctgcaagcgggcatttatccgagtcctttgaggcggcagcaagatcaggaccccaccagtctatcgctctggggtgcatcgctgaaactattgctaaaagcggcaacttcttccaggccttgaacgttttctctaaagccaatgacttggcagcagagcagcaaggcctttggaaatcaaaatgcctgttatctgtcgctgctggcttggttattatcgggacgaaaaataaggctcgcaaagtggcggagcaggccagtgaagttatcatcgacagcatcaagttctacgaagacgacgtaaaccagccagcagatatgagaatacggttcgtcatggacctcatggaggtcgggggctttgaaactggtattaaggtccagatcgagcccatacatgaaacacttgatcttctagcacagtataagtcgtggttccgcgtcctggatcggatcttctcttcaggaagtattgacgccctgttgtttaagtgctacctgaacggctttgccagttccgccgtgtttggcaataatcgcgctctcatgatgaggctgattcgtgaggcatgtcacatggtgagtagcgacgagaaacctgaggtgtttcttgctctaagtaacgaactcgccctgctgggcatcaatgatatgcgcgatgatgctattgtgcgagctatcgtggcgggatccgatcacttgcgtatgcagcgggaagagtacatcaagaaccctacgccttcactccccgataatcaaccacacgctgaggagccgcttatacctgaggaatggccacaggaaaacacccggatatcgaacatcctcggtatctctgttgagatgctgcgcctggtgagactgaaagtgattcgcgctcaaggctacgacgcgtttaggatcccaaagcgaagaaagggctttagggtgatccacagccctcactctgatttagcgcacattcagcgtcgaatcaaagaatgcatccttgatccagcccctgggctgccaagctgtgtcacagctttcagaccaggagtatctataagggataacgccatggtacattgtgacaaagcggtggtggtaaaatttgacctcgaagacttcttccccagcatttctttcacccgcgtcatgggcatctttcactccctgggattccccacgaatgaggctaggatgttggctaatctgacaaccgtgcaccttgacgtgtccagttctggcccggttgtcaagtctgtatccaggagtgccgaggcattttatcagactaagcatctcgtcgacttgctgcatgagtaccccgtcaacatacgtttactggcataccgctggaactacgggaagatctctagagcactggccttaaggatgttaagaaagagaagacggaggggtcttccacaaggggcctcgacctcacctcagcttgccaacctggccgccgttaggttggatctccgccttcgtgcccttggggagtccatgggattcgcctatactcgatacgcagacgatctgactttttcaagcaatgaacggctcgccaaggtggatgcgctgacaagcctggtcgacgagattgttgtggactgcggattcagactgaatggccgtaaaaccaagataatgcgggccccggccaccagaagagttactgggctgattgtcaacaccacaacccctaaggtacccagatccatgctgaggaaggtgcgggcaatgctgcatcaacaggccggtggcaagctgagcgaggcggatatccaccgcttgcgcgggtatctgagcttcgttcgaatgatcgacaaggagcaggccgatctcctgctggactgctga

SEQ ID NO: 13942 - RNA, 1155 nt, synthetic construct
  source 1..1155: mol_type = other RNA
atgccagctaatcgagcccttgggctgcccgccatcgaacatcgtcgaggcaacactcccaagaggggcatcgcacccactactcagcaggagtccagatggcggagtgggtcctctattcggataaggtggacgggagatgctcgggttcgtagcggcgatggcttcgtcgagccactcgatttccgatcactggactctgcagacgatgtagccaggatgacgggccttgatatcgaagaaatccgtgcaatcgcttggagaacagaggctccgcgaggtggctggtacaggaggaccctgattccgaaacggcaggggggcttccggttgattagcacccccattcctagattggctgcggcacagaggcgcatcttagctgcgattggcccccatttccctgtgcacccagcagctactgccttcagactgggtatgtcagtgcgggtaaatgctgcctgtcacaccggccgccctatcgtcgtgcgcatagacctagcggacttcttcagtgcagttagatttggacagatccaccgcgccttcgaatgtgccggatgcacacacgaggccgcaagaattcttgcgtctctgacatccgacgtagctgccaccgttcgcccaaggggtcaccgtacccttgtggttgctggtcgcggtggattaccgcaaggcgcgtgtactagcccagtcctcgccaacgccatttgctgggatctggatgaagacgcccggaccttgggacggagactagggtttacctatacgcgctacgccgacgatctggtgtttagcgcaggcaatagtcgcgcaccagtggatacactcatccgggaaacacggagaataatccaggcctatgggtttcacgtgaacgaagccaagaccagggtcatgagggcaggcgggaggcaagtggtgactggactcgtcgtcaatgggtcagagcccagagtgcctaggcctgacttgagacgctttcgcgcctttctgcatcactgcgagacagaggggctggacgtgatgtccgagcgaataggaaaagacgctctcaactacgctcgaggatatctggcatgggttcacatggtgtcgcccgagcaggccgctagatttagggcccggcatccttggctgggtggacatgggtga

SEQ ID NO: 13943 - RNA, 933 nt, synthetic construct
  source 1..933: mol_type = other RNA
atgaacgctgcggaggattccctggacctccaggatatctcatcctttctaggattcgctccccagcatattttctatctggtagaggacccggataaattctacaccactatcagaataccaaagaacagtgatccactcacctatcgcacacttgatatcccctacagtgagctcaaaggagtccagagagttataaacaggaagattctgcagaagttgcccttaaatgactgtgccttttcatatgtttcaggcaaatcgatttacgcagctgcccacgagttttgcggtggcaaggccgtgctgaagatggacattgcagatttcttccctagcatcaccggccagagggtgttgggactgtttaagtctcttgggtttaaccagagtatctcttacattttgtcccaactctgcttgcgcaacaattgtattgcccagggcgctccaacttctcccgcagtgagcaatttaatcatgcgccggtttgaccgacagatggagaaactcgccgccagttgggaaatgtcttatctgagatattccgacgacgtcttcctgtacaagaacaagaacttcaatcaccctaagcttgctttttatgtcacaaggatcatagaacagaatgggttcgcagtgaatcagagcaaaacacgtttccaccctcgagggcaacctcgtattactctgggccttctaacacatggagataagccgtccataccaggtcccgccaggaggcaatatcgggcagccttccaccgggcgagcagagattttgaatgggcttaccataacgaagcccggctgaaagggattctggagtggtacaaatcagtgcatggtaaagacgacgcgtacaaccactactcctctatccacaagaatatcaataccctgaaaatccatacgagctaccgcagccaatga

SEQ ID NO: 13944 - RNA, 933 nt, synthetic construct
  source 1..933: mol_type = other RNA
atgaatgccgcagaagatagccttaatctaagagatatcagcagttttttgggattcgctccacaacacattttctacttagtggagaacccggacaaattctataccacgattcgcatcccgaaaaattccaagccacacagcttccggactctggacattccctatacagagctaaaaggagtgcagcgcgccatgaaccgtaagattctgcagaaacagcccctttcggaatgtgcttattcttacgtgagtggcaagtcaatcttctccgcggccagagagttctgcgggggtaaagcgatcttgaagatggacatccaagacttttttccaagcataactggtccccgagttgtgggcttgtataagtcactcggttttaccgattccgtggcttacattctgtcccagctgtctctccggaataacagcatagcacagggcgccccaacaagccctgcaatcagtaatctcattatgaggcgctttgatcgccatatggagaacctggccacctcttgggaaatggactacctgcggtactctgacgacatcttcttctataaggataggaactttaaccaccctaagctcgaggagcttgcaacccagatcatcgaacacagcgggttcacagttaatgtcgctaaaacgcgataccatcccaggggcgtaccccggattacattagggctcctgactcacggggaccgacctagaatccctggacctgctcgcaagcagtatagggccgctttttatagagcctctagggactttgagtgggcctacgccaacaagtcaagactgaaaggaatactggaatggtacaaatccatacatggcaaggatgatgtcttcaatcagtacagtgcaatttaccgtaacatcaataccctgaagattcatacttcatatcggtcccaatga

SEQ ID NO: 13945 - RNA, 975 nt, synthetic construct
  source 1..975: mol_type = other RNA
atgaggtttattgcgtggcatcgcgaacgggaggaggtgggaatgggtgccgccgatgattgccaggatctcgccagcatcgccgattatctcggctttgcacctcagcatatcttctatttggtcgaggatcccgaccggtgctacgtgtctatagaaatacctaaaaacagtgacccgaccaagctgcgcaagctcgatatccccatttctgaacttaagggcgttcagcgggccattaataaaaagatcttgtcagaattccccgtggatgaatgcgtacactcatatgtgccagccagatccattctgaccgccgctcgggaattctgtcctggtcgtgcagtgctgaaaatggacattgaggacttttttccgtctatcacatttgtacgagtccttgggttgttcaaggctctagatttttctgacagcgctagctttatcctagctcgcctcactaccttcgccgacagactggctcaaggcgcaccaacttcacctgctctgtcgaacctgatcatgcggggcattgatttcagactgaagagactggctgcaacgtgggaggttaaatacttacgctactccgacgacatcttcttccacaaggagaaaaatttcaaccacccaaaattgactgcgtacctcagtaaagtgatagaggacggtggatttacggccaacaacaaaaaaaccaagtaccaccccaaggggcttcctaggacaactctgggactccttacacacggggagaagcccaagattccaggaagccagaggaggatctaccgttccatgttctttaaggcaagtaggaatatccactgggcacatgagaatagagaaaagttacgagggataattgaatggtataaatgtgtctacggcagagacgacacctatacacaatatcgagccattctggacaatgaggccaggctgcgcatccatgatacctaccagtccaagtga

SEQ ID NO: 13946 - RNA, 933 nt, synthetic construct
  source 1..933: mol_type = other RNA
atggacgccgcagcactatgcctggatctcgaaaccctgagcggctttctcgggtttgcgcctcagcatatttactatttggttgagagcccagagtcatattacacaacgataagcatcccaaaaaaatcagaccctatgaaggtccggcagatcgacattcccttttctgaactcaagggggtgcagagagccatcaataagaagatactgtccgagcttccgatgtcggataacgtgcatagttatgtgcagggccgcagtatcttaaccgccacgaaattgctgtgtcctggtcgtgccattctgaaagtcgacatcgcagattttttccccacaattacctaccgtagggtattcggactgttccggcgccttggctataatgatgctgctgccttcatactgtcaaggctatgcactaaggacgataaactctcccagggagctcctacctccccggcaatctctaacgccataatggccggtcttgataagcgaatggagcgattggctgagacttgggagctgaagtacctccgatacagcgacgacatgtttttccacaaggaacggaatttcaaccatacacgcctggctgacgtcgcgtccagtgtggttgagtcctctggctttatcattaacagcagcaagactaaataccaccctaagggattgccccggatcacacttgggctgctgacccacggaccagaacccaggattcccggtccacaaaggaaaaagtatcgcgctgccttctttcgcgcctctagaaatattaattgggcatacgaaaggcaagcccagttaaaagggatgctcgaatggtataaatgtgtgcaaggccggagtgacgagtacatccagtatcaggcgattttcgagaacatcgaaagactgaagatccacgattcttacagatcaagatga

SEQ ID NO: 13947 - RNA, 921 nt, synthetic construct
  source 1..921: mol_type = other RNA
atgattgctgcacagattcaaaccctggaagatctgtcaggagccctgggattcgcgcctcagcatttgttttggcttgccgggaacagcgatgccctgtacaaggagttcgacattcccaagcgcacaggcggagtgaggcggatcagtacccccatagccgagttaaagggagttcagagaaccatactccagagggtgctccagctgcatgctgtgtccgatgccaattttgcctacgttaaaggcaagtctgccgtcgctgcagccagaaggcttgctggggagaaatccttgtttaaattagacatccgggagtttttccccaccatcacagctcgccgagtgttcggcctgtacagatcttttggtttccctaaccctactgcatacctgctcacttctttaaccacgtatcgcgggtccctttgtcaaggcactccaacctcaccgtatattgccaatctaatctgccgaggcatggatacacagctgagtggtctggccagttcctggggtctggaatatatccggtactctgacgacctcttcttttacagaaaccgtatcttcaattggagcaagtttgagggagtcgtcactcggatcgtggtacagaacggcttccacctaaatgccaacaagagccgcttctacagggcagggaaagatagactcactctgggcctggaaaccgggcaaaggcagattcggcttcccagggcaacaagacgcctccatcgtgcggcgtttcacaaggcctccatgtcacctcggtgggctgctgacaatctcccacaattgaacggcatgctgagctggcatcgagcagtgcacggaaaagatgacacagcgagcgcatatgggcgtgtattgcagatagctacatcgattaaacaccacgacccatattcaacgtga

SEQ ID NO: 13948 - RNA, 927 nt, synthetic construct
  source 1..927: mol_type = other RNA
atgacaactgcggccctctcactcgagttgcgggagctgtccagtgagttagggtttgccccacagcatgtattttaccttgttaagtgtgccgacgaactctacttcgacatcgaaattccaaagaggacacctggcgagtttcgaaaaatttcggtgccaagaacggaactcaagggcgtccagagggctattctgaggaagatattgtctagccacgagccatctgaatttgcccacagctacataaagggaaagagtgttatctcagccgctaagaagcttttgggagaaaaagccgtgcttaaagtcgacctgaaaaacttctttccggcaatctccgctcgtcgcgtattcggactgttcagagccttaggatttagcaacaaaaaggcgttcatcctgaccaaactcaccacttataaagggacactttgccaaggtgcccccaccagccccgcaatctctaacttggtgtgtagatccctcgacaagaacattaatgcactggctatctcctggaagctgaattatctacgctattgcgacgatatctacctgtaccatcggatcaatttcaattcagataagcttctgacgcgcctgcggcgaaccgtgaatgatcacgggttctcactgaacgaagataagacccggtattatgcagctggtaaccctagaattactctggggttatctacacatggccgtgtgctaaggctcccccgagctatgaggcgggagcatagagcggcctttcacaaggcctccactagtcctacatgggctgaggcaaatctgagcaaattgcgcggcatggccgagtggcacaaagcagtgtatggcagcgatgctacctacaaacactaccgcgaaattataaaaaacgtccctctgatgaaggttcatgagcccttcgcaatttga

SEQ ID NO: 13949 - RNA, 909 nt, synthetic construct
  source 1..909: mol_type = other RNA
atgattagttccgtcgacgacttcgctagccgaatcggcctgtctgaattctgtctcaagcgcctgattttaagatcggagtccttctacagtagcttctcactgccgggcaggtctggtagacgccataacatcagcagccccgcgacggaacttaagacagtgcagagatggatcctgaaaaacgtcctttcaaggttcgagttgcacgaagcatgcgttgagggacgcagtcgcagcaccccaaacgccgacagcttcgtgttaaaggcgtctctgaaatcgttcttcgcaactctcaaccgggcacgggtggaggggttgttccgttccctcctgtttcctgagtctgttgctgtgagccttgcccgcctcaccacgtttcttaatgcactgccccaaggtgcccctaccagtgtgtatatcgccaatctgatatgtagacgcctcgatcgccgagtgaatggactgtgtggagttaggaattggtcttaccgacgtgattgtggggatattgtcatttgcggccagggtagagtcactgacaaagtgttggagcagctgacacagatcgccagggaagaagggtttgacatagaaattcacaaacggaccagctgcaacggagctacagacggtgattccaagaccggcccagtgactggccgcgtatcctcacagggggctgatctgtcctttaggagattgcggaggactaagtctcaacggagaatcgtgggccggcctgcccgaaaacagtcaagagctcggtcctcatttgcatcacgtctacccgagctctgcggactagatagatcctttacagggagtgccaggcagaagagggtacgggccgagttaaggctgctgtttaattctgctgtcggcaatagtagcaacacccgatga

SEQ ID NO: 13950 - RNA, 972 nt, synthetic construct
  source 1..972: mol_type = other RNA
atgtccatcagattcggcattgctgagcgcttggtgctgctgcttgtcatcaagatgattgagacttcaagaagcataaagatggacaaccttcttgagacactggaaatctctgaactggagctcaagcgttacgcactccgtgccgagaagaactatcacgaactacataggctgaagaaatccggaaagacacgaagagtggttgccccaagcgcagaactgaagggcctccagcggaaaatttcaaggcgaatactccggcatcacgatctgcaggacagttgtacggggtataggccaggccactctattgtcaccaatgcccgcccccataccgggaaaaggtttgtactgaacatcgacttgaaagactttttccccagcatcagcttcaatagggtggtgggattataccagaacttgggtatggaccgcaatgctgctcggctgttggctagagcaaccacatataaaggtgcccttccgcagggcgctcctacttcccctgatattgccaacctggtgtgtaggacactcgataagagactggaagggttctgcaaaatccgccagtggtcttacactaggtactgtgatgatatcaccatctctggtgacacttgcacagatggggccatggataccctccggaccattatagagagcgaaggattccgcattaacgaagacaagacacggatgcgcatgagtcatcagagacagaccgtgacgggcgtcgttgacaatgagcggcctaacttagagatcagcgagcgaagaaagctgcgtactatatgccaccaacttagatggaatcccgagtcctttgaggggctcggaaagaagctgatgggctcattatcatttgcgaatatgatcggcggattgctacggaaaagtgagtttcaatccgcgtggaggctgctgaaaaaaaagcaccacgaagcccgacatgcatcgactacctga

SEQ ID NO: 13951 - RNA, 1101 nt, synthetic construct
  source 1..1101: mol_type = other RNA
atgtttaggcagccggacgtggtcggcaatttccagctcacgattaagctattagggcttggcagcaactctgtgatgcatgaaagcagcaacgctggaaacgaacggctagaaaggatactgccttcgggcgtgaaggagagctttccagtattctacttctgcgaatttgtgcaccgaagagaggctggagtgctcccagtcccctacatgtacgacatccagacagtcgcgcagctggcaaacgctctggattcctcagagttcgagctgctgaggttcatttaccgggctgaagagttttacacccgcttcagaaagaaaaaaagtactggcgatatgcgtactgtggccgcccctcgcaagcccttgaaggctgtccagaaggcaatcgttaagaagtttttggccgatattcccctccctgatgagtgtactggtttccggccaggaatgagcatcttgtccaatgcccagccccattgtaagaaacgtttcgtctttaataccgacttagaggatttcttcgggtctatctcctcagaaagggttctgggcctgtatttacgcctcggctttagctttcccgtagcctgtgtgctgaccgaactcacgacctatattgggtgcttgcctcaaggagccccctcatctccatatcttgcgaatctgattgcatacagtatggacgccgacttggctgacttttgcgccgcaaatgaatggtcctatacaagatattgcgacgacatcacaatatctgggaacgggaatttcagtctcgccgatatgagaactattagcgatatcgtggaggtggagggttttaggatgaacatcaaaaaaacccgattccacaagcacaactctaagcagatggtgagtggtctggttgtgaacgaaaaaccgtccctgccacgcgccaaaagacgaaaaatccgggcaatttttcatcaagctgaggttgagcctgaacggtacggaaatcgcgtgaaagagctggaaaaccacctttcaatactttctatgctggaccctcagtccaaggaggtcgagaagtataggacagtactcaatcggctgatctcgcaagcaaaatga

SEQ ID NO: 13952 - RNA, 918 nt, synthetic construct
  source 1..918: mol_type = other RNA
atgaccacgattcgtcgcatggacatcttcgaattggtcgaacagcttgagacttctgaacttcatctcaggcatctcgccacccggtcagagaggttttatagggagttcgtcgtggccaagaaaagcggcggagggcggaaaattgtagcaccctccgacgaccttaaagatatgcagaaaaagattgctgtcctgctcctgaataaggtggacttacacgaagcttgcactggctacagaaatggtaagtccattatcgataatgctcagcctcatgtgggtcagcactttgtgctgaatatggatcttaaagacttctttcccagcatatcttcaaacagagtcaccggactgttctataacctggggtgggaacggccagttgccatgctgctcgctcgcatcaccacatacaagggcagcttgcctcaaggggcaccgagttctcccgccattgctaacctgctatgccgtcgactggacacaagactctccaactttagtagagttagggggtggcagtatacaagatactgcgacgatctgacaataagcggccagggtactccagactcagatactgataccatatattccatcatcgagagcgagggatttacagtgaacttggacaaaacgaggacccgatttaagcaccagaggcaagttgttaccggaatcgtggtgaaccaggaggtacggattccccgcgaacagcgaagattactgcgggcaatctgtcaccaaatgtccatggagccagaaagtttccgcggcgtgtctaatcaggtcctgggccagttgtcattcgcccagatggtggagggacaaaatgcacctgagacataccgggagtcggcgcagtgtctcctggatgccaagaagctagcgcgccaagccggggctacttactga

SEQ ID NO: 13953 - RNA, 957 nt, synthetic construct
  source 1..957: mol_type = other RNA
atgctcatcgctagcagttgcaggcagagggaacccctgacggcttgcgacggccatccaaccttacgcgggggtgcaaggatgctgcagaccaccgatgacctggccgccctgttaggcgtcgaaacggccaccttggttaagttagcggatcctgccaggactcggtggcggcatcatactgttcctaagcgatcaggagggacccggcacctcttcgaaccccctcatgcccttcaggtcgtgcagcgtgctataggaagaaaaatcctggacagatacactccacacgatgcagcgaaggctttccggcgaggcgcatccgttgtggaccatgctcaccagcacgtgggacaggctttcgtctattctactgatctgcgcgacttcttcccgcagatcaatattaggagggtgcgtgggatgtttctgagccttccaggcctcgattgttccccaagcgtggccgagcttcttgccaggctgctctgttggcgtggatgtctaccgcaaggcgcccccacttcacctgcaatcgccaacctaattgcatatcgcttggacttgcgcctcacaaactactgtcagcggaggggttggacatatgggagatacgctgacgatataacaatttccggtagaggcagatttaccgcacgcgaccagcgatgggttgaagggtgcctggccgccgagggatttcctgtaaaccccgctaaaacagacctgcggcggcagcacgagcggcaaacagtgtgcggcctgctggtgaatgatcgcgtgagactgccacgccaaaccagaaagcagaaaagagccactgctcacgccctgacacaatctaccgaccccgagacgcgaaccgctcaagcacacgggaatctcggctggctcaaaatggtcggaaacgagcaggcgttggtgacacagtttcaggtcgcagtagataagagttga

SEQ ID NO: 13954 - RNA, 903 nt, synthetic construct
  source 1..903: mol_type = other RNA
atgccaagcctgtcgaagaccttgccaaccattgcgacactcttggacctggcggagttcttatctgtcagcgaatttgagctgaaatctttctgcttaagaccgaagaaattttacaacacattcgagaggcctaagcggagtggcaagggttgcaggaagatctgcgccccatccgaaaaactcaagtccgtacaaaagatcatcaaggagaagattctggactgtgtcgatgcccatgaatcttcgactggctacaaaagaggtgtgtcaatagtggaaaacgcccaggtgcacgtcggaaaaagggcattgctgaacctggatattgagaactttttctcctccattagtatgcccagagtgattgggctattcgctagcctggggtatactgaagacgttgcaatcatgttggggcggctctgttgctttgaacacgcacttcctcagggcgcacccacatctccctcactcgccaatctgatctgccacaaacttgatcggcgactgaaaggcctcgcctttaaaagtcacatgcagtacacaaggtattgtgacgatattaccctatcttccgacgaaaatatctcaggaaagttcgtggaggtggtgaaggagatcatcaaggatgagggctttagcgtaaatgaggataaaactcgcgttcttagccaacgcagctgtcaaattgttaccgggcttacggtcaatcagaaggtgaacctgccccgcgagaaaagacgtctcatacgagcttcattccatcgcgctagccagcaaacggctttaactgacgccgagcagaaaaggctggaaggactggccagtttcatgcagatgatagagcagcattgtcagaagcagcggagacgtgtctcccctaccgacatcaagtcttga

SEQ ID NO: 13955 - RNA, 1083 nt, synthetic construct
  source 1..1083: mol_type = other RNA
atgggaatactctcttggatgtttggtatcaagagcaagaagtacaattacagtaaagtggagaaggccttgggaccttggcaaccatatgcgggcagctctgtgattcacgggaccatgctgcctaagtcatttaccattccccccgctctaaagaagaagagagatgagcccgatctgactaccttttcctccgcattattcccatactggttaaggatcgacccgtcgctggcaggcttcgtcttgatgaaaatcaacagtggggaaatgtatagacaaaaggaaatccctagggagggaaaagctcctcggattatatccgttccggcccccgtactcaagttcatacagaaaagaattcttgcccgaatgctggaacagatcgagatccatccagctgcccatggatttgtaaaaggtaggacaatcttctccgctgccgagcctcacgtggggaaacgcattgttctcagcattgatctgcgggatttttttggcaccatctcctttaagcgtgttgcgggtatgttcaaggcatacgggatcgccaaaaaacaggccttcctccttgctggcctttgttgctgtcagaaaaaactcccccagggagcaccaacgtcacctgctatctctaacattgtctgcaggagactggacagccggctagccgggttgtgtaaaaagtatgacttctcatacactcgttatgctgatgacctgatattttctggagacgagagaatgctgcggttcttaaaggtgtttaaggagatcgtgcagaaagaaggcttcgcagtcgcagatgagaaaacattcatccgccgcagcggctctcgccagaaagtgttggggctgaacgtcaatagcaaggtgagtgtgccccgcaaggctaggcgactgattcgagcgatggtccatcggcaggcccaagaaggttcacccgacggcgaaatggttgactttctgcttggccacgcagccttcatgaagccagcccacccagagcagtccgctaagctgaaagaaacactggacaagacttggaaggcctacctcgtgagttgcattgccaataaatga

SEQ ID NO: 13956 - RNA, 1047 nt, synthetic construct
  source 1..1047: mol_type = other RNA
atgggactgctcaattggcttttcggaaagaagtcccataagtacaactacgggagagtggagaagatcctgggtccttggaaaacctattccggcaccctttgtatccctggtactaaactacctaagagttttactgtgcctcccagcctgaagaaaaataaggatgatgccgaacagacaacgttgagcgccgccctcttcccctattggctgagaatcgacccatcattggcaggcttcgtcttatccaaaatcaagtctgaggaaatgtacaagcagaaagagatcccacgtgaaggaaaagcgccgcgaatcatttctgttcccgcgccgattctgaaatttatccaaaagcggatccttgcacgaatgctggaacagattgaaatacaccccgcagctcacggctttgtgaagggccggaccatattcagcgccgcagagccacacgtgggaaaacggattgtactcagtattgacctcagggacttctttggcacaatttccttcaagcgggtcgccggaatgttcaaagcatatggcatagcgaaaaagcaggcttttctgctcgctgggttgtgctgttaccagaagaaactaccccagggggctccaacaagccctgctattagtaacatagtctgcaagcgcttagactcacgcctggccgggctgtgccgaaagcacaacatcaattatacaaggtacgcagacgatctggtgttttctggtgatgggagaatgttaaggttcctgaaggtgtttaaggaaatcgttcagaaggagggattcgccgtcgctgatgagaaaaccttcattcgcagaagcgggtctaggcaaaaagttctgggcctgaacgtgaatactaaagtatcagtgccaagaaaagctcgccgtataatcagggcaatggtccataaacaatcgcaggaaaagaagcccgacgatgagatgatcgcctttctcctgggccacgccgcctttatgaaaccagtgcatcctgagcaggctgccaagcttaagaacattttggagaatctctga

SEQ ID NO: 13957 - RNA, 1047 nt, synthetic construct
  source 1..1047: mol_type = other RNA
atgttcaagtaccttaaaaacatcctgggggtcaaatcacgcaagaagtacaacttcttcagaataaatcggattttgggagattggcaaccctattcgggtagcaaatgtataaaagacacaaaactgcccaagtacctcgacctaccaaaggatgtagaaaaatggggcgactacagcggacaggtgcccctgtctacagtgatctttccatactggcttcgcctctcaagcgagattgctggattcttggtgaagcaagtgaattcaggtaagctctataatgacatcgagattcctcgagaaggaaaagaccctagaaagatttccagcccccatcccctgttaaaattttttcagcgcagaatcctgactaggctgctggagcagatggaggttcatccagccgcacacggctttataaagaaccgtagtatcttcaccgccctcgaaaaacatacagggaaaagagttgtgatctcactcgacatccgggatttctttgatacaatcacgttcaaaagggtctgcggattatttaagggctatggcattaaggaagataaggcccttctactggccggtctatgttgcaggaatggtaggctgcctcagggagctccgacttccccgatgatctctaacttgatatgcaagaagatggactctagacttactggcctggcagaaaaaaacggattcagttatacccggtatgctgatgacctgatttttagtgggggggaaaacatcctcaagttcctcccaataatcaagcagatcatcaaggaggagggctttacccctgcggaggagaagaccaaaattcgacggtccggcagcaggcagcaagtccttgggttgaatgttaatagtaaagtgtccgtgcctaaaaaggtcaggcggctgattcgagctatggtacaccgccaggccttaagcgagggccgcaaccacgaaatgctgtctttcctgtacgggcacattgcctttatgtccaataagcacccagagcaggcagaaaaattgaagcgtcagctgatttga

SEQ ID NO: 13958 - RNA, 1053 nt, synthetic construct
  source 1..1053: mol_type = other RNA
atgcttaacctgctaaggaagttgttccacctgcccccggctaggcgtcgatttccctcccaggccattgaggacgtgctcgggccgtgggaaccttatgctggcgatgacgtgctgcccagaagtcgcttacctgcacgccttgaacttccacccgcggtcgccgaatggggagatgttccaggcgcacgtcgcttggaccgggttttatttcggtgttggctgaggctcgaccccacgctcgtgggattcctactctcacaaatccagcagggggagctgtatacagtgcacgaaatcgatcgcccaggcaaagccccgcgaaggattgccgagccagatagagtccttaaattcgtgcagagacgcattctggagcgcgtgctggaacagatggaaattcatccagccgctcatggcttcgtaaaaggccgctctattttcactaacgcagagcaacatacccagaaggctatagtcatcgcattggacgctagggattttttccctacgatcaccttcaagcgggtcaatggcatgttcatcaaatctggctttgcagccgacactgcagggaaactggccgggctctgttgcttccgtggaaggctgcctcaaggcgctcctacctccccaatgatcagcaatcttatctgccggcggctcgatggaaggctcagtggacttctaactaagtttggcgggacatacacccgatacggggacgatatgacttttagcggtcccgaacagatactgtcgctgctgcctctgtgtcggcgcatactcgcggaggagggtttcgagttggcgcctgagaaggtgagaatttgcagaaggggtagccggcagaccgtgacaggtttggtcgttaacgataaggtatccgtgcccagacgggttagaagatacatccgggctatggtacacgcccagtcaagatctgaccaccccgatgaagacatggtgcgatttctgaggggacacttaagctttatgcgaccagcccatcctgaccaagccgagcgtctgctgcagcagctgaatacatga

SEQ ID NO: 13959 - RNA, 1086 nt, synthetic construct
  source 1..1086: mol_type = other RNA
atggattttgtggcttatttgataatggacttgatccgacttctgacaaacaggaaagagaaaccatacgacaggaaaagggtggacaaaaccctcggaccgtggagcgcgtttaagggaccctctgccgaatgtatccctggcacccggctgcctcgcaagattgtctggcatagacccaggctactgttcgggaggaaacgcgaggaaattgatttcgcaataggcgtcatgacacattggttacgcttggagcccaagttgatgcgcttcattgcatacttcctgcgggatactgaaaagtacaaagtgcgggagataccaaggcccggaagagaaccgcgccggattgaagaaccgatggccctgctgaaatttgttcagagacgtatcttgcgaaggatcctagagcagaccgacctgcccgattgtgtgcacgggttcgtacggggccggtcaattggaacagctgccgcccctcacgcgcataaggaggttgtcgtgtgctgcgacattgagaacttcttcccaacaatcactgtgaggcgagtttggggcgtctttcggtccttgatcgtgaatcctcgcgtcagcaacctcctcgcagctctgaccacttatcaagggagactccctcagggagctccaacgagtcccatgatcgcgaatctggtgctcaggcgcctggatagacgactcgccgcccttaccagatcacgtggtatcgagtatactagatacgctgacgacatgattttttccgggggccccgacacccctaagatccttaaggcagtgcgggcctttgtcgcagaggaaggcttcacgcttaacgaaaagaagactagaatcctccggagaggtcgtcgccaggaggtgtgtggactggtggtaaatgagagagtaggcataccacggctctggaggaggcgattacgggccgaggttcaccgacttgccacaggtcgcgatggggcaaaggccgctcctgctcgtttaagaggggaactggccttcctgcaatgctttcacccagaagaggcaggcaagcacgcccgcaaactgctggctctgctaaaacagtga

SEQ ID NO: 13960 - RNA, 1077 nt, synthetic construct
  source 1..1077: mol_type = other RNA
atgggattgctggactttctgagaaatctgcttagccctcagagaggctcagacgagtcaccagcgctcaaccactccgacacaagacccaagaccgccgacgcctctccaagtcaggctgaagcccctgctacccccgcagtacgtatccgtagacggaggccactcctccccagacagttgggttcgccccctacgtttcgccgcctgatggcagctcttcgcttaagtcatgtgcgcgtgagacgggtcatgcacagtaaagcgccatatcatacctttaccatcgccaagcacaatgggagcctgcgtgatattgctgcgccctgtcgatctcttaggcacatccagaggcgcatactaagacggatcgtagagcctctggatacccacttggccgtccacgggtttaggcgtggtcgctgctccttaactggggcacggcgacatgtcggcaaggaagccgtcctggcgatggacctgcaggactttttcccatccattactagccagcgggtgtacgggttgttccgtaagttaggctggcctccgaacctagcctctgttctgaccagactctccacgtggcagggccgactccctcaaggagctccaacaagcccagccttggcaaacctgatcgctcgccggatggacaggagacttgccggtctagctcgccacaggggcatttattatactagatacgccgatgacctcactttcagcggacctgctgacgcagtgcgatccgccataccggccatacggatgatcgtgaaagaggaaggcttccggcccgccgaacataaaacccggctcatgagatgcggaaggcgccaggtcgtgacaggactggtggttaatcggcaggtgtctgttcccagagattaccgacgcagggttagggctgcactgcacgggatccgaactggcaggaccacgttcgcaacacccgctgatcgggccacaactcttcgggagctggaggggcatgtgcaatacattaggtcaattaggccggagcatggagatcctctggcagctgatctgtatgcagccgaaacaggccaatga

SEQ ID NO: 13961 - RNA, 1044 nt, synthetic construct
  source 1..1044: mol_type = other RNA
atgggcttcctcgacttccttagagacttattttcgccaaaatcatctcctggcgagcaccctagttctgctcggccaggagaacgtacccgacataagaagggagttcgcagtgcccccctactcccggagtcattaggggctaggcctacttttcactgcctggtcgggacacttggactgaaccatgttcgggttaggcgcgtcatgcactccccacacgcctatcacactttcactattgctaagcgggggggcaaactgagggaaatagccgccccctgtcgctccctcaagcacattcagcgcaggatattgcaccgtatcgtggaaccccttgacaggcacgctgccgtgcatggattcaggcgtagacggtgctccctgacaggggctcgaaggcatgtgggcaaagaggccgtgctcgccatggatctccaggatttttttcccagcattacgtctcagagggtgtacggcctgtttcgaaagctgggttggcctcaaaatctggcatctgctctgacaagactgactacctggcaaggcaggttgccccaaggagcccctacatcccccgcactggccaacttgatcgcacgacggatggatagacgcttggctggcctgggacgacatcggggtatctactacacccgctatgctgacgatctggccttcagcggtccagcggaggttgtccgtagcgccattccgagtattcgcacaatcatccaggaggagggtttccgcctggcggagcataaaactagattgatgagacggggacggcggcaggtagtaaccgggttagtggtgaacgagcaggtgtcagtgccacgggactaccggaggcgagtcagagcagcactccacaatctgcgcaccggcagaaccacgtttgctgcagtcgcggaaagggctgccgcacttagagaacttgagggccacgtgcagtatatcagaagcatccgcagcgaacatgccaagcatctagaagcagacctgtatgccgccgcggatgggatacagagatgtctctga

SEQ ID NO: 13962 - RNA, 1113 nt, synthetic construct
  source 1..1113: mol_type = other RNA
atggggtttctggactggtttctgcggaagatcatcaagcccaaagtcctggatggatgggccagagcacgaaggaggggacagatcaatgcactccgtaagaagcgtgaacgagcgagagcaatttgcatgttgccccaggacggacggcttccaacgaggaaggcccgcaaccccatgaccgggaggaccatcgaggttgaatacgacgacggcctgaaaggcatagctaaagccttgggtctgaaaccgtctcgggttgctaagctgagcttcagtccaaagaagttatacactactttcacccgccctaaacccgcaggaggcgaacggacaatccatgctcccgtccgatcattgaagtatgtgcagcgaagaatcttagacagaattctcaattgggtcgatttgccagactgtgtgcacggttttagacgctacaggtcgctcgccactggtgctgctgaacatgtggggaaagagatggtgttgaggatggatatcgaggattttttcccttcaattcacttcggccgagttctcgggctattccgtagcctgcagttcagtacaaaacatgcctttattcttgcgcgcctcactaccgcggatggggtcttacctcagggcgcacccacatctcctgcaattgcaaatgccgtttgccgccgactagatagacgcctcatgggggctgctcagaagcaggggataagctatacccggtatgccgacgacatgaccttctctggcccagctgaagaggtgaagaggctggtcccgtttgtgaggaaagtcgttggtgaggagggcttcacagtagccgacaagaaagtgcgccttatgagacgggggcgcagacagattgtgacaggagtggtggtgaacgataagctgtccgtacctcgttattacagacggtggctgcgggccaccatccaccatctgagaactaggggagccacgccagatggactgacagctgcgcaacttcggagctccctgctgtcccacgcccactacataaagatggtgaacgccgaccagggcaatcgcctactcgccgatcttcgggaggtactgggccaacaaggtggcaaaggaaacaggtga

SEQ ID NO: 13963 - RNA, 909 nt, synthetic construct
  source 1..909: mol_type = other RNA
atggggattctagactggttggcgagattgctgcgcggtggcggtgaaagtccttttgccgccggaaggaagggcccgaggttaggtctgaaactcaacaggctgtggcatctggcccgcaacgtggagggccactactccgagtttgatctagaaatgcccggcgggcgtaaacggcgaattgaggctcccgatgggaagcttcgctgggtacagagaaagatcctgcgaaatgtgctggatcggcaggagcaggggccttgctgccatggtttcagaaagaagcatagcatcgcaacaaacgcagccggacacgtggggaaggagatggtgttggctgtggatatagaggactttttcccttctatcacattccccagggtatacggactgttcaagtcaatgggctttgacaggggaagaagcgctctgcttgcaaagctgacaactcgtaacggcacacttccacaaggggcccctacctccccagccatcgctaatctgctgtgtcggcgcctggacagaagattaggaggcctcgcggctaaagccagaatgacgtacaccaggtatgcagacgacttaaccttcagtggcagcgccgatgccgccaagtatcttcggttgatagtcgaaatcgtgaaagaagaaggctttgcactcaatccagccaaaactcgaatgatgcggcggaaccgcaggcaagaggttaccggactggttgtcaatgataaagtgggcctcccccgcgagtggaaaagaaatctcagggctgctctccaccacctccgtactggtcgaccagcgtcagacggaccggaaaaaattcatgggaagctggcattcctaaagatggttcaccccgaacagtatgtccgggagcttgctgcactgaaagccttgtcttga

SEQ ID NO: 13964 - RNA, 1485 nt, synthetic construct
  source 1..1485: mol_type = other RNA
atgagcgacctggagcagctgctcgtaggcctggacgctgaaagcgccagcggacgaatgcacgccattcagagaagcactgcttatgacaagcccacacgatctgcctttctgttaaaggccttagaacactgggacagaaaggtccgggagaaatctgccaaaatcttgctcaagatcggcggggacttagagctggccgcagtgtgtagcgcagtggactccagaaaagtgcctctcctgcgccttattccatggctggcacgccggaatcatgccctgactactaggacaatctataacctgacacaacattcacacaaggtgatctccgaggctgcatccaaatacttgattaaaatggatacgaccgaggctctgttttatagatggagtaagcagagtaggattccaaaaaaactcgctgcccagatcgaagcgtgtgcgtgtgaacgggtcgcttccgtcttgtctgacattcccgtgtccgtgatccatacgcttcgcgggaagtttcttaggtatccactcctgaagaaatactaccacgacaagtattcggatagccggccccaatcatcaaaagaaaccgtcagtccgaaggctcctaaagttcagagtgaatacgtgcaaagctggaataagctcggcattgactggaggattgcagggtggattgtgcggaactggtcagatttggatgatgtgggctacttcgagttcaagatccctaaaaaaaacggtaccgagcggatcatcagcgcaccagtgactcccctaaagattgcccagcgtgttgtcctggacaaaatactgtctaccgtcccacaacacgatgcttgccatggcttccgcaagaatttctcgatcattacaaatgctacaaagcacacggggaaggatgtcgttattcgcatcgatctaaaggatttttttcctagcatcaaacccgccaggatcgctggaattttccgatccctgggattttcagacttcgagataaggttcctcacccgcgttaccacccgaggtggtggattacctcagggcgccccctctagtccttgccttgccaatatcgtagcgaggaggcttgatagtcgcctgaatggtctagcggcctccgtggggggaacttacactagatacgcagatgacttgataatttcaggccacaaaaacgtggtgtctatcctgccggccgttaaatccataatacaggaagaagacttcgggatcgccagtgagaagctgagaatagcaagaaagggagctcagcagaaggtaaccggactcatcgttaaccagtgcgtaaacgccccaagagagttgcggcgtaagctgcgggcggtgtttcataagcagtccaaaggcgaggtgccctactggggcaacaagccgatgagcgagtcacaaatgcgtgggtatcaggcattcctctcttctatcgagaagtccaagacagaccagcacgaaaaactttga

SEQ ID NO: 13965 - RNA, 1356 nt, synthetic construct
  source 1..1356: mol_type = other RNA
atgacaaagaaagccaataacaacgcctcagatatgttcggagctgtcgccgagaaaaggtattctgccgtgaaacgggtttctaagttacccgtcgaagaggcgttgcccatacttaaaaagggtctgaaacactgggaccggaagcttaggaacatgtgtagccgcgagatcgtgaggaagttgggagggaaagcggcttcaatcgtgttgccgctatatgttaaaggcctgcttagtcgatcgtcaagttacgaacagctcctccgaaaggaagacgctacgctgaccgggtacgtgctcagaagatcccgccgaaaagattctcttggccaagtctgcaaaggtctgtactctcagactaagcactataagaggattcaggaaaaacagactaagcgtgatcaggagttactggcagacaacgaccgggcgggccaaacctgggttgctcaaaagatttcaccctgggatctgctgaaggagagattcagcatccttaaggaactcaaagagaacacagcccagttcgtgttaggacactggtatcgaaataataccttcgatgatctctacgacacttttgaaattccaaagagatccggcggcaagcgcaagattgaggcccccaaacccgctttgaagctggcacagaaggccatccttgagaaactgacaagtgacgtgcgtttgcacgacagctgtcacggatttcggagggcacacagcatcgtgtctaatgcaaagccacatgtcggcaaagccgtcgtagtcaacctcgacatcaaggactttttccctaccatatccgcagccagagtatttgggatatacagaagcttcggttacaaaaatgaggaagcttcctttctgactgcattgtcctcgtttaatggacgactgccacagggagcgccaacaagccctatgctagctaatatcgcctgcattaggctagattaccgcctgtccggactctccaacacaatcggcgccgactattctcggtatgccgatgacctgaccattagcgggcctgagtctattaccaaatacattgctctcatcaggaagattgtggaggaggaagggttcgctctggcactccctaagctgcgcatccatagaagaggcgcccgccaagaggtgaccggtctgacagtgaacgatcgggtttccgtgccccgggttatccgcaggcgtatacgggcagctctgcatcatgtgaaccagggcaaagaggccacttggaagggcgaaccgatgagtctcgaatcactgacggggcatatcaactttattaagagtgtacaccctgatctggggcaggccctgttcaatagcttaccacagtga

SEQ ID NO: 13966 - RNA, 1023 nt, synthetic construct
  source 1..1023: mol_type = other RNA
atggacaagcgctccagcgctgccgaccggaaaggcaacgatttcgtggagcccaacggggacctggtaaagagcgccgggaatggatggctgtttgacttatctagggaactcgatatcagttgtcgagatttgggttggttacacggaacgtggggtacttggaaccagtggtataagacctatacagtaccgaagaaaaccgagggttttagggtgatttgcgcccctcagggattgctgcttgctgtccagagaaagatcaacgatgtcattctcaaagaagtcgtgctatctagctgttgccacgggttcgtcaaggaaagaagtatcatcactaatgctgcagctcatgttcagaaggaagtgctcctgagtctcgacatcaaggactttttctctacaatcactgcaaaccgggtcttcggcgtatttaaaagccttggccgctcccctgaggaggcacgttttctcactagactgtgtacctataatgggtgcctcccacagggtgcgccttcatcccctgccattgcaaaccgggcttgtaatcatatggacaaacggcttgccaagttggccgaatatcaccgcgccgcttattcccgatacgctgatgatctgacattttctggcgataagccagtgctaaggctgctgccattaataaaggccatagtggcggaagagggcttcgccattgccgagcacaaaacccgcgtggcaaaacaaaatcagcgacaagtggttaccggactgaccgtgaattccgagattaaagtgaggcggccagagaaacgcagaataagggcgatcctccatcatgctgcctgcagacgtagcacaacgtcacaccaagttcccattggagttcaggaaatcaggggctactacagcttcctgaaaaatgtggaaccggagtacgcagcaaagctgtacctggacttgcacgagaagtacctgatgctggaccttgcccccgagacaaaccccttctggcttagtcagcggtcatcgagatga

SEQ ID NO: 13967 - RNA, 975 nt, synthetic construct
  source 1..975: mol_type = other RNA
atgatcgagattttggaatatattctggcccctatcggagggctcatcgtcctggtggtgatagccatatccatctttaggtttactcgggccacaaacggtcacttctggcattggctcagggccatgctcggctggggcaaagatatccgagaagtcgcggctcgcttgggtatgacagaacaggaacttcggaatgtgagtccgtcctttcgcgaggtgttcgtgcccaagaagcggggaggacagcgacgtttgctggtgccagatgccgatcttaaaagcttacagaggaggatcttgcatagactcttaaagaagctgagagcacaccctgctgcacatggctttgagaggggcagaagcatcgttaccaacgccctgccacacaaagggcagagggtcgttataaagatcgacctggtggactttttcactggaacaaaggccaaccgaattgaacagtattttaggcgaattgggtggaatgccgacgtagctgctctactgaccagactgtgcaccgcagaggggagtctcccccaaggtgctcccacaagccctcgtctctccaatctggtaaacttcaatatggactcacgcattgcaagggtcgtgcagcaacgtaacgggcagtacaccaggtatgcggatgacataactatctctttccctgaggattacccctcacggattcgaggcgtaattcagcgcgttaagagaattgtgaaacagttcggctaccgtatccacgtgcgcaagaaactacagattctgagatctcaccagcagcagagagtgacggggctggtcgttaatcggaaagtccagcttccacggaaggttcgccgctggcttcgcgctgtgcaacatcggttaaagacccggggctcttcgactctgacggcaaaacaactggccggctggagaggaatgcagatcatgatcgagcagcaacggcaaagaaccggatga

SEQ ID NO: 13968 - RNA, 975 nt, synthetic construct
  source 1..975: mol_type = other RNA
atgatcgagctgttcgagtacatcgccgcctccgctggggcacttgtgattctcttgactgtcgcagttactgcactgcggttcaattacgccatcaacggtcggtattggcactggctgcgcgccctatttggctggggaaaggacatacgcgaactggcgggccggctaggaatgacagaacaggagctgcgcaatacaactccctcgtttcgcgaggttttcattcctaaaaagcgaggcgggcaaagaaggctcctggtgccagatgcgggattgaagacgttgcagcggagaatccttcaccgcgtcttaaagaagctgcgtgctcatcctgcagcacatgggttcgaaagggggcgttctatagtgactaatgcgctgccccataggggacagcgggttgtcatcaagattgatgtcgtgaactactttaccagtaccaccgctaaaagaatcgaagattactttcggaggattggttggaacgctgacgtggccgccctgctgacaagaatttgtacggcagaaggaggcttaccccaaggcgcccccaccagtcctaggcttagcaacctcgtgaactataacatggacagccggatagcccgagctgtccaatcccgtaagggccagtataccaggtacgccgacgatataacaatttctttccctgagaatcacccaaaacaggtgagaggtattatccagttagtgaaacgcctcctgagacagtgcggctatagaattcacgtgcggaaaaagctgcgaatcctccgatcccatcagcagcagagagtaactggtctggtcgtgaataggaaagttcagcttccgcgaaagatcagacggtggttgagggccgtggagcaccgtatgaaaaccaagggctcagccagcatcacaccagtacaactcgctggctggcgcggggtacaagctatgatcgacaggcagcgcgaggggtcaggatga

SEQ ID NO: 13969 - RNA, 993 nt, synthetic construct
  source 1..993: mol_type = other RNA
atgaataccctgttcgcagatgcgaatgtagttctgctctggggccttgctctcggaggcggattcgtggtcttggtggccagcctgtgggtgtcttacagagtggtgagggctacaaacgcacggcctctagagtggctccgagttcggcttggtcgcggcaaggacctcacgactctagccgccagattgggggtgagcgttcaagagctgcagggggtagagctgttctaccgcgaaagcctcatccccaagaaaaggggcggtcagcgacgcctgcttatccctgatcagccactgaaggctatgcagagacgggtcctccgcaggcttctcagaaggctgagagcacatccggcagcgcatggttttgagcaggggaaatccatagtgaccaacgctctgccacacgttggacagtgcgtggtgattaaaatggacctggtggattttttccctagtactaccgcccagagattggatgcctatttcagacgcgttggatggaacgctcaggccgctgctctgcttgtgaggctcgtcacgcatgccggggtgttaccgcaaggggctcccacaagtcccagattatctaatctggtcaactttaacctggacgcgcgtatcgcccggtttgtggcaaagaggaagggcgcatatacacgttacgccgacgacattacaatctcctttcccaaggatcatccacggaaggtcaggggaactattcagaaggtaaaacggatcgtccgcgatttcggatatcgcatccacgtccgtggcaaactgcagattttacggaagcaccagcaacagcgagttaccggcctcgtagtgaatgccagagcacagctgcctaggaagctgcgacactggctacgagccgtggaacacaggcttcggactcgcggtgaagcctcactgtcaccacaacaattggccgggtggcgggctttgcagggcatgatagcaaaacaggcgaaaaccgactga

SEQ ID NO: 13970 - RNA, 1086 nt, synthetic construct
  source 1..1086: mol_type = other RNA
atgaggcctgtcagacccgtccgtccgagagaaccaaaggcaccctgggcctttgctccagctaagcagggggtggctggtcccgagtatagtgggccagtattcttagtaaattcgctattcacgtttcctagcaggctctttccccggcgtaggagactggcctctctggtgaaaaagtggctcaggtccgtgtggagactgttccgcgttaaaaaacggaccgccgatgaattggcacgcaggttagatgtcagcctcgcagaattactggattggacaccctcctacagagagacaatcatttcaaagaagcgcggaggcactcgccgactcctgattcctgatgctaagttgaaggccctccagcggcggatcttgcacaaagtcctgagaaggctccgcgtgcatcccgcagcaaagggctttgaaagagggcagagcattgtggataatgctggcccccatgtcggccggtctgtggttataaagatggacatcgttgacttctttccaagctgtaaagccgaggaggtgaccgcgtacttccgaaagatagggtgggacgaagcggcgggcgtgatccttaccaaactgtgcacgcatgagggacggctgccacaaggtgccccaacttcacctcggctgtctaatctgatcaactggccattggacgcgcgcattgccaggtgggtggcttatagaaaaggagcctatacacgatacgccgatgacataacaattagtttccctaaagactaccccaggaaagttcgtggggtgatccagcaggttcgaagggccgcccgaaaacttgggtttcaaattcacgagcagggcaagttgcgcatcctgaggcaccatcagcagcagcgtgtaaccggtcttgtggtcaacgagaagcttaacctgccacggagactacgccggcttctcagagctgtggtgcaccacctgcagactggaaagcccgcttccatgaccgccgagcaactggcaggttggcaagctctggccaacatggtcgcaaagggcgcagccaaatatcctgcaccggcttcccctaagtcacctggaaaaccgtga

SEQ ID NO: 13971 - RNA, 1056 nt, synthetic construct
  source 1..1056: mol_type = other RNA
atgatgcagagacatgtgtttgcacatgccgagcagggagggccaattcccggcaatccagctaaagggttcctgtggttatttgctattatctttgctgttctgaccgtggtggtcatctgtgtggctattgtgctgtggctgcagcgcttagccctgctccctaagccacatgaaacgcataggaccgaccgaaggaggacccggcttggaagaggcaaggatctcgcggaacttgcacggcgtctggacacctctgcacagaaactacaaacagcaaatcgccgataccatcggttcactacggctaagaaacgaggtggcaccagggtcttgcatgcccccaatcccgagctcaagcacctccaaagactgatccacagacggctcctgagaaagcttcaggtccactggtgcgcaactggattcgaacctggcgtgagtatcgcgcataacgcagcttttcacgccgggcaggccgtcgtgatcaagctggacctgaaggatttcttccccaacactaccgccgaacgtgttgagcactattttcggaggattggctgggatgccgagtccgctgctctgcttactgaactgtgcacccacgagggtggattaccgcagggtgcccctacaagccctaggttgagcaacttgataaaccacgtaatggacgcgcaaatactgcggtatgtggaggcccaccacggcacctacactagatacgccgacgatatcacagtctcttatcccgaggattggccgaagtatgtgagaggaacaattcagcacgttcgccgaacagccaaacgccacggatacaccgtccatacaagggggaaactcagggttgtgcggaggcatcagcagcagagagtgactggcttggtagtgaatgaccgggtcaatctaccacgcgaaaaaagacgctggctgcgcgcagttgagcaccgactgaagacgcaggggcgtgcttccttgacagcccaagagctcgaagggtggaaagcactttcacaaatggtagatcgccacgccaaccctgaggcgggctga

SEQ ID NO: 13972 - RNA, 1047 nt, synthetic construct
  source 1..1047: mol_type = other RNA
atggggacccagagtatcgaactcctcgctgggatcgatccactggccaaggtctgctttgtctcctgtggcgtaccactgattacagtggtggtaattttattggttggctcgaagcgcggctggttcaagccctataaggaaactcataaggtcgagcgaaaaagggcagctaagggtctggggaaagacatagaggctttggggcataggctccagactcctcccgacgagcttagaaattttgaacctaaataccgcctggcatccatttctaagaagcgtggcggccgtagacggctggatatccctgatcacaagaccaaaaccctgcagagaactattctaaggaagctcctgcgcaacctaaaaacacactcttgtgccatggggtttgacccgggcatctcaatcgcccataatgcagccgttcacaccggccaggcggtggttattaaattggacatcaaggacttcttccccgcaaccacaaaagagagagtcgagcagtacttccgccgagtgggctgggatggagaatgcgccgcgttgttaacgggactggtcacacataatgacggtctgccgcagggagccccaacttcacctcgactcagcaatctggtgaactatgtccttgactgtcaaatacagcggtacgtgctgaagcataagggaacttacacccggtatgccgacgatattacggtgagctatcccgaggactggccaaagtacgttagggggactgtgcaaaaagtgcggagagtatgcaggcggcacggctacaccgtacacacacgcaaaaaactgagaatcgtgagacgtcaccaacaacagcgggtcacgggtttagttgtgaacgagaaagtgcagctcccaagagagaagaggaggtggctgcgagctgtggaacaccggctttccaccacaggagaggccagtctcacagaagaacagcttgctggttgggaagcactgcagcagatgatagatcaacaggctcgccccgggaggggaagcatgaacgagggagatcctgagtga

SEQ ID NO: 13973 - RNA, 1017 nt, synthetic construct
  source 1..1017: mol_type = other RNA
atggggaacttcggacgcaagcgtaacgccgatatctttacgtggctcgtgctgtgtttgcttgctatcatactgattttcgcattcccaatctttatcctgatcgaattgatcaactgcttcttccccgatcgcctggctaagaagcggtacagacatgtattcagacatatctgtggcatgggattaaagtcagatgagctggcccgtagactcggcatgaccgtggagcagatacaggctacccctcaggactatacaacacggaaaattcccaagaggtctggagatcaaagagaactcaatattcccaacgagcagcttaagagcctccagcgctgtattctcaaagggctgctatcaaagctgaagactcatccggcagcgatgggtttcgaagaagggtatagcattgctcataatgcgatgctgcatacacagcaagccgtggttattaagatggacattaaggacttctttcctagtatcaccgccgccacgatcgagttttactttcgggagataggctggaacaagcgggcagcgttcttactaagtgagctgtgcacccacgcttaccaactccctcagggcgcaccaacctccccaaaactctccaatcttgtcaattacatgatggactaccaaatagagcaagccgtgaagcactatcacgggacttatactaggtatgccgatgacatcacaatatcttttccgaaggattaccccaaacacgtaaggggcatcatgcagaaggttcgatgcattacaaaatttcacggctacgaactgaatcacaaaaaaacccatatcctgcgacagcaccagcagcagagggttactggactggtggtgaatgacaaagtcaaccttcctcgagagaaaaggcgctggttgcgggccgtcgagcacagattgcagacccagggtaaagcctccttaacacaggaacagctggacggttataaggctctgcaacaaatgattgccagccagactcagccaaaagcatga

SEQ ID NO: 13974 - RNA, 1116 nt, synthetic construct
  source 1..1116: mol_type = other RNA
atgttcaggagatccggccggttcgtgacagcctccgactctagggttcgcgtgcgccagttcagagcggaaatccccgacaccaaacaggatgtaactgggactggacttccagtgccagtctttccgagtggcggggtgatgctggcatttaacctgctgtcccagttggtaagcttcgccctcgtcgtagcttgtttgttcggcgtgggcgtctgcctgcatataagatatcggcgggtaaccaatagcaatctgcgtcactggttacgggcaagacgtgggcagggattggggatcgacgagctggccaggaggctcgatgtctcagaggacgaattgcgcagtgttgacgtgggttaccgggaggcatttatctccaagcgaagtggggggtcacgccgcttgctcattcccaattcagaactcaagcgcctgcagcgcactattctcagaaggctcctgggtcggctacgtactcatgatgcagtgaccggtttcgagcgcggtctgagcatagtcgagaatgccgctcctcacgtgggccaggcagttgtcattaaacttgatgtcaccgatttttttccatccacaagagccgaccggatcgatgcctactttcgaagagttggctgggacgctgaatgtgccgctctcctgacaagggtgaccacgcacgaggacggacttcctcagggggctccgacatctcctcgactgagctcgcttgtgaacttcggacttgatagagctatcgagcggtttgtgtgcgataggaggaggggcgtttataccaggtatgcagatgacctgaccatttctttccccaaggattaccctcgaagaataagagtggttgtccaattcattgcccgaaggcttcgatgcgacggatacgctctgaatcgaagcaagatccgcattctgaggcagcaccaacagcagcgtgttacgggcctcgtggtcaacgactgtgtgaacgtgccaagacacatccggcgcaagttacgtgcggtggaacatcgcctaaacacaggacggtctgcgactatgacacgggagcaactggccggctggaaagccttactgcaaatggtggaacagagacggccctga

SEQ ID NO: 13975 - RNA, 1011 nt, synthetic construct
  source 1..1011: mol_type = other RNA
atgatagatgccgttttcaatggcattgagatagccgccaaagcttgcctgtcaatcactggggttatctttttggcagtgggagtattaatcgcttattttctctggaatctcagcacattgaagagagcacgtccggccaaccttaagcactggaaccgcgtgcggagaggagatgggttcggtgtggaagaactggctcgcagacttggcgtgacctccgatgagctggccgctgtctctcccaattacacagagaggttcattgaaaagaggagcggaggcaccagacgcctgctggttccctctcctgagctgaaagaactacagcaaaagatcctcaggcgtctgttagcacgattgtcagtgcatcctgcagccaccggttttgagcccgggacttcgatcgtacacaatgcggctcagcacgtggaccaggcggtcgtagtctgtatggacgtgtctgacttctttcctcagactagtgaagccagagtgaccgcctacttccagcgcattggctggaatcgggagacggccgagctgctcaccaggcttacgacttgggagggcggactaccacagggggcaccaaccagccctaggctctccaacttggtgaaccatgttctcgatgccaggattgagcgctttgtcgaatgcaggaaggggaattatacacggtacgctgacgacatctccgtcagctttccaaaagattacccaaagagggttcgtggcaccgtccaggtagtcggccgccatctgaaagccttcggctatcagctgaacgctaaaaagactagaattctgcggcagcaccaacagcagaaagtgacaggtctggttgtgaacgatcgggtgaacgtgccccgaaatatccgccgaaagcttagagcagtggaacaccggctgaataccggacaacgggcgacaatgacacgagagcagttcaacgggtggaaggcattactcgctatggtggaacaacaaagagacggaagtcagtga

SEQ ID NO: 13976 - RNA, 1119 nt, synthetic construct
  source 1..1119: mol_type = other RNA
atggccgagctcaaaaagacggaacccaagaagaccagcaaatggagcggctgcctggcaattgccctcggactggccgtcgttggatggtgcctttatagcattgtgaggggtgttgtgggactgtttcatatggggcccgtgacttttggggtggttgcaggcgtgatcggactcgtgatcgcctggtttgtggctaggtcctggtggcgaaagggaggacgcaacgccgtgcgtagagctttctggatagctcccggtgtggctgagttggccagacgcttagatgtaacgcccgaaagacttcggaccttttctccagtctaccgcgaggtacgaatccctaaacggagtggcggcgttcgagtgttgcatgtgccggacgctaacaccaagtcgttacagcgtaagatcttgcaccgcttgctggcccggctgaagtcacaccctgcagcctatggcttcgaagccggtaggtccatagcccatcacgcggcccagcataccaaacgggcgattgtcctacacttcgacgtggttgacttcttcccgagcaccagagccgagaggatcgaaaggatgtttttaagactggggtggaatagggaggctgcgctggtgctcacaaaactgactacccacaagggcggactgccacaaggagctcccacatcccctcgccttagtaatcttgtcaatgcaggcttggatcgcgcactcacaaagcgggtgggcgaactgaggggtagatactcacgatatgccgatgacatttccgtctcattccctaaggaccgtcgcgggtctgtggagcgaacaaaggccagagtaatgcacgagctgtgtctgcgcgggtacgagatgcacgtccgcaaaaagctttctgtacggcgtgcccatcagagacaggtcgtcactggcctcgttgtgaacgaaaaggtcgctctgcctcggcacctcaggcggaaactgagggcagctcggcaccatctggcaacagggaggccagccacctggactgacgagcagctaagagggtgggcagcatttgaaaaaatggtgagagatcagggtgcgcccccaccacaagatggggatggcactacaccaaaagcttga

SEQ ID NO: 13977 - RNA, 1038 nt, synthetic construct
  source 1..1038: mol_type = other RNA
atgacagtgggctgctggtttgccctcctcgtaatgttgggctcagtcgtcggtgccatcctcgtgaccccctggtctttagctgctactcctgccgctgttgcactcctgctgacctttcacggactgcgccacaggtatggcgcctacccatggcggagacttcgtgcccatcttggctacggacacgggattgacgagctggctaggcgtcttgatagacccgctgctgaacttcgcagtgccgctccggtctatcgagccgtggacattcccaaacggagaggtggcactagacgtttgcacgtgcctgatgcggccactaaggccctgcagcgaggcatcctgcaccgacttctgaagcggctaagggcacatggagcggcccatgcctacgaacgcggaaggtccatcgccacgaacgccgcacagcatgtgggcagagcagtggtgctcaagatggacgtcgtcgatttctttgcttcgacctctgcggccagggtcgagaggtatttcaggagaatcgggtggaatcgtgaggcagcagctttattaacccgcctgactactcacgagggagggctaccccaaggtgcgccaacatcacctagactggccaatttggtgaacaggcacttcgatgtgctcattgaccgcacaacccgccgctttcgagggacatacacccggtacgccgatgacttgacaataagcttccccgaggattggccgcggaaaatgcgcggaatggtgcagagagtgagaaaagttgcaaaagctttcggctatagggtacacgggaagccaaagctcggcatctttcgggctcaccagaggcagctggttactgggctggttgtaaaccaacgggtggcactgcctcgagaaacccggaggtggctgcgagccgttaagcatcgggctcgccatggaaaagcaacaatcacctccgcacagattgccggctgggacgcgtacgctgccatgataggtggagccacgagccctgcaccaggtccagcagacagaggggggtga

SEQ ID NO: 13978 - RNA, 1047 nt, synthetic construct
  source 1..1047: mol_type = other RNA
atgcgcgatactcgaggtcccgtgtggaaacttctaacggctatcggcatggtgctggctcttctcgtgctgattcctctgtttgtcgccgcccttatcctagcactgccatttgtggtgattttaagcggatatagcagataccgcctcgcgaccaacggcagacctataaggtggctgaagctcaagttgggatgggggctaggcgtcagggagttggctcgcaggctggaaatgccagccgatgaattgcggcggtttcagcctgtgtaccgggtggcccggattcctaaacgaagtgggggtcagcggactctgttcattccagatgcagccaccagagccctccagagacggttgcttagaagagtgcttcgtcggctgaaagcccatccagctgcctgcggattcgaggctggacgttcgatagttgacaacgcccgtcctcacgtagggcaagcggtggttatcaggttggacgttgtcgactttttcccgtctacaactgccgctcgcgtcgaaagatactttagagccatcgggtggaatagggcggcggctgaattgctggtacgactgactacccatgagggcgggttaccccagggtgcaccaacatccccccgcctttctaatctcgtgaattacttcctggacgtcaagctcgatagacacgcacaaaggaggcgcggcgcctatacccgatacgcagacgatatcaccatctccttcccccgggatcatggaaggagagctaggggcacagtccagtatgttcggaggctgctgaaggcacatggctatcagctgcaccgcgacaagaaactgtcaattcgccggcgtcaccaacgccaacaggtgacgggtctggtagtgaacgagacagtccagctgcccagagctacccgcaggagactccgagccgttctccatcaccacgagactggacgaccggccacaatgaccttagagcagctccagggctgggccgctttacaggcaatgatcctgaggcaacgggacgggaaccccgacgaagcatcatga

SEQ ID NO: 13979 - RNA, 1056 nt, synthetic construct
  source 1..1056: mol_type = other RNA
atgccagctaaggcaacgtttcagatggctactggttgttgtctctccgcggcgacggccgttgtgactttcttttggcttctgaattcagatagtcagattagctttgccataatgtccgttctgttggtcgccatttgcgcgaccatgctgtttggctggtggacagcattcttgcagctcactagtaaacacccatggcattggatccgcaccaaatttggttggggattcgagattgaggaactggccaacagactcgggtacagcgtgaacgagctgactgagcaccagccgcagtatgtgagcgcattcatccccaaacggtccggaggcacccgggaacttcgcatccctgataagaagactgctgagatacagaaaaggattttgcaaaggctactgagcaagctgcggtcacatccttcagcctgcgggttcgagacaggaaaatctattgtgcacaacgcactgccacacgtagggaaagctgtggtgattaagctcgacgtgatcgacttcttctcttcgaccacagcttctcgtgtcgaggcctacttctgccgaatcgggtggaaccgaaagagtgccaagctgcttaccaagctcacctgtgatcaggacgctcttcctcagggagcagctactagtccccgcctgtctaatttagtcaattacctacttgatgagcagctggtcagatgcgcaacgaagtaccggggcgagtattcccggtatgcagacgatattacatatagctttcgcaaggacagccccaaaagaatgaggggcataatccagagaacaagacatctcttgaatcggtccggctaccaattaaatactgaaaagcagcgcatcttgcgacaacatcaacgtcagaccgtgacaggactgaacgttaacaccaaagtaagcctgtccaggaagctccgtcgcgaactaagggccgccaggcacagattagaaaatggcaaagaatcaacctggaccgctgaacagctgcaaggttgggccgccctggagcacatgatccaggaacagacaaagtcttga

SEQ ID NO: 13980 - RNA, 1056 nt, synthetic construct
  source 1..1056: mol_type = other RNA
atgtcagctcggagtactttccaaatgacctctggctgtggttgtacactcatggtcctggcaggcggaatcctgctcgccaatcaagctagcggcgctgtggtgatcttcgtgctttctgtcatttcagtgtttgtattcgctgggtggttaaccgcactgttccagatgacttcaggcaatccgcagcacgcaatacggagctggatgggctggggcttgacagtgtccgaactggccaggcgccttgatctatcagagcagcaactgattaaccatttccctaagtatattgaccgcccaatccccaagcgttccggcggtacccggattctccgtatccctgatgctaccacagccgacattcagaaaaggatactgcagcggttgctgcccttgctcacttcccacagatgcgcaacgggatttgaggccgggcttagcatcgttgacaacgcgctgccacacgttggacaggcggtagtcataaaactggacttggtggacttttttcccaacacgcaccgcgataggctcgagctgtactttaggagaatcggctggggaaaggaggccgcgtccatcttggtgcgcctgacctgcgatgaagagggtttgccacagggggcatgcacttcgccacgactgagcaatcttgtcaatttcttaatggacgagcagctggaccgcctagccaagtctaggaaaggggtgtatacccggtatgccgacgatattaccttttctttccctaaagattacccccagagagtcagaggtatcattttaaagaccaggtggatcgtgcggaggttcggataccaactcaacagcaaaaagcagctgatcctgagacagcatcagagacagtctgtgacgggactaaatgttaacacaaaggcatgtcttcctcgagaactgcgacgccgtctgcgagccgctaggcatagaatgaaaactacagggagcgctacatggactgaagagcagctccaagggtgggccagtctcgaatccatggttgagagtcagacagcctccgagagtgaacggtga

SEQ ID NO: 13981 - RNA, 996 nt, synthetic construct
  source 1..996: mol_type = other RNA
atgatttcacaacattttatcgccgtgtcaggcagcgatattttccagtgggcttggaagttaatgttgctggtgttcgttatctacataattcgggttctgctggacttgcgtgccctgaagcacgcagggaaccgaaagacagcaaggagagtggccaggggccagggcttagacatggcggagctggcacgacggcttgacatcgccgaaagggatctcgagctttttaagcccgtctaccgcagtgctaccatccctaagcgtaggggaggaaccaggaaactgaggatccccgacccaccaactagggccatgcagaggaggatcttacacagactgctgaagaggctacaagcccacccagcggcatgcgggttcgaacctggtaaaagcatcgtcgacaacgcactcccacatgtgtgtcaaagagtggtgattaaactcgatgtggtcgattttttcaccaataccactgcccctcgggtgcagcggtattttcagtgggtcggctggaatcgcccggctgctgaatggctggcaatggccactacagacgagggcggactacctcagggagctcccacatccccccgactgagcaacctggttaacttctacatggacgtacagttgtccaaattcgctgcccggcgtaagggtgaatacacgagatatgccgatgatattacctttagtttcccgaaagattatccaagacgcgttcggggcgtgattcagtttgcccgcagaatacttcgttctaaaggttatgagctgaatgggcgaaagctcagggccttgcgacgccaccagcagcaaagagtgactgggctcgtcgtaaatgacacggcaaatcttccccgccgcactcggagatggctgagagctgtagagcacagacgccgcacaggaggccagcctaccctctctgacgatcagcttgcggggtggcaggctctccggcatatgataaacacccaacggacaggttga

SEQ ID NO: 13982 - RNA, 1035 nt, synthetic construct
  source 1..1035: mol_type = other RNA
atggtcagtgtgccctttttaatcggcctgtcagtggctgcagtggttgccgttctgatcgggctgcgcttgggaaggaaaagggactccagtttcgacagtgactggcctaatgactcgcctggaccccttgcgcaggagcgaacagcacaaccgagcgcccagacaaagaagagcaagaagcaaccaggctatgccgccagattcgatctcgcagaattagcccggagattggatgtgccagagcagcagctcttggcggcagagccgacttatcgcattgcaaaaattgcaaaaccctctgggggcaccaggcgccttgaaattccagatgatgacaccaaggccctccagcggtgcatactgcgcagacttttagccacgctcaacgcccaccctctggcttgtggcttcgaagaagataccagcattgtggacgccgccctaccccaccagaatagagcagctgtcatccgtcttgatattagacgatttttcgaatccacttccgccgaccgtgtccaaaattggtttatcgccatcgggtggcaacctggtgctgcggaggtgctgacacggttgacgacaaacgatgggcatctgccacagggtgcgccaacctctcctaggctcagcaacttgattaattcccccctggacgagggacttttgcggctggctaaacagtacggcggggcctacaccaggtacgctgatgacatcactctgagctttaatttcgaccggggacggaagctgagaggcatcatccaggctgctcgacgcatagtgaagtcctatggctacaccctccacggaggcaagaagcggaaagtgctaaggcgacatcaacgccagcaggtcctggggctggttgtcaacgagcaggtggccctgcccagatctaaacgccgttggctgagggccgtacggcataggatagaaaacggtggcgaggcttcacttactgcagctcagctcaaaggttgggagtctttttgctcaatggtacaggaacagagagatgagggatga

SEQ ID NO: 13983 - RNA, 990 nt, synthetic construct
  source 1..990: mol_type = other RNA
atgttttccgtgcccgtgttgatcggattggctattagtgccgctgccgtcgttctatttggtttagttgcagcaacacgtcgccgggctgcccatggacatgatcgtggcacaccccaccctttaccacccgagcggggaaggtcttccccactacctcagtatgatctgtctgagctgtcccggagattgggcgtaagccgggccgtactcgaacgcttcgagacaggttataggatagccgagatcccaaagcccagggggggggttcgcagactggagatccccaatgaggaaacgaaaaagttacaacgaaccatactgcgaaggttgcttacagcgcttgacgtgcaccctttcgcctgcggtttcgagcctggcacatcaatcgttgatgctgccaccccgcacgaagggagacttgtcgtggtgaaaatggatattcgccggttttttgaatcgaccaccgctgcacggatcctggaatacttccagagaattgggtgggacgccgcttctgcggaggtactgcaaaggctgacgacttataacggacatctccctcaaggggcaccaacctcccctaagctgagcaacctggtcaacgctccgctggacgaagcacttctccgtctggcccggcgacacaatggagcatatagccgctacgcagacgatatcactatgagcttcgatatcagaaggggcagagtggtcagaggactcactcaggtggtcagacggattctgaaatcatacggctacaccatgcacggcggggccaagctgaaaattctgaggcagaaccaacgccagcaggtgctaggcctcgtggtgaatgagaaaactgcgcttccccgcaagactagaaggtggctccgagccgttagacatcacgctcgcgtgggtaggccagtctcactgagtaagcagcagctcgacggctgggaaagttttttgaagatggtggaaacccagagggacgagtga

SEQ ID NO: 13984 - RNA, 1029 nt, synthetic construct
  source 1..1029: mol_type = other RNA
atgctgaccattcctgtgttaataggcatcgccgtggtgggcgggctggcaattcttattggcatgattgtgggaacaaggcagcagcatcgctcagacgatgatgcctccgcgccaccagctggcaataggcctgctacagaatctccttctgggaatgtgccccagcgcgacacctctactgcgtccctaaccctgacagatttgagtgctcgcatcggcatctcagtggacgatctccaaaatcaccagccggtgtaccgagaggtccgcatcagcaagcctcatggaggagtcagatgtctggagatccccgacgatcggacaaaggaactccagagaacactcttgcatcgtctgtttgcaggaatccgggcccacaactgcgcctgcggtttcgaagccggtacctccatagttaatgccgctgtaccccacgtcaggaagagggtaattgtcaagctggacgtacgtcgctttttcgagagcactaccgcaaaaagagtctccgcttggtttaggagcatagggtgggacgatgaggccactgctgttctgacgcagctcactacgcacaacggccaccttccacaaggtgcaccgaccagcccaagactgagtaacctggtgaacgctcccttggacgagggactgctgaagcttgccacccatcacggaggggactacactagatatgcagatgacattacaatgtccttccacatcaggagcggtcgccggatcagaggaataatccaggccacccgcaggattcttagaagttacgggtataaactgcatgggggcagaaaacagcagatcctgcgacgacaccaacggcagcaagttctcgggttggtggttaacgaccaggccgcacttccacgacatacgaggaggcggttacgggccattcgacatcggacctcgcagggcattgctcctactctcactcccgcacagctagaaggctgggaagcgttccgtaccatggtggagacacaacggcagccctcatctgatcactga

SEQ ID NO: 13985 - RNA, 1023 nt, synthetic construct
  source 1..1023: mol_type = other RNA
atgtttactgtgccggttctgattggcatcgccgtggccggactgatagccattctgattggaattatcctcggctccagaaaaccctctcctgagcagacagctgagagacaggacgagacagtgtcatctacggatagtgcttctaagtcatccaccagccccgccgctccaccacttaaggctgtgagtggggggctggagatacgagatctggaggaaagaactggcttgagcgccgatgagctccggtcgttgaaacctgagtaccgggtcgtggaaattgccaagcatggggggggtaaaaggcgactggagatccctgacgaaaggaccaaggaaatccaggcaactgttctccgtcgcctgttttccgcgatcagaagtcactcagcagcatgcggcttcgaacgcgctactagcattgtcaacgccgccacgcctcatgtcggtagaagggtggtgattaagctggatatccggcggttcttccaatcaacaacagacgacagagtgcttgcatggtttcagtccgtcggttggtcccaggaagctgcgcagctgctgacccacttgactacatgggacgggcacctaccacaaggagcccccacctctccccgactctctaatctcatcaacgctccgctcgacgaggccttgctgcgattagcagagaaacacaagggcgcctataccaggtatgctgacgacataacctttagcttcaacttcaggtccggaagacgagctagagggatcatccaggcagcgcggcggattctgaggagctttggctacgcaatgcacggaggtcgcaaactgaaagtgctgaggaagaatcagcgccaatcggtattaggactagtcgtaaatgatcgcatagccttaccaagacataagcgccggtggcttcgcgccgttcgtcataggcgggaccagaccggccagtgtagccttagcgatcagcagctccaaggctgggaaagtcttcaacagatgatcgaaaaccagcgtgattga

SEQ ID NO: 13986 - RNA, 942 nt, synthetic construct
  source 1..942: mol_type = other RNA
atggcgtggatcatcgccgcagctgtcgctatggcaattgctgtcgctttcgttttgctaaagagtacccaggacagcaaatcgaccccaccccgtcggaagccagaaccgttcaccctggcggaccttctggagcggcttcagctgacagaagaagatgcccgccaattagaatccccccagtggaggaaagcctttatacccaaatcttccggaggaacgcgattgcttgagatcccagatgatgtgacactggccctgcagagaaggatcctccacaggctgctgtccgggctgaagtctcaccctgctgcgatcggttttgagaatggcaagtcaatcgttgacgctgcccgccctcactccgggaaacaattcgtgatcaggatagacattgaacgcttttttgaatctacaccggtgacacgggtagaagagtactttcggtttatcggctggactgacgacgccatccgcctgcttactactattaccacttgcgagggccacttaccccaaggtgccgcaacgagtcctagactcagcaatctagtcaacattcgaatggaccacgccctgcagaacgtagcagagagattccacggccattacacacgatatgccgacgatataaccttctcattccatttccgcagtgggaggaaggctaggggcattgtgcaagtcattagacgtatcctccggcaaagcggttatcgtatgaacagcgagaaaacccgaatactgcgggcacatcagcagcagcaggtgatgggactcgtggtcaatgagaaggtggccattcctagatcaagacgcagacagttgagggctgccaggcatcgggttagacagggaaagcccgcaacctttagcccagaacagctccaggggtggactgccttcgagaaaatggtggaggatcaggcatctattgattga

SEQ ID NO: 13987 - RNA, 921 nt, synthetic construct
  source 1..921: mol_type = other RNA
atgaactcgctgatgattgttgtcgcattcatcgtgtcccttgttgtcgtggccacggggttacttgtacggcgcataattaggaatctgagaaacaggtttacactcgctgatcttgtgaatagacttggtatgacagccgaagaatggagccaactcaaaccacccacttaccgtaccgccatgatacctaaacgcaatgggggacagcggatgctggagattcccgaccctgacaccatggttctgcagcgcagaatcttgagacgggtgttaaagcgtctccgaagtcaccgggccgctataggcttcgaaagtggtaaatccattgtccacgccgcttctccacacatcggccaggccgtggtagtgagggtggacatcgagaactttttccagaccactacagaacgacgagtgggcgagtggtttagggcgatcggatggaaccaggaggctaccgagttcctattgatgatcctcacacataatgggcatctgccgcaaggtgccccaactagccctcgactgagcaacctcgtcaatgcacgcctggatgcaggactcaatcgcatcgctcaatcctacggaggagcctatacgcgctatgccgacgatattacttttagctttcccgtggatcagccaagacagattagggcactgctgcaaatggtgggcaggtatctgaaacaggccggttaccagatgaagaactccaagacaagaattttgagggctcacgcaaggcagtctgttctggggctgacagtaaaccagaaggtcgcgctacctcggtctatgagacggagacttcgtgctatccggcatcagcagtcacaaggcaagcccaccactatgaccgctgcggaattgcacggctggaccgcattcgagcagatgatcgcctcacagaagtga

SEQ ID NO: 13988 - RNA, 909 nt, synthetic construct
  source 1..909: mol_type = other RNA
atggcatacgttattgctggcattgtagtcgtcatcgcagctgcaggacttgcagccgctatgcgctttcggaaacctcggcgcagctatactctcgggaacctcatcgatttcctagagttgactcccgacgatgcccgagttctcaagcagcctagttacagctcacaccggatccctaagcgcagcgggggatacagactgctggaagtgccagatgagcagacgaagatgttacagaggagactcctcagaagagtgctgtcaaagctgtccgctcacccggcggctgtgggtttcgaaaccgccaaatcgattgtggacgcagcgcggccacataccagcaaaggggtggttattcgcatcgacattactgacttttttcagtccactacgaccgagagggtcgccgcctggtttcgtggtatcggctgggacgccgactccgtagatttcctgacaaaattcgtgtgccacgacggtcatcttccccagggcgctccaacttctccccgtctgtctaacctgattaatgccggaatggatacagtactacaaaggatagccacagagcggggcggcacgtatacacgttatgctgatgacatcaccatcagtttccgacggttgtctggacgacgagccaggggggttgtgcagcatgtgcgcagaacactgaccgcttttggctacagggtcaatactagaaaaacccggatccttaggaaccaccaacagcagacagtgacagggctggtcgttaatcgcaccatatccatccctagaaagcaacgccgaaagctgagagccattaggcacaggatagccaacggacaacccgcgaccatgaccactgatcagttggcaggctgggacgcattcttagccatggtggaacagcagcggtga

SEQ ID NO: 13989 - RNA, 1191 nt, synthetic construct
  source 1..1191: mol_type = other RNA
atgaacgacggcgctgcctatggccggatggatcgccacgaagtggagccagcccccatacggccatactcagcttggcgggacctgatagcgctgctgctgaccggatgtgggtgtttcagtattttgttcgtactgggtttgaccgccgcaatgtttggtccgcctcttgcccaacgtatcgccccctggctgaccgtacctatcctgttcgctattggaatcaatctcgcccagtggtattttttcaagcgtctcaagcgtgtggacagatactccttattccgagcgaaacacaggatccgcgcagcgagaggcaagggcatggatattgaggagcttgcccgccgatgtgggctcactactcaccttctgcagaaccacgagcccaagtatcgggaggctgagatccccaagagatcaggcggcgtgcgtcggctgcacattcctgacccagctaccatggatctgcagaggacgctcctgcgcaaagtgctcgccaaattgcatgccgatcccgcagcgtgcgggttcgagaaaggaaagggcatcgtggatcacgcagctcctcacgtcgggcgagctgtcgtgataacatgcgacctaaaagacttttttcccagcgtgacagctaagtccgtcgactactattttcggagaatcggctggaatgcagaagccgccgccttgttgactcgcttgacgacccatgccggagaaggcggagaacctgggctgccacagggagctcccacatctccgcgccttagcaatcttctcatgcatggtgttgattacgctctcgccaaatctgccgccagacgaggctttaggtatactagatacgcagacgatcttgcattcagttccgccgaagacgatagccaggccgttcgcgaactgctccagcagattgatagggtggttaaaagagctgggttccggttaaaccctcgaaagacacggattttaaggcagcatcaaaggcagatgatctgcggcctggtcgtgaacgaccggctgaatctgccgaggaaggttagaagggagctaagggcagcactccaccgccgcagaaccggtatgcatgctacatacaccgacgagcaactagccggttgggcaggggtactgactatggtcgcaaggggaccaagagcggaacctggggtgccacggggtgttggatga

SEQ ID NO: 13990 - RNA, 1155 nt, synthetic construct
  source 1..1155: mol_type = other RNA
atggtgagctctgacactccccctcctgatagcaatgcgtccggccttggctgtgggggaatcgtgtggtccgcactcgcagccgtgttactgctgacgggcctcacagcggttgcagttcttgccgtcagagccttcggggctctggttgctgcccttggagccagtgcactgattgccataggtctaaacttcgcccaatggtactttcttaaaaggctgaaacgcgtggaccggtatagtctcttccgtttggggcatcgatggcgggcttggcgcggtaagggcttcgacatcgaggagttagcacgacgctgcggacttacagcgcaccggctgcaaaaccatcagcccagctaccacactgccacaatccctaagccctctggcggagagcgcaccctgaccataccagatccagccaccatggatctgcagagaactttactgaggagagtgctcgcccgattgcatgccgatccagccgcatgcgggttcgaacggggcaaaggaattgttgatcacgctgctccacatgtagggagggcggtggtcgccacctgcgatttgaaagacttttttccgtcagttacggcaaagtcaatcgattactatttccggagggtgggttggaatgctgaggccgcggcactgttgactagactcaccacatccgaaggcggactgccgcaaggtgctcctaccagccctcgtctctccaatcttctcatgcacggcgtggattatgccctagccaaggccgctggacgcagaggattccgttataccaggtacgccgacgacctggcattttcttcagccgaagatgacggccaggctgtcagagacttgctgagacgcgtcgaggccgtagtaagacgtggcgggtttgaactgaacagcaagaaaacccgagtgctgcgccgccatcagaggcagatgatctgtggcctcgtggtcaacgaccggttgaatctgcccaggaagattcggcgggagctccgagctgcactacacagacggagggtgggcagggaagcaacatacacagctcagcagctggctggatgggcaggggtgctgactatggtcgcgaggggtcccagagcttttcacggggagactccccctgacagtgccccatcttcggcttga

SEQ ID NO: 13991 - RNA, 1725 nt, synthetic construct
  source 1..1725: mol_type = other RNA
atgaacgatgggataattctagcacttgacggcggggaggccctgtgctttatcagcctggttatcttcatgattgtgttcttcgtggctgtgatacagttcttcaacaagctgaagatcctcgtgcccgacggccagcgcagtatttcaaaggctgagtatttggagcgaaagcgtaaggaagccatcaccaaatatggtaaaccatctgacaagtcacggatttatagactggttcctgagctggagaagttagacccacaatgggatcccagttatgagattgtcagaataccgaagaggagcggaggggtacgggagttgcagataccagatgaacttactaagaaaatccaatacgctctgtaccacaaactcttttcctactacatcgttcaccccgctgcgtgcggcttcgtcaagggtaaatcaattgttgacaacgcacgccagcacgtgggccaggaggtaatcgtgaaacttgatattcgggaattctttcccaatacgaaaaagatgcgcattaacagatactttgtaaccacagggtggaccccagacgctgccgatctcctaaccaagctggtgtgttacgagcaaggacttccgcagggcgcacccacatcaccagtgctgagtaatatcgtgaacaagtctatggacgacaggctgttctctctctctcagagcttcaatgcaaattatactaggtacgcggatgacatcaccttttcaatggagaagtacaacagagagttggtccatgcgttactgcaacgcgtgggcgtgattctccggatatacggatataatctgaaccggaagaaaaaacggattatcaggaggcaccggcgacaggaagtcactggactcgtcgtgaattccaaggtaaacttgagtagaaagagacggaggtggctgcgaagcatccaacaccgcatcaaaaccggtcagaagcttacagtcacaatggccgaatacaggggatggatctcactgctgaacatggttgaccccgagtctaacctgatccatcttcataagcagctcgttaagactgatgcccctgtgttgacgcctatgagcgatcctaatgacaatagtccaacagcagaactccagggttccgatgtcgatcgctcttcccgcgatgagaacaaaacccgtgtgtcctcggaaatgctggatgacaatgccagcgaattacgaacggtggacgaagacaaccctaccagaccatcggggtcccaggacgagacacatactgctgatacatccagtactagggctcccctcaataatgaccagcacgaggaacagtctgagctacccgagctccagtcgtccccggataacagcggggtctttcatgaagaccgacttgaagataaggtgcaggccttgaaagtagccaaaccttacagcactgaagccaaatcactcatcagcgaattcaccaaatcctcttatactatacagctgcagctggagagtagcaaaagaactttctcctttaggctgcctgaaggctatcaaaagggaagaacggtgacaggatccctgtctgatgggaccgaggtggaattgtattttcacgacagccttgctgagacagtcgagaatgccgagtttcctttaaagagcgaggtgacaattgaagttattcaatggaacgcaacctttaaacgtgttgaggccatcgtcaccggcggcctgttccactga

SEQ ID NO: 13992 - RNA, 1098 nt, synthetic construct
  source 1..1098: mol_type = other RNA
atgcagaacagtaacatgttagtcgcggatggagccggagccgcaatctgtttcggcatcctccttctggttctggccttcatagcctgcgtacggttcttaaatggccatgccaaaaatgtgatacaggacaaggtggtcaatttggatggctttaaaaggctgtccagagttcagaaagctctacttgcccaacgcaagcgcgaggctgccccagaagcatacggttcagtttctgggaccagcaggatctataagctggtcccagagctcgagggtctagggagcgagtggaccccttcgtaccaggtagctcggattccgaagaggagtggaggcttccgagaattgcaaattcccgacagccaaacgaagaaaatccagctggctctgtatcacaaactgttcgcaaactatgagactcacccctccgtctgcgggtttgtgaagggcagatccatcgtggacaacgctagaccacatgtgggacacgaggtggttatcaaactcgacatcaaggaattttttcctaacacataccggataagggttaatcgctacttttctgaaacagggtgggatccggcaggcgccgaccttttgactaagctcgtgtgttatggcatgggactgccccagggtgcccctacttcacccgtgatttctaacatcgtgaacaaggcgatggatattcgactctttgctcttgcagaaaagttcaatgccaattacacacgctatgctgacgacatcaccttcagcctgaaatcctatgaccgcaatgtcgtgcacaggttacttcagcacaccggagtgatcctgcgggattacaagtacacactgaacaagaaaaagaagcgaatcattaggtatcatagacgccagcaagtgacggggctggtagttaatgataaggtatccttgcctcggagacgtcggagatgggtccgtgcaatccagcacagactcaaaaccggcaaagatactaccgtgagcttcagtgagtaccaggggtggatttctctgattaaaatggtggacccagcctcacccctgctcatagtccatcaggagattattcagaacaggatggcgtga

SEQ ID NO: 13993 - RNA, 1734 nt, synthetic construct
  source 1..1734: mol_type = other RNA
atgcccgcctcggggactgaaacaaatctcattatctggggcttagctgccaccatcgctgccgggtttatactgcttgcgcgttatcgccaacatgtgagcgcaaacgatagaaagcgtggttctaattctgcaggcagccggaaacccagccggtatggacgccaaaacagttacggtaagtccgctcagggcccactgtccgatgtcgacagattgtatagacttatacccgggatccaggaactagtgaaatctggagggacacagtatacaaattcacgcattcctaagcggagtgggggtttccgggacctggacgtgccgaatcaggctacaaagaaggtgcaacacgccttataccacaagttatttagcaaatacaggatccacgagagtgcgtgtggatttgtgaaaggccgctctattgtgcagaatgccctcccacacctgaggcatgaagtagtggtgaaactggatatacgagagttcttccctaatacaagcaggttgcgcattaaccggtacttcaggtccaccggctggacatcaaaggcagcagacttgctcactagtattgtttgctataagcagggcctaccgcaaggagcacctacctcccctgttataagcaacatcgtgaacaagacaatggattggcggtttgctgcattggccgatgcatttggggcccagtacacccgctacgcagacgatataaccttctcccttaagtcttatgatagggggaaagttcatagactcattcaaaacgccggaatggtatgcaggagctacggttacaagttaaacaacaagaaaaagcggatcatcagatctcaccggcgacaggaagtcacgggactcgtcgtgaatgagaagattaacctcccacgatcaaggcgtaggtggctgagagcaatccagcacaggctgagaaacggcctcgaaacgactgtcactaattcagagtacgagggctggatgtcactgctgaagatggttagcccggaatctcccctgctggaatcccaccagcagcttatcctggaaggcatcctgcatcgaaagaaccagagtacactcactgaggagaaaaagcacgcggactcccagcttgagagcgaaacggctcaaagtggtgccgacgtcgtcaccaccgtggagatccgttccgagggctcagatgaccaagccggtaatacctcacccacgtctttggataccaattccgagccagaggccgacgggtcgattcagcttgctgccgataaaagggagcctcagggtgggagtaaaacccatgacacaattgccaatggagttgagtcacaggccgaaagcgatggagtacccgactcgaaaagcgatctgttttatgaagaccgcctgattgatttcgtgcaaagactgaaaaacgcgaagccatactctgccgaggcgcgagaaatcgagaatgactttgccggcgcaaagtacgctaccgtagtggagctggagtcctacaaacggacattctccttcaagctcccagccggctatcagaaggggcgcactgtgagtggaagaatttctgacggcaccgctatccagctatatttcgccgaccagttgagcgatcccattgaagccgctgctttcccttttaaaggggaggttagcatcgaggtcatacagtggaactccactttcaaaagaatcgaagcactggctactggaggcatgtttgactga

SEQ ID NO: 13994 - RNA, 1683 nt, synthetic construct
  source 1..1683: mol_type = other RNA
atgatcgtacgaggaatcgatgttggcttgtgcgcctgcctcttttctattgctttcactattgtcatcgtccttggtataaagcggctcacctcgccaaagcggaacaggatgaaaaagacaggccagtctaaacgaaggagatcaccttaccgtcccgctaaggcaaaccagactagttcccctaaacatccaaaaagcgatgtggaccgcgtcttcagactcatccccgaatttgagaaactggacccagagtggcgcccttcctacagcatcactcacataccgaagcggagtggcgggaccagacaactgcaagtcccgtgccagaccactcgacagatccaggtggctctatataggaaactgttcgctcggtatgaaactcaccctaaggcgtgtggatttatttccgggaagagtatcgtggataatgctaaaccccacgtaggcaacgatgttatagtgaagcttgacatcaaagaattcttcccatctacatcccgcagacggatccttaattactttcgcactactgggtggaccaacaaggcgagcattttgttgacacagctgttgtgttatgagcaggggcttcctcaaggagcacccaccagccccgtgatttcaaatatcgtaaacaaatccatggaccgacgacttgactccctggccaatgagttcaatgcctcctacacgagatacgccgacgatataaccttcagcatggctgtgtatcacagagataaggttcatgcactcctgcaaagcaccggggcaattctgcggacatatggttacaagctgaacaacaagaagaagaggattatccggggtcacagacgccaggaagttacaggcctcgtggtgaatgacgtcgtgaacttacccagaagcaggaggcgctggctgcgttctgtacagcatcgcatctctaccgggatgcacacctcaatcaccccatcgcagtaccagggatggatcagtttgctgcagatggtgagtcccgactcacccattattgcacggcataaagagctgttggccgccggtatgctgaagtcaaacggtaagtcagggatcaaggaaacaggcggccacgaagaatctgtcttagatgagacaaccgatagaatttccgcagccaattctaattcgcctcagacagacattgccgactctctcaatgagtctgagtcaacgagcatagtgtccagcgacgggggcagcgaatcagagagcctgagcgaaacacctctgaaagaggttacacaggagctggagctagaaagtcaacatgcagtcgggggaagtgctgatgagttatttcacgaaacgaggctgacggataaaatatacgcccttaaagaggttcgtccttatagcgaccaggcgaaacaactgcaggaggagtttaagggctcccagcatactacctccgtgatcctcgagagtcttaagaggtccttcagcttcaagctgccagaaggctaccaaaaaggaaggactctgtctggcttactaccggatggcaccgagatcgagctctatactaccgacatttctgccgaactgtttgatcaggtggacctgccaatccagggagatgccgtgattgaagtcatacagtggaacaacacatttaagcgcgtggaggctattctcctcgacggattgatgtga

SEQ ID NO: 13995 - RNA, 1722 nt, synthetic construct
  source 1..1722: mol_type = other RNA
atggtgtcttctcctaataccgtgagtggggtagataggctgtcggagatgttgggcatgagcgtgcaggagctggaaaatttctctccgcagtataagcatgccgtgataaaaaaaagaagcgggggcaaccgactgctccagatgccaaatgacgagacaaaacgagtgcaaaggctgctgctggataaattgatcggtaggtacaaaacccacgctagctgttgcggcttctcaaaggggctttccattatcgacaacgctcgtccccacgtgggtcgcgagacagtcattaagctagacatccaggatttcttcccaaataccaccgtcgacaggatccatgaattcttctgtaaaacgggatggacggatgatgccgcagacgtgttgactaagctcgtcgtttttgacgagggactgcctcaaggagcccccacatcacccgcagtgagcaatgttgtcaattgttttatggatctgaggttggacgcactcgcgaaaaagtacgggatgacctacacaaggtatgctgatgacttaactttctccagcgagatatattccaggcgcgacgtccataagattttacgcatcacgggcgttatcttgaagtcctgcggatattctctaaacaagaagaagaagcggattatcagaaaacacaggagacagagtgtgacagggatcgttgtaaatgagcggctgaatatcgcccggcctacacgcagactcctaagatcggtgcaccaccgtcttgaaagcggtggaaattctaccctctccgagaatgaatttaacggctggattagttacctgcacatggtaaaccccaaggatcccttggtcacttccgtgttcggcgagagtgacagcgataaatctaagcgcagaagaagccctaagtacgtcaaacagaacgcctcacagtctgcgtcatcaaattccggccagttcaaccctattgcggatatttctttcaggccaatcaatcggggtgacgttagtaccttgtcccagctgggcctgtcacccaccagcaacgcggtgactcccagcgagtattttagcgcacaactgttttacaacttcggtaaaaacgttaatgtcgtagcccgtcggagaaacctcaaacgcaagacagtgtggaagcatttagctcacgcagtggaacactccctggtcgcctgtcatgatctcatcagtaaggaagacttaagccagcttctatctcagctcaaacagcacagcccaactgccatcccttcagtcggggatgcctataggatgtgcatgggccaaattgactacggacgaattagagttggccttgccgaatgccgacgcagaaagcggaagctccaatccgaccgggggaacgaaattatcacgaaactgaacaacttttccagtacacgcgaggaggccgtactgaaaaccgtttttgggaagcggctcaattgttcgtgcgctgtggaaagtgtgtctataactgcaaacgctgaccttccaccggactacacagagggtcggacagtgcatgctactcttccggaggacccatcaataagcctcaccctgtttacccctgctgcccagaatgataacgtggactcactgtcctctgctcaaaacgtgtttgtgcgtggagcaatccagggcatggatgatgcctccggatgcatagaactgctgactgaagagcttcagctgcgaacctga

SEQ ID NO: 13996 - RNA, 1677 nt, synthetic construct
  source 1..1677: mol_type = other RNA
atgagcccactgtttgtcgcagacaaccctaggcggatcgcaggtagtctgctaatcatctgtcacgccacagcgattattgactccgggggcggagagtatatggacgaatttctggaagcactgttctctctgcagattgtgtcacttataacggtactgctgatcatactgttctttttccgcaaaaagaactccgacgcaaccagagggagttatcgcacacagcgatcccgtaagacacgcgagcagagaaggcggaagttgaccgttcgggacctggggatgaagctggagatgtccaaatcagaactggtgcgacataacgtgcagtacgagacaacaactatccctaagcggagtggtggcaagcggatcctgcacgtccctgacagagccagcaaacacctccagaggactctgcttaaacaattaatagagagactgccgatccatgatgatgttcacggtttccgaaaaggacggagcatcgtcgataacgccgctgaacatattggccaagaggtgattgtcaagctggacattgtcgatttcttccctgccaccaattctgaaagagttgaaagcgcttttaaaggcgccggctttgataagtcttccgctaagttgctcacacgcctcacctgctatgaaggtgggttgccccaaggagcgcccacctctcctgctctaagcaactacgtgaataaaaacatggatgtgaagctggcggatgccgctttgaggcgatcagccaggtatacccggtatgcagatgacattactttctcatttccagagtattccagggagaagatacacgagctactgatctcaacaggcaagattttgcagtattacgggtaccgcctgaacgaccgtaaaaagcggattattagacagcaccgccagcagcttgtgacgggattagtggtgaacgaaagggtgaacctgccccggaagacacgaagatggctcagggctgttaaacataggatggaaactgggggggaagcaactctaacagcagctgagttccgaggctggctgtcacttttaaaaatggtcgatccagcggcaccccttctgaacttcctagatgggctcaactcgcgtgaggagattatcgataagccgctgcccaaaaatggcgacctgaagaagttagtcggacggcaaagccagaatgtcaaaaccgtggagatccccgtgactacccctggatccgatatcgccgacgacgctttgaccgacaatgcccagcaggaaacccttcgcgattcggaggtcgtgaatgcacgcaatgcaaatactggagtagagaatgtatctctcgtagcgatggtggaggccctcaaccagaccgacaactacacggagagcaggaaaactgccgaactccagctggccggcaaagagtacttgcttgagatctccgccaccagcgttggcagaacttttagttttagcctcccagtagcctaccagaatggccaaacgctcagagctacactgcgcaatgaaggactcgctctcgaattatactgcgacgagcaggtgggttctgaactggcctctatacagttcccaaaaaatttgaaggtccttgttagggttgtgcagtggaacgctatctttaagcgtatcgaggccgtggtgctccaagccagtagatga

SEQ ID NO: 13997 - RNA, 966 nt, synthetic construct
  source 1..966: mol_type = other RNA
atgagtcgactgcagagggctaatgcagaccgtaaacgggaaaggccgaagctcaccctggctgacttagtggctagactagggatgtcaaaggcggatctggtagagcacgaagtccaataccgcgcaacaactataccaaaacggtccgggggaaagcgagtgttgcacgttccagataggttgacaaaaaccctccagagaaagctgctctatcagatcattggccgacttcccctccacgacaacgtgcatggtttccgaaagggacattccattgtggacaatgccgcaaatcacacgggccaggaggtgatcctgaaactggacattgtggattttttcccctcaacttcatccaagcgcatcgcgggggcatttgaaggggcaggcttcgataagagcacagccgtcctgctcaccgggttcacttgctgggagggaggcctgcctcaaggagcacctacaagtccagccctgtctaattacgtgaacaagaatatggacaagaaacttgctgccgctgcttctggcagaggtgccagatacacccggtatgccgatgacatcaccttcagttttcagaggtactcgcgtgacaacattcaccagctgctgatatctactggaaaaatcctgcagtattatggttacaggctaaacaacaagaagaaacgcatcattaggcggcacagacagcaactggtaacaggactggttgtcaatgatcgggtcaacttgcctagaaagacccgcagatggcttcgttccgttaaacatcgcatggaaactggcggccaagccacgttaagctcagccgagtttcatgggtggctcgccttacttcggatggtcgatcccgactctgctttgctcgagtttgtggacgttcagaatgcgaacaaaaagaatatggccaggagccgcatgaaagattccaacagccagagcgtggtggccggctga

SEQ ID NO: 13998 - RNA, 1554 nt, synthetic construct
  source 1..1554: mol_type = other RNA
atgctggactccataggcgaggtactgttcagtcccttggtggtgaccgccatcatcgtcctcgtgttgatcctccgatgtttcaaagggcgtggtggacggagggaacttagtattggcgacctggccgataggttgaagatgtccaaaaccaatcttgtgcaacacgacgcccagtatcggaccgcaacaattccaaagagatccggcggcaagcgaattctccacgtgccagatgacgccacaaaacaactacagagaaagctgctgcagcaactcatcgaaaggctagctatccacgattgcgtgcacggatttcgcaagggccactctattgtagacaacgccgcggagcacactggtcaggccgtgattgtaaaactggacatcatcgatttcttcccttccacgaactctgaccgggttaagaatgctttcagaggggctggatttaataaaagcgctgccacccttcttactggattgacatgtcatgagggagggctgccgcaaggagctccatcgtctcctgcactgagcaactacgtgaacaagaatatggacgagaagctcgctgaagcagcaaataaaaggggagccgtgtacacacgctatgccgatgatatcaccttttcgtttgtgacttattctcgccacaatattcataacctcctgatagccaccggaaagattctaagacattacgggtatcgtctgaacaacaaaaagaagcggataatcaggcagcaccgtcagcagctggttacaggcctggtggtgaacgaaagggtgaacctgcctaggaagaccaggcgatggctgagagcagttaagcatcggatggagactgggggtgaagctacactcactaattcagagttccgaggttggctcagcctgctcaagatggtcgatggggactctcccctcctgacttttcttgacagccccaaacctaaggctgaagaaagcgtcacgagaacccgccatattggcgacaatatctccgatagcgacggccattcatcactatccgattcagactctagtgtggtccatcagggtaaatctgccaccgaaggggaatccttgccaaccaatacgccaccggagacaccccccgttgtagcttcaggcactatactgcctactgacggcagacggcagttcttacgattagcgcggctgggcgccgatgggaatttagcactgctgcagttagtcgaggccttgaaccaaaccgaaaaatactccaccaaccgcaacgaggcggagaaagacctggttggctcagagtacttaatcgatattagcgtcagctctatcgggcggacgttcagcttcagtctccccgaagattatcaggatggtcagaccctgaaaggaacactgcgcgacggaggcttgtccctggagttgtactgcgataaacttgtgggcagcgagcttgcggggcttagttttcctacacgcctgaaggtcctcataagagtcgtgcagtggaatagtatttttaagaggctcgaggcaatcgttctacacacaactctgtga

SEQ ID NO: 13999 - RNA, 987 nt, synthetic construct
  source 1..987: mol_type = other RNA
atggttaggaggcccggcggtctggaactggcagagaaccagctggaagtgacagagcctgctaggggcgtacgtcatcttcagggtggtcgcggcacagggagatgctcttttctgtcaactagcacgcgattcgctgtcggtctattcgattggtttcgcaaacgcaaggatgaaggactcgatactggggaactggccagacgactaggcgtgtccgaaagcgatctcgactgtagtcctaggtacaacgtgcgaaccattcccaagaggaacggcggacggcgcaggatagctgaaccatctagagagttgaaacagctgcagagagttatactgcggcggctcctgagccgtcttaaggcacacccggcagcacacggctttgagaaagggagatccgccgtgacccatagcgccaaccactgtggcaagaaactgatcgtggtactggacatcgaagacttcttcagaaacaccaccgagcgccgagtgcgcgattactttaggtctatcggatggaatgagaaggcctcagagctactcacccgcctgaccacttttgaggggggacttccacaaggggccccaacatctcctcggctctcgaacttggttaattataccatggacctgaggttatccagattctgcgacatgcggagcattacatattccagatacgccgatgacttgtgcttctccactgatgacgaaagttggaccggccaactccttcgtactgtccctgagatcttgtcagacttcggctaccgcgtgaatcgggccaagacgcggttcttacgagcgcaccagcgacaactggtcacggggctggtcgtgaatgagaaagtcaatctccccaggtcaacacgccggtggcttagggctgtggaacatagaatgttattgggaggaactcccacaattagtgagcagcagtttcgggggtggctggcgtatcggcagatggttgagcgtagatga

SEQ ID NO: 14000 - RNA, 924 nt, synthetic construct
  source 1..924: mol_type = other RNA
atgtcgatcctagactgggtgtcagggctgttaggcacagggagctcaggtacaggcgattccagaaggaatgaggggaatgacctgcgggaactcgctagacggttaggtgtttccgttgaggaactgacctcaattcgacctgcctatagagagatccgggtgaagaagcgatctggtggcactcggttgctcttggaaccatcccctgagcttaagaagattcagaggtgcatcttgcataaacttctgaagaggctcagtagtcacgaatccgtccacggctttgagagcggccgctctatagtgacgaacgctcagcagcacgcaaataaagatctggtcatctgcgtcgacctgaaggactttttccagaagacacaggtgaggcgcattcgcgagtatttcacattcataggctggaacaccgacgccgccgacatgctgatgcatttgactgcctggaatggaggactgccccaaggtgcgccaaccagcccaaggcttgccaacctggtgaaccatgctctggatgcaagactagagggactggccaagcatcatggaggaacgtacacccgctacgcagacgaccttacatttagcttccccacccggaaggaactccccaaaaaagagactggaacttttctggagatggtgagccggattgtcaaagagaacgggtatagtatgcacggcaaagaaaagctgcgcgtgatgacctacgcgcgttgtcagtccgtaactgggctcgtagtgaaccagaaggttgatctgccgaggaggaccagaaaatggcttagagctgtggaacaccaccgggtcaccggcaaacctgcaacactctctgatgaacagttaaatgggtggcgaagtctccgtcaaatgatcatcgatcaaagacgcgagcgatctcgttga

SEQ ID NO: 14001 - RNA, 981 nt, synthetic construct
  source 1..981: mol_type = other RNA
atgggcttctgggactggctgcggcagttgctccaaggtcctggcccgcaggaacgtaagccagatctcacaccaccagtggacggaaaaaagctggaagaattggcgaagcggctggacttttcagtggatcagcttcatgcggtccaggtttcctatcggcaattctcgattcccaagagaagtgggaacggttttcggacaatttccgtgcccaaccccgagctgaaagaaatgcagaggaggatcctgagacgcctgctcgggaggctgcagactcaccctgcagcaatgggctttgagcccggccaaagcatcgctacgaatgcagcttaccacgtgggggctgacgtggtcgtcagaatggacataagagatttctttggagctaccgtgactaacagagtacgtgcgtacttctatggaattgactggggcaaggaagccaccgatgtcttagttcggctgtgtacctatgagcgcgggcttccccaaggtgccccaacatcacctaggctcagtaatctcgttaacttcgaactagatgcacgattggacggttacgcccagaagatcggagcccgctacaccaggtacgccgacgatatcacattttctttcaattttgccgagatcaagcagacgctaaccggccagaattccaaaatacttgagcacataaaggataagagcaaaagctcttacgtaatccatcagactatcaggatgaccaaacgcattctgttcgagtacggctatcagatccacacaaaacgcaagcttaacattagacgaaagcaccagtgccagaaagtgaccggactggttgtgaaccataaagtcgccctgccgagaaagactcgaaggcgtttgcgggccgtggagcatcacttagctaatgaccgccctgcaaccctgactcatgagcagctcgctgggtggaaagccttacagtatatgattgagacacaaactaagtga

SEQ ID NO: 14002 - RNA, 981 nt, synthetic construct
  source 1..981: mol_type = other RNA
atgggcttttttgattttctgaagaggctgttctccagcgaaccggagcgaagagcaccccggttagtagcccctgaaccagggctaggccctgatgaactcgctaggcggctgggactgtccgtgcagcaactggagagtaccccttgtgactaccacgagttcgctattcgcaagcgctcaggaggtactaggcagattaccgccccaaatagacagctgaagactgtccagcgcaaaatcctcaagcgcctcctcggcagactctgttgccacccttgtgctacggggttcgaaaaacggcactcaatcgtgaccaatgctgccgtgcatgttggagcagacgccgttctgagaatggatatgatcgccttttttcgaatgacaactgcagagaggatccgtggctacttctatgggatcggatggggcaaggaggcgacagacctactcataaggctgtgcacacacaacggtgcgcttccccaaggcgccccaacttctccgcgtctgtccaacttggtcaacattgaaatggatacccggctggcatgctgggcgcgaaaaattggtgccgcatacacacgctatgcggatgacgttactttcagttttccagacttagatgcttctgctcctgggcccgccttcgaccaaaaccccaagaccctggaaagcattagacgggatgaaggcgacgccttgatcaccagcacaataagaatgaccaaaaaagtcctgggggagtatgggtacgagcttcacaataagcggaaactgaacatacgaaggcggcatcaacagcagcgagtgtgcggccttgtggtgaatgagaaggtagcattgccccgcaggacacgtaggtggttaagagctgtgcgccatcaccatgccacgggaagacgggccacccttactgcacagcagttggctggatgggacgccctggagcatatgatcgctctccaggccgaggaatga

SEQ ID NO: 14003 - RNA, 981 nt, synthetic construct
  source 1..981: mol_type = other RNA
atgggcctgttcgatcgaataaagagtatgctgggcgggggagccaaagcctctgttaataccgacagatggaatttggatgaactcgcacgtaggctggacatcacccctgatgaacttcaaaacatcaagcccatctataacaagtttaccattccaaagcggtctggtggtaaaaggacaatcctcgctccagctcccgagcttaagcagctgcagcgccggatcctgagacggctgttagctcgcttgcgcacgcacccctgtgcaatgggattcgagaagggccgatcaatcgtgacgaacgcccgcccacatgttcaagccgatgtagtgatccggatggatatacgggacttttttgggaaaacttcggcacagagggtgaacgcgttttggcggtttattggatgggacaagccttgtgcagatatattgaccagactgtgcactcatgacggcgcgctacctcagggagcacccacatctccgagactttcaaacctcgtaaactatgggctggatgcccgactggaaaagtggggtcagcccatcggagctatatacacgcgatacgccgacgatatggtcttctccttctcaagagtgaccatttccaatatgccagcctttaagaattggtccagattctatgacagtccaactgaggccctagacgacttcctccgcaaagcagtcaccagcactattagggtgaccaaaaagattttgaaggattacggctacaaaattcaccatcacaagaaactgagcattaggagaaagcaccagtgccagaaagtgacaggcttagtcgttaatgaaaaaatcgctctgccgcgtcagacaaggcgctggcttagggccgtcgagcactatcatactgctgggaaacccagcactctcacacctcagcagctccaagggtggcgtgctctgcggaatatggtggagcaacagcctgccaccgacttcacatga

SEQ ID NO: 14004 - RNA, 5727 nt, synthetic construct
  source 1..5727: mol_type = other RNA
atgggaatcctggacctcctgtttcaaattggggacagacccgggcacctagacattagcgaattggctagacgcctcgacatgtctgtgaaggccctgagggaaacaccgctcgagtataaacgttttcggatcgctaagaggtctggtgggaagcggactattaaagctcccaaccccaacctgaaagccgtccaacggcgcatcctgagacggctgctcgcaaagctgactgcgcatccagccgcgaccggatttgagaggggagaatcgattgcgacaaatgctgttaggcacacaggatgtgaagccgtgctgcggctagatatcattgacttcttccataacaccacggttcagaggattcggcgctgtttccaccgcatcggttggaataggaatgctgccaatcttctggtcagattgtgcacccttgacggcggtcttccccagggagcacctacttctccgagactgtccaatctggtgaactatccaatagacattagactgaacgcttgggccgagaagaataatgtcaactattctcggtacgcagatgacattacgtttagtttcgagcgcgagacagaagacgatataggcaccgctattcgactgacccgcactgtgactaaggaatatggttaccgaattcacagagacagaaaactgtccatccggcgtaaacatcaaagacagatggttacaggactggtcgtgaatcagggagtggctctgcctcggaagactcgtagatggttacgcgcggtggagcataggttagataccgggcagaccgcttccctatcaaaggagcagttggctggatggagggcgcttgaaagaatgatcgatctacaagctggccgccgcgctaaaacacatcgtgatagccccactgccagacccccgaagaagagagctcctgagacggatgacatggttagagcccagctgcaactggcccgtgaacagctgctggatcttaccatgagaaacagacttttgaacttccaacgcaccaggaggacgaccattcggataatcgatgagctgccaggtcaattatgggagttgtttgtggagaagcagaagaaactggcatttctggctgcggaggaacatgagctctttcaggccgctggagatgacctgccaccgaccgatgagccaggcgaagaggagccggacgaagatgcaatcccaggcgatctcgcaaagcttttccatcagccccgtcccgaaaccgcacttgaggacggccagaccgaactgccagcacgctacaccgacctgttccttcagacagacctcagagacgaggacttacagatcaacctcctgcgtatcgaccagcagagccactccgctctggaagagcggggcgtcaacctcctgtttctcgcaatgggattcctggaatggcgtccggatgatgatgagccaaaaacccggcgagctcctttagtgctcgtccctgcgggtctggagagggcatcagcacggagaaggtttaagctgagggctcttgatgatgatccaatattaaacccgtgcctcgtgcaaaagctgcgagagatgggcattggcctccccgcagagcctcagagctgggtagatttcgatacagagacatttttgcgggacgtgggcaaggcagtagctgagatgccggggtggcaggtgcacgaggacgtctacctgggcttcttctccttcacaaagtatctgatgtatctggacttggatcccgctaactggcctgaagggcggagactcttggagaatcgaatattgcgcaccgtttgtggtgatgctgaatccattgaacagatgggatcttggcccgatgtggcatctgaagaccgggagcgggacccagccgaaacttaccaggttttgaacgccgattcttcacagcagaaggctatattagcagcccgagaggggcgcagtatcgtcattgaaggcccgcccggcacaggtaagagccagacaatcactaacatcatcgcagaatgtctggccgccgaaaaaagggtcctcttcgtgtccgaaaaaatggccgctctggaggtggtgaaacggcgcctcgatgcaaccggacttggggacttttgcttagaattgcactccactaaggctaatagaaggaacttggctaccgagcttgggagagtccttgacaagggacgaagaacagctagggacgagatgggagacggcgagaggctccgcttgctcaagcggagaattagcgctgttgcggccgcagtgcatgaccgacacgaccctttaggtatgagtccctacgaggccgtcggaaggttttccttactagccgacgttcctgattgtttctgtgacattcctggctggcaggactgggatcgaggccagctagaagaaatgaaggggaggctcgatcgtctggggaggcaggaacaaaatgtgggccctagagaagatcacccttggagaggcgtacggcggacacacgtgagctctcaagaccggagggatgccgagaggcattgcactcgcttggccggcatgctagcggatctgccacgcttcttaaaagcggtagccgacgatatccagacgccagtcccaggctccctggacgatgcctcaaaggctctggaggctgccaggcttgttgcggacagtcctggacccccccgtcgtcttctgcttgggagcgaatgggagggcgatagaccagatcgaaaagcattcctcggcctggccactgagtttttcgagggccaggattggatggctacgaggtaccgcgaaggcgctctcaacggagtcaactgggagggcatgcacagacgctgcctgagatattgggccagtcctctgagatggtttcgtcctcaatactggagtgaccgaggcctactaaagggctttcgagagtcttcgtatcgaccagactttgccgcccaggccgcggatctgaaaaggctggccgatctagcaaagctcaagatggagattgactcacgtcgcgaagatgggatccggtattttgacgaggcttggcaggggtctgcctctgcttggggcaggttgagcgcaatggccgattggttaacgagattcagaacactccacagggatggttggctcggtgacaaggctgtgacaaccgccagttacgctggtgaccacgcagcaacagccaagaaagccagagccctcggggagaaactcgatgcgtttcactctggactggatgagctcaatgggctcttggacctgagcgcagatgagatgttcgatgtgcccgttttgcaggtagatttcgacgtgatagagtcgagatttaaacggatggctgcagccggtgaagaactggtggtgtggacccagtatcaggaggccctccagcagtgtgaagattccccactgaaaagcttcctcgagtcagccatggaggatgatagacccatggattcctctgtgaggcctctggcaatcgagaaacagttccttcgcctgtggatcgaggattgttttgagcgccgagaagagctgcgccagttcaactgcggggatcatgaggccgccattctggattttgccaagctggacgttgactggatccggcaatcacggcaacgcctgcatggcaggctgagttcacgaaggccagacgggagaatgcaggcggcaccctccagccaaatgggaatcgtgcagagtgaagtgcgccgcaaacgtggaggccggccaataaggaaacttctggccgatgcagcagacgtgatccccagacttaagccctgctttatgatgtcccccctgtcggtggcccagttccttgacccagccggtatagacttcgacgtcgtgatcttcgacgaagcaagtcaggttgagcccgccgatgccttaggcgctattgcccgcggacgccaactgattctggtcggggatccaaaccaactccctcctacctcctttttccacagcgggcctgctcctcggtcatcagcagacgctgaggacgccgtcggactagtggatatggaatctatcttggatcggtgtgccgttgtcttgagcaactgccggctgcgctggcattatagaagtcggcacgagagtctgatcgccttcagcaatcgcgaattttacgactcgcggctagttgtgtttccgagttgccacaccggcgatgctgaactcggtttgaaaactatttttcaccctcaggaccggtacgggcgaggtaaaggccagaccaatagggagcaggcagcacgcgtgacggattttgtgttcgaacacgccaggaggagaagggacgtgtctctgggagtgggggccttctctagacgacagcagcaagctattctagacgaaatcgaaaagcggagaatcgaagataactccctcgaggcctttttcgacagaaatcgccccgagccattcttcgtcaaaaatttagagacaatccagggtgatgagcgtgacgtgatcctgctgtccgttggctatggacgaagcaggccagccgagcgccttagcatgaattttggacctctgaatcaggctggaggctggagacgactgaacgtgctcattactcgcgctcgcaggcagtgtgtggtcttttcatccattttaggcgaggacttcgacttgtcagcgacacaagcccggggggtacatgctttgaaaggctaccttgacttcgcccgtgacgggatgttgcccccaaccgtagatgaagccgaagaggactcatctgccctggagagggccatctataatgccctggtagccgcggggcatactgtatgccggcgagtagggtgcggcgcagatgcaatagatcttgccatcgaagatccactccggcccggaaggtacctgcttggcatcgagtgcgacggcgccaagtatagagacaccgttactgcccgcgacagagatcgactcaggcagcaggtgcttgagggatacggatggcgtatacacagggtatggagcgcagcttggttcctcagtcccaggaaggaaatggaaaggctgaccgccgtaattgccgctgccagagctggtactctccaggcacgatttctacctatcgcgtccgcagcgactcaggagattgacgatgagatggaccttatccccgccgacgacagcagtcctattcccgttaaagcatatcgccgataccggccaagacgtaggcggtcctctgaacggttttacacggacagcctgacagaactcgccgcccttgtgaccgaggtggtcgaggtcgaaggtccagtgcatgaggaccaggtcagccggaggatgctggacatctacagattttcccgagggggctctcgcatagacgagaagatttcaagcgccgtccgggttgctgtctacggtgggaagattaatcggcgaggagacttcttgtggcccgcggacatggaaacacctcctctgcggcgacgcgacgatgacgatatcagagatatcgacctgatctgtcacgccgagatacgtcgcgccctgcggttgttactggaaacacaatttggcatgtctcgcaacgacctgactacccaagctgcgaggctgttcgggttccaggtgagcggatcccggataagggacaggatcgggcaggcaatccagggcctcttggaaagcggtaaagtggcagagtcaggggcaattctcaatgtgagctcccaatga

SEQ ID NO: 14005 - RNA, 960 nt, synthetic construct
  source 1..960: mol_type = other RNA
atgggtttgttcgattggatcaagaggcttctgggtattgccccaaaaccaaaaaatatgttcgtggaggtggactttcggggcaggcctcagcgccaatctaccccagagaagcccctgggcgacttaatggaactaagcaggagactggccaaaccggtcactgacatgcaactgacgcccgtcagatatgacaagtttactattcccaagcgatccggcggacagcggcagattatggctccttgcccgaagctgaaggagatgcagtctcgaatccttcatagacttttggggggacttcgcgcccataggtccgcaatgggctttgaacgtgacagaagcatcgtgacaaacgctctgccccacgtgggtgctgccgtgatcgttagaatggatatacgggacttctttccttcgacagatgccgctagggtacacgcctatttccggggcatcggttgggataccgaagtggtggacctgctggtcaaactgacaaccctcgatggaggcttgccccaaggagcccctacctcaccccggttgagtaacttactcaactatctgatggacgcacgtctggacgggctcgccagatcacaagggggcgtgtacacacgctacgcggatgatatgactttcagttttcctacggataagggcaatcacaaaaccgctatagttagcgcgaccaaggatatcgttggggaatacggataccgactccacttgagacggaaactctccattcgtaggagccaccagcagcaactagtcactggactggtagtcaatgagaagccagcccttcctaggaagctgcgccgaaagctgcgcgcaattaggcatcggctggagacacaggggcaggcaactctcaccgaacagcagttagctgggtgggacgcactcacccagatgatcgagacacagcgcactccaaaaaacaaacagtga

SEQ ID NO: 14006 - RNA, 930 nt, synthetic construct
  source 1..930: mol_type = other RNA
atggggctaggcgatttttttcggcgactgttctcagtctccaacgacgaaatgttcgcgcaggatttattgccatctcagggctccagggatgtgagcagcaagggtaaattaggagtgaacgagctcgctcgtcgcctcggcatcagcgtcgagcagttacaggccgtcccgatcgcttattccgagtttacgatacccaaacgctccgggggcaaacggaccattcttgcccccagggacgagctaaaaagtctgcaaaggaagatcctgcgaagactgttgggacggcttcggtgtcattctgcagccacaggcttccaacgtgggcagtctattgtaaccaatgctagaccacatatcggcgctgcagtgctgttgaagatggacatcaaggaattctttcccagtacaactgccgaccgtttgaaaaagtacttcaagtacattgggtgggataagcaggcctgtaaactgctgctggagtggaccacccataaaggtgcacttccccagggagcacctacgtcgcctaggctttcaaatctcgtgaatttcgctatggacgctcgcctcgcagggcttgctaagaaatttaacgctgcgtataccaggtacgccgacgacatgactttcagctttgctacagatgatcgccagtctatctatggcgccatagcctcaactaaaaagattgtgggtcaatgcggatacaagttgcaccagaagaggaagctgagactggccagaaagcaccagcggcagtgcgttaccgggctggttgtaaacgagaagctggcactgccacgccgcactagacggtggctcagagccgtggaacaccgactggcaacaggcggacaagccagtctcagccctgcccaactcgccggatggaaagcactgcaggcgatgattgaatcatcctga

SEQ ID NO: 14007 - RNA, 936 nt, synthetic construct
  source 1..936: mol_type = other RNA
atggggctctgggacgcactacggtccctgctcggtttcaatgctcgtcgaccggctagacccgatcctgggctccctgcaactagggcgatggcagagccaggtagggacaccgggcagttagctcaacgcctcggcgtaccgctcggatacctggaaaccattcaaccccagtacaggacatttactatcccaaagtggtccggcgccccacgcactatactagcaccccaggacgacctgaaacagctgcagagaaccattctgcggcgcctgctgggaagactggcctcacatcgcgccgtgacaggctttgagagggggcacagcatagtgacgaacgctcgagtccacattggcgcggccgtggtcatccgcatggatctgaaggattttttccccaccactaaagccgccagggttggagagtatttcagattgataggttggaatgatgaagctgcagccttgttgatgcgcctttgtacccatgggggctctctgccacagggagctcctaccagcccccgtctctcaaatttggttaactatcgaatggacgcccgcttggctgcactcgccgctaaacttggcgccgcctatacaaggtatgccgatgacattaccttcagtttaggtcaggactgcagatggcttgctgccgctgcaatccggggcactaaggcgatcgtagcagactacggatacacgctgcaccagaagcggaagctgattatccggagaaggcaccaatcgcaacgggtgactgggcttgtcgtgaacgagcgggtggctcttcctcgttctacgcgaagaaggttacgagccatcagacactgcctagatacaggcagacctgccacactgacagccagtcagctggctggatgggatgcgctggagcatatgatcaggacccagtcccggagcgaatga

SEQ ID NO: 14008 - RNA, 1113 nt, synthetic construct
  source 1..1113: mol_type = other RNA
atgggctttttcaaagacctgggcaagaaattggaggaagctcgccggctggccgaggagttgcaacagcaggcccaggaacaggcccagaagctgggtcagcaagccggcgtgcccattcctggtgctccagcacaaccccctgggacaggggctcctggtcaaccagcctggggaggacagcctgctcaagaagcaaggggtggagccgctcccgcaccaactatggcaccaggcgagagagaacctgcgcggaggagtcctccaccagccagatttgggccagatgagcttgctcgacgcctgggaacgaccgtcgatgccctaagggcagtacagccggactacacagctttcagcatccctaagcgttcaggagggcagagacggattctggctccggaccctgtgctgaaaagcctgcagcgacaggtgctccggcgagtgttgggacgtctgcgagcacatcccgccgcaatgggattcgagcgaggacggtcaatcgttacacacgctagagggcatagtggtcgcgcggtagtggtccatatggatattcaggactttttcccctctacaagggcagtaacggtgcgtgaatatttcaggcagcttggctgggacgacgcggcagttgacctgctggccaagctcaccgtgtgggaaggctctcttccgcaaggggccccaacttcccctaggctcgcgaacctggttaatcggaggctcgatgcccgcttagccggcaaagcagcccgcttaggcgctacctatacaaggtacgcggatgacataacattttcctttcccaccgccgatcccaaggcagtgatagacgccatcaggttgacccgggatactgtggcccgcgagggatatgctctccacctccgccggaagctccacgtcaggaaacagcatcagagacagctggtcaccggcctggtcgtgaacagaggggtgggcttaccccgtgagagacgcagatggttgcgggccgttgagcaccacctgtccactgggaagccagcaactcttacccaggcccaacttgctggctggtacgccctagctcacatgatcgaaacccagagaaatgctccccccagctga

SEQ ID NO: 14009 - RNA, 969 nt, synthetic construct
  source 1..969: mol_type = other RNA
atgggcctgggagatatcctgcgacgcatctttctcggcaaggatgcatcccccgcgtctccgagagcacacgtgaacccctacgcccacagaccagacagcatttctgacgtacctgtgcgggatcagccatccagggacctgcatgagttgagtcagagattgggcatggacgccggggaacttgccgcatgccctatcgagtattctgtgtttcgtatcccaaaacgttccggtggtaccagagagatatcagccccttctgcgagtctgaaaaccttccagaggatcgttctgcgccggctgttagcccgactgaaggtgcaccctgctgctgaaggcttcgaaagaggacgtagcattgtgacaaatgcacggcggcacgtgggtcggtcagtcgttctccacatggacattcaagatttcttcggcagaaccactgagaggagagttagggactattttagaggcatcggatgggataagcaagcagccgcgctcctgacccgcctatgtacgcatgggggcgcattacctcagggggctccgacaagcccaagactaagtaacctggtcaattacgtcctcgacacgcgacttcacgctcttgctgctcggatgggggcagcctatactaggtatgccgacgatttgacattctcctttgaggctgaccgccccggagccgtaggatcagtcatccgggccgccaaggggattatagatgagtacgggtaccgccttcatactcgaaggaagctgcacgtgcgccgcgaacatgaccggcaggtggtgaccggcctggtcgtaaaccgtaaagtgcagctgcccaggccaacaaggagacgattgcgggccgttaggcaccatctcgccactgaccgcacagcgacccttactcccgctcagctcgccggatgggatgctctgcagtcgatgattaggacccaagctgatgccgcaagctga

SEQ ID NO: 14010 - RNA, 996 nt, synthetic construct
  source 1..996: mol_type = other RNA
atgggtctttggcagataattcgcggcctgcttggaagcagtgaggccaacccatatagggcagctggcgcacctgatggtcctgtgggtcgagggtcagctgccgctgctccatctcctcctaaacgcagccgtcgcagaccccctaaattttttctagctgatctcgctctgcggctcggccgtgacagtaatgccctcagccagatcgccgtggaatatgaaaccttcagcatagcaaaacgttctggaggccggcgaacaatccatgcaccccagccggggctgaaggccttacaacgggatattctgcggaaggttctgggtggcctcaaggcccatccggccgttaatggatttaggcgggggcgctctattgtcacgaacgctctgccccatgtcggacactcggtcttagtaagactggacatccgagacttcttcccttccacgacagcgcgcagggtggaggagtattttaggttcatcggctacgacgattcttccgccgccctcctgacccggatctgtactcaccaaggggcccttccccaaggggcaccaacttcaccttgcctcagtaacctgctgaattatcgattggacgccaggttaagcgcactggccgcgaaaatgggcgccacctacacacggtacgccgatgacatggcattctccttctctgagccagcagatgctgctagagtgaacatgctggtcagtgccgctcagttggtgctatcaggatttggctaccgaactcatcaccgcaggaaaaggtccgttagacggagacacatggcgcagtgcgtgactgggatcgtggttaacgacaaggctaatctcccaagagcgacccgcagaagattgagggcagtcaggcaccatttgatgacaggaaaggaagcgagccttaccgccgcacaacttgccggatgggacgctctgcagcacatgattaaggtgcagtcagtaccaccctccgtgccccagtga

SEQ ID NO: 14011 - RNA, 918 nt, synthetic construct
  source 1..918: mol_type = other RNA
atgggcttgggggaatggattgggagacttttcggcgggaagtctcaagaccgtgggggttccgtggctccagggagactggtcttggtggaactctcagcacggttgggcgtgagcgtcgccgagttacaggcagctcgagtcgagtatgctcaattcaccgttcccaaacgtagaggcggtcagcgaaagatcagtgctcctagcgatgggctcaaaaccctgcagagaaggattctgtaccggctccttggacggctgaagagccatcctaccgttcaaggctttgaaaggggaagatccatcgtaactaacgccgtgccacatgtgggtcgcgcagtcgtgctgcgtatggacattcgcgacttctttccaacgactacagcgaaacgggtggagatgtatttccggaggacggggtgggacgctgaatctgccgctctactgaccaggctctgcacacacgaaggcggactgccccaaggtgctcctacgtcaccgcgacttagtaatctggtgaaccaccccatggacgctcgcttagaggccttggccgcgacagccggagcaacatacacaaggtacgccgacgatctgaccttttcgctgcctcaggataccccgggcactaccgccagactaatcggatccactaaagcaatcctacgctcttatggctaccggttgcatcaggataagaaactgcggatatggcgacggcacgaccgccagatggttaccggacttgtagtgaatgagcgcgccaacctcccaagacgcctgaggaggaagctcagagccatagagcaccacctcctgactggaaggcctgccacacttactgcagatcagctgaatggctggaaggccctgcagaacatggtcgatgctcaggcgttaccccccgcacaggagtga

SEQ ID NO: 14012 - RNA, 969 nt, synthetic construct
  source 1..969: mol_type = other RNA
atggggctgttcggctttattaagggcttgctgggaggcggtgcaggagatccgaggaaggaccccaccgcctctttcaagcgcgagcgacctccaaccagtgagcgagctgccccacccagacggagaggtagcagaaggccgagagatatcgccgctcttgccgcttggattggcgtcggcgaacgcgaacttaccagggtgtcgccctcctatcagactttttttatccccaagagaaacggcgacaggcgccgaatcgatgccccttcagctgagttgaaaaccctgcaacgccggataaatcgcaagctgttgcgcaggctgaaaacccacagggcggctacaggctttgagcgagggagatctattgccactaacgctgcggcccataccggtaacgccgtggtggtccagatggatatcagagatttctttccctccactactacacagagagttcttgattatttcagggccataggctgggaagacgatgctgctcgcctgttagtggatctcaccacacatgaaggggggttgcctcagggggccccaacatcacctcgtctgagcaatctagtcaatcaccagctggacgcacgtttagatcgccttgccgcacgctgtcacgcagcgtacacgcgatacgccgacgacatcaccttctccttcgcagacggggacccactcgtggttcggagagtaattcgggcgactaaaagtatcctcgcagagcacggataccggatacaccaccggcggaaactgcatattcggaggcgtcatgagcgccaggtggtgaccggtctggtagtcaacgacagggcaaatctccctcggcatacaaggagatggctccgagctgttgagcaccggctgatgacaactggaagcgccacactcacggagtctcagctagccggatggcgggcactgagacaaatgatcgaccgtgaaaggggatga

SEQ ID NO: 14013 - RNA, 951 nt, synthetic construct
  source 1..951: mol_type = other RNA
atgttggcttggctgtttcaactgctccttagatccctcatcggcacctcaccacgcaggcactttcggttagctgagtcataccgggaaccctctccaaatcgatacaaaccaaagtgggtgaagcagagaaccctcgccgacctcgctaagcgtctgaacgtgagtatcgagacactgcagagtcataagccgacttatgcgcagctgtcaattcccaagaagtccggcggaacgagaatgttgcatgtacccgatgcagcaacaaaacggctgcagcgggctctactgaggcgtgtgatcggcccagccaaatcgcacgatgcagccatgggatacgagaggggtcgcagcatggttgaccacgctaaaaggcacgccgaccgggccgtcgttattggcattgatctccaaaacttctttcccagcacacgagcagcttgggtccgcgattatttcatagccgcgggctgggacaaggaggcagcgaaacttctgacccaccttactacacatgaaaatgctcttcctcaaggggcccctacttcccctaaactctctaacctggtgaaccatttaatggatgcccgactcaccgggctggcacgacacttcggagccagatatactagatatgccgatgacattatcttctctctgcctacggacgacagcttgctagttaagagtctagtcaatctggctatgcacgtcatcgcaaactgcgattacaggccccattggaagaaaaaattgtttatccgtaggagccatcagaggcagcagatagcagggctggtggtaaacaatggtcctccacggctgtcccgcgaaactaagagatggcttcgcgctgtgcgccacagactggccaatgggaagcaggccaccttaaccccgtctcagttggccggatgggacgccttcgagcacatggtggaaaatacatga

SEQ ID NO: 14014 - RNA, 960 nt, synthetic construct
  source 1..960: mol_type = other RNA
atgggtttaattcagtggatagctggtttcctgtttggccgccctaatgagccgatctcccaagcccagatcgatgctgctttcccaaaacgccggagagtccgcaggctgagtttcgaagagttgagcagacggctcgatgtgaacgaagccaccctcaagggctttcgccccaggtacacaagattccaaatccccaaacgggcagggggctcgaggcgaattgatgcccccgatgcggccacgaagaagctccaacgtgcaatagacaagcgggtgtttggaggtgtgagactgcacgcggctgcaatggcctatgtgaggggcaggtcttatgtgcatcacgccgcccttcatgccgatcgtgctgtcgtagtatccatggacctggagaactttttcgggtccattagaagatggagagttgaggcacttgcgagatggttggggtgggacgaagaggcagccggacggatcgcagatttatgcactctagacggcaggcttccacagggtgcccccactagtccccgtctggcaaatatcctgagcataccgatggaccgcagactcgctggactagcccgaagccgaggggcagtgtactctaggtacgccgatgatctggtgttttcatttgatgctgacgagcaggacgtggttcacgaagtcgttcacattgcgaatctgatcatctgggagtcttggggcttcgagatggaagtccatcacaagaggaaactgcacattcgccgagccggatggaaccgccaggaagtctgtgggttggtggttaatgacggccctccaagacttccacgggaaacccgacgcgctctgagggctatgcggcatcggctggaaaacggaggagacgctgacgccacacctacacagctcgccggctgggagagcttggagcgtatgattcagcggcaggggtcctcaacccctaggtga

SEQ ID NO: 14015 - RNA, 1056 nt, synthetic construct
  source 1..1056: mol_type = other RNA
atgggactgtttcggtggctcaagaagaagttagcccctcccgaccctttcgccgcctttgagtcacccgctgcacggtctaatgccgctggtggggttccaggaggagtggaagacgccgctggcgctgcaagaagatcaccgctgaggcgcagtagggctcctcaccgtgacggaagggatgctggaatcggcgccgctcgctttggcttggatgaactggccaggcgatgcgctggtcccggtatcgaccccttgacggtggaaccaggatatcggactttcactatcaccaaacgcaatggccgccctcggcgtattgacgcaccagacgagtccacagccagagtgcagagggcaattctcagaagggtgcttgggggcattccctctcatggtgccgcccatggtttcgagcgaggccgtagcgtggtgaccaatgcatctgtccacgtcgatagcgccgtcatagtgaaaatggatatccggaacttcttcggcgcaacaagggcggagcgagttctagggttttaccgtcggtttggctgggacgaggcttccgccgcaagactgactgaactaacgacacttcgcggcgggttacctcagggtgcaccaaccagcccacgcctcgcaaatttggttaactacagactggacgcgtcccttcatgcgttggctgactctgtgggagcccgatataccagatacgccgacgatatgacatttagcatggacgaggatgacgcttcgatcctgaactccataattggcattactcgcgatgcgctcattgatttcggatatgaaatacactggcggaaaaccctgcaccttaggcggactcaccagaggcagaccgtgaccggcatcgttgtaaacgatggggtcagtctggccagggatactcggcattggctgagagcggtagagcaccatctgagaacggggagagcagccaccctgacaccgacacaactcgctggctggcgcgcctacgaggcaatgatcgaccgaggggtcaacgatgatgggacaatcgccgacgaaggatga

SEQ ID NO: 14016 - RNA, 954 nt, synthetic construct
  source 1..954: mol_type = other RNA
atgggtcttttttcctttttgcatggcctcttcggcggaggcagatatggatctgaagacctcgcccaacggctggggctcatggtgaagtggctggatgagacaaaaccccattatcagcgttttactattcctaagcgggcggggggtatcagagatattgatgcaccaaatgatgagctaaagaagttgcagcgcctgatccttcacagggtgctggcaggactgaaagcccatcctgcctgtaacggattcgagcgccatcggtctatagtgagtaacgcgcgtgtgcacgcacgcccggatgttgtcttaagaatggacatacgggacttttttggctcaaccggcgccgctcgggttaaacggtattgcagggctatcggctgggatagacgcgcctcgaacctgctcgtcaagctatgcacatggcaaggaggcctgcctcagggtgcgccaacaagcccacgcctcagtaacttagtcaattaccagatggacgctagactggctgggctggcccaatcaatcggcgccagatacaccaggtacgcagacgacattaccttctccttccgggcggacgaggccaatgaagccagatccagcctggcacgaaatccgaagaccctcgatcccgcagaatgtcgggacgatcacagactgcccactgctttcgctattaggatgaccaaggccatcttggccgactacggttataaaatccatcacaagaggaagctccacattaggcgaaaacaccagcgacaggacgtgacggggcttgtagtgaatcacaaagtgaacctgccaaggaggactcgtcgctggcttcgagccgttgagcaccatttagctacaggacgccccgccactttgtctgcagcccaattggctgggtggcacgcactgcagcatatggtagctacgcagagccagcccgggtcaccttga

SEQ ID NO: 14017 - RNA, 1170 nt, synthetic construct
  source 1..1170: mol_type = other RNA
atgccctggggccccgatccagcctctctatttgtggatagtacaagagcaagacgccacgacgtacctgccgcactggcagctccctttgccggacgtcgaactgcacttaggaggccaggcccggtagccggtttggagactcagctgcccacttggcacgtagggcaaggtggtgcaggagccgggagaaaagcaagagccaggcctcgagcccccttcacagctgctgaccctatggggcttgccgacttactgcggggcctttttgggagaagcggtccagagccagaccggggtgctggaattgacgagctggcccgtcggctcggagtttcggtggaagcactgcaagctaccccagtcgcctaccggagtttcacgattccaaaacgatccggacgcggcgaaagacgcattgacgccccggaacccgccttgaaagcactacagaggcgaatattaagaaggctgctgggacggctcaaggctcatcctgcggctaccggcttcgaacgctgccacagcatagctacgaatgcgctttgtcatacagggcaggctgtcgtcctaaggatggacatccgcgacttctttccctctaccagagaggcccgggtgcaccgatatttccagaagattggctggaaccgtgacgcctcaggcctgctgaccaggctttgcacctatcgtggtggcttgccacagggagcgcccacttctcctcgcctgtcaaacctggtgaatgttctcctcgatacgcgcctcgaggccctggcaaagagcatcggcgcagcctacacacggtacgcggatgacctggttttcagctttgcgaaggatgaacgggtgtccatccatgctgccatccagaccacaaaaaccatcctggaagacgagggctatgccttacatcaggataggaagttgcagatcatgcggaggcatgagagacaacgcgttacagggctggtggtcaacgatggcgtgagactccctcgcgagacaaggagaaggctcagagctgtggagcaccacctccggactggtcgacctgccaccttgactgctgctcaactggcaggttgggaggccctgcgctccatgattgataggcaggtggatgctgcccgtggaggaggtggagcaggggaaggtcggggtgtctga

SEQ ID NO: 14018 - RNA, 921 nt, synthetic construct
  source 1..921: mol_type = other RNA
atgggcatactgaactggctgttgggcagacgtctgagagcacgaaggcccgccgaatacggaccaccacgatttggcttagctgatctggtgcggcgcctcggcttaagtgaggccgagttgcgggctgtgcgcgcttcatatcgcgagttcgaagttcctaaacgaagcggcggtaccagaagactggccgctcctgaaccggcgctcaaagccctgcagaagcgtatcctgaggcgcgcattgggacggcttaaggcccacccagctgcgacagggtttgagagggggcactcgatcgtgacacatgcactgttccacgccggtaaggccgtggtcgtccggatcgacattcaggagttctttgcctccacagctgcttgcagagtcgaggactatttaaggcggattggctgggatgcagaagccacagccgccctcgtgaaactgtgtactcacaatggcggactaccccaaggggcccctacctctccgagactgtccaacttggtaaatcgcgggctagatgctagaatgcagaggctcgcagcaggattgagcgcttgctactcacgctacgctgatgacctgactttctcttttgaccgcgatcagagcagtgccgacgtgcgtcggctgattggaggtgcgaaagcaataattactgcctgtggatatcgcatgcatctcaagcggaagctgcatgttaggcggtgccaccagagacagcaggtgaccgggcttgttgtaaacggacagccctcccttccaagggaaactaggagacgactgcgtgcgatcgagcaccatcttcgaaccggccggcctgcatctcttacgcccgaacaactcgccggttgggacagcctcaggtccatgatcgagacgcagagggcacaaagtcccggtgggaccggctga

SEQ ID NO: 14019 - RNA, 975 nt, synthetic construct
  source 1..975: mol_type = other RNA
atgtctggcggcccttgcgcaggtcacttcggaggtgctggggcacggcctagacctcagtcactccataagggaggatcaacggtaggcctctgggatcggatacgtaggcttcttgggggcggaacccctggccatgacttaccatcactggccgagcggctggaactcacagtagatgagttaagagccgtggaaccgaggtatcgaaccttcgacatccccaaacgctccggtggacaccggacaatcgatgcgcccgacgacaggctcaaggagctgcagaggcgagtgctgcaccgtgtgctgcatggtctgcgcgcccatccagcagttcatgggttcgaggacgggcgaagcattgttactaatgctaggctacacgtcgggaaggccgtggtgataaccctagacatcctggacttctttagtaacactaccagcagagatatttataggtatctgcggtttgtcgggtggagccgcagtggtgccagagagattgtccgcttgactacttatgagggggtgctcccacaaggagctccaacctcgccccggctgagcaacttggtgaactaccgcatggacgctaggcttgccgggatggccaatagttttggaggcgattacacgcgatacgctgatgatcttactttttctttgacatccgacgaacgggtggcagttcaaggacttatccgtacggcctgcgagattatcagagatgaggactacgaaccccatgcagataaactcaccgtgagaaggagacaccagcggcaggaagtcaccggattagttgtcaatgagcgcatccacctgccccgcgagacaagacgatggctgagagcggtagaacacaggctgcgcaccacaggctcttgttccctgacagaagctgagttggatggctggctcgccctgacttccatggtccacgagcagggtgaaggtgtgggcgtgccagactga

SEQ ID NO: 14020 - RNA, 903 nt, synthetic construct
  source 1..903: mol_type = other RNA
atggctggtctgttcgcgtggatatcgaatcgactggaccccgggcgcagtgtggaagatttagccaggtggctgaaaattgaggtcgccgacctgcagagtgtggagcctaattacacaacctttagaattcccaagcggtcaggaggatttcgcaccatcgaagcccctgacgaaaggctcaaagaagtgcagagattgattttgagacgggtgctaggcggcctgaaagcgcacccttgcgctcttggattcgagagagggcggagcatagtgacccacgcccaagctcatgtcgggaaggccctggtcattcgtctcgatctcgtggactttttcccaaacacacaggccgaccgggtgctggaatactttcgctctatcggctggaaccggcgggctgctcaactcctggtgaagctgactactaacaatcgccatttgccgcagggcgcaccaacctcaccaaggctcacaaatctggtaaactataagatggatgccagacttctggcaatggcacgcaaggtagggggtacagacgccacatacactagatatgcagacgatcttaccttctctgttgcgcatgagggtgagcacactagcagggacatcatccggggagcttccacgatcgtgcgcgataccggctatctactgcatagaaagaagaaaacccacatcttgcggtcccatcagcgccagactgttgcaggactcgtggtcaacgataaagttgatctcccaagggagacacgtaggtggttacgagccgtcgaacacagggagaggctgggcagagaggcaactcttacgcccgcccaattatccgggtggcgtagcctgagacacatgattgacacccagcgcgatcctcccgctcgagttcgaaggcgatga

SEQ ID NO: 14021 - RNA, 930 nt, synthetic construct
  source 1..930: mol_type = other RNA
atgggccttatggatttcattcggaggagatttggtggcgggagcggacgaagttctcttccagcccctgacgtaggaatggatgagaaacatctagccggccggctcggtgttttgccaggaaagctggagctgctgaatcccacatataaagtttttgagatacctaagcgcggcggcgggagaaggaagatcgaagctcccgccccgatgcttaaagaaatgcagaacctcatactgaggaagctgctgcggcgactgaaggcgcacccttgtgcctacgggtttgagcgggggcgttcaatcgcagggaatgctgctgtgcacgccggcaaagccgtggtggtcaggctggatctgaaggacttctttccctcgattagtgccgacagagtcagacgttattttcgcaggattggatggaacggcccggccgctgaactgctggtgaaagtctgcacccatgagggtcgcttaccacaaggggcacccacctctcctaggcttagcaacctcgtgaattactccctggacgctggcttgctcagtgcagcaaaaaagtaccgagcagactacacacggtatgccgacgacatcaccttctccttcgcaattgacgatcccgggcgcatccgcagcctgattggctcagccaaggcagtgctcagcggagagggctatagaatcaatctccacaagaaactgcgcgtcgccagatcccaccagagacaaaaggtgacgggtctagtggtaaactctggagttaaattgccaagggccactcgtagaaggctccgggcaatccggcaccgattagctgcggggaagcaggctacattgaccgccgcccagttagccggatggactgctttcgaagctatgatcgcggcgcatgatgatcccgctgctgcaggaggtcaggcctcctga

SEQ ID NO: 14022 - RNA, 954 nt, synthetic construct
  source 1..954: mol_type = other RNA
atgggcgtgttcgacttgattagacgcttcttctcaaatcgggattacgatattcctcgagatgaccctagacaggttccccatgaccttagcttagaagtcagatatccacccgccctttctgttgccaccctggcggaaagactcgggatagccgagggacggctgcgtaatattgagccgaactataacaccttttcaattccgaagcggagcggtggaaccagacggatccacgctccctcccgtgaactcaaagccgcccagcgcaggatcttacggcgactgctagccaggctgaatgcccacccaactgtgtgcggctttgagagaggccagtcgaccgtcacccatgccctgctgcacgctcaacaggcggtcgtggtgaggctcgacatcaagaacttttttaccagtacggacgcctctcacgtagcaaaatactttcggcaaatcgggtggaaccgagaagcaatacgcctcattacagtgctgtgtactcatgacggagctctgccacagggcgctcctacaagcccacgcctgtccaatttgatcaactaccgaatggatgcaagacttgccgggctggctcaaaaccagggcgcatggtattcacgctacgctgacgacttgacattcagtttcgcagaggatagcggggagaggattcatactgtcataaggggggctcaccgcattgccgaacagcacggttacgagatccaccagagacgtaagcgccacatccggaggaggcatcagcagcaattggtgacgggacttgttgtgaatcagacagtaaggctccctcgccatatccggcgatggctacgggcagtcgagcatcacagaaggacaggcaaacccactaccctgtctgattcccagtggcagggttggcaagcgtatgctgcaatggtggagcgtcagtccggagccactccccagtga

SEQ ID NO: 14023 - RNA, 957 nt, synthetic construct
  source 1..957: mol_type = other RNA
atgggactgttcaactggatttccaaactgtttaggcgcaccctgcctccttcagttttcaagtaccctgagccaaggtgggacaagaaagagcttttacgacgtctgaatctcaacgagataaacctgatctataccgtgagagggtttaacccgagagacacaaatctccttgccccccatctcatccccctgggctattggtggcacaaaattccaaaaaggtccggcaagccacgtatgctgtattctcctaacccccggctgaaactgctccagaagctcttgttaagaaaggtcttcgctaagctcgctgtgcacagcgcctgtaagggctttcgacggggacagagtaactgcactcatgcccgacttcacgtcggcaaagcagtcgtggtgagaatcgatatcaaggattttttccatagtacaagcggaaaccaggtgtacgactttttcagaaggataggttggaatcacgaggctgcatctctgatccaggccatatgcacccgcaagaaccggttgccccaaggcgcacccacatcaccaattctcagcaacttggttaattaccggatggacgcccgtcttgcgggactagccggtaagtcccaggctatttatagcaggtacgcagatgatctaattttctctttcgaacaggacaatcgccgctttattcggggggtgattcggcgggtggttagcatcctgttcgaatcgggctacacgatcaataggaccaaattgaatgttatgaggcagcacaatagacaggtagtcacagggttggtagtgaatagaaaagtccatctgccgagatctactcgcaggtggcttcgatccgtggaacaccatctgaacactgggaagtcagccacgctgacccgcgagcaattagcggggtggaaagcttaccagcagatgatccaaactcaaagtaccggtaactga

SEQ ID NO: 14024 - RNA, 972 nt, synthetic construct
  source 1..972: mol_type = other RNA
atgggcttcctgagctggctcctgtggggatcggggaaaagcgtgggcgatcttgctgaatggctcggtgtagacgtcaggcagctaaaaaggctgaagccggaatatcgggaatttactatccccaagcgaagtggcggcgtaagacgtatcgccgctccaagtgacgagctgaagaggatgcagagacggattgggaggcggttactgagagggttgagggcacacgaggcagctcacggcttcgagcgaaatcgttctatcgtgaccaacgcccgcgtccactgtggtcaggacgtggtcgtgcgtatggacctggtggacttttttccttccacttctgcgagacgggttcatcgctactttcgccgcatcggatggaatcgccctgcagctcggctgcttacaagactgtgcacccatgagggcgggcttccacaaggcgctcctacatccccgcgactaagcaacttggttaactatcgtctggatgccagaatagctgggttggtcgctgcactcggaggcaggtacacacggtacgccgatgacttaaccatttccttcgccgctgaggatgccgaagacgattgggttatacgatctggaccagccctcccttttgtgttagagggccaccccgagaagattcggtacctgaggtcattcattaggagagtggccggacaggaaggttatcgggtacaccgccgaaaaaagacctcagttcggcgccgccatcacagacagatggtgacagggctcgtcgtgaatgaggtggtgaacttgcctagggaaacgcgacgccggctcagagcaatcgcccatcgcgcagagcagcagaaaaggccccttctcgacgcggattacagacccttcagctatggtaggagacaaccaactctgacccccgcccaactggaaggatgggaagccctgcaggcgatgatcgtcaggcagcgggtggagtga

SEQ ID NO: 14025 - RNA, 996 nt, synthetic construct
  source 1..996: mol_type = other RNA
atgaccatgggcctgatagggtggctgctctggggtaggggccatggtgtcggggaactagcgaggcgtttggacatcgagaggcgggatatacggcgcttccagccccagtatcgagagtttaccatcagcaagcgctctggaggaaggagaaagattttcgcccccaacgacgaattaaaaaagttacagcgccgcattctgcgtagactactcgctcggttgagagcacaccctgcggcccatgggttcgaaaggaggcgctccatcgtgaccaacgcttcggcacaccaggaccaggatgtggtgatgcgatttgatctggtcgacttctttccaagtacctcagagcatagagtaaagaggtatttccggcgcatcggctggaacagacctgctgcaaagattttgacgcggctgtgcacttacaatggcggacttccccaaggcgccccaacatctccacggctgtccaacacaataaattacctgctcgactctcgcttggctggaatgatcaacgccattggtggggcttataccagatacgccgatgacatcaccatctcattcagtcaggaagctgaggaggactggggcattaggagcggacctgcacccccgtttaccctccggaagcatcctgagaaaatcagatacattagggcctttgtcaggagggcggtgagagaagccggataccaggttcaccgcgggaagaaaatgaatgtaaggcgacggcatcaccggcaagaggtgactggccttgttgtcaatgatcacgttaatctgccccggaaaactcgtcgctggcttcgagccgtggaacaccgagcacggctgctcagccaagatcgcgagcagagccgttacgtgatgagaaaacgaccaacacttacaccgctgcagctggctggctggagagcctatagagcaatggtgctcaatgggacaggtaagactgccaacgctacggccactagatcccacaaatga

SEQ ID NO: 14026 - RNA, 1179 nt, synthetic construct
  source 1..1179: mol_type = other RNA
atgatcagacggccagggccagatgggttagcagagcgccgacgggttgggcatctctactttcggagacgcagggcgggaccacagatccaagtggcagacaccaagcaggattcacaaggagcggccaaggctaacggccggagaggtgctctgtgtttcgccaaggacctcttccccttttccacacagtattctcgacggtccgtgatgggttttctgtcctggcttctctggggccgcggatttggtctgggagagctggccaggtggctggatatggacgcccgggaacttcgccgattccagcccgagtataggaggtttaccattcccaaacgctctggcggcaccagaagaatattggccccggacgatgagcttaagaagctgcaacgtaggattctcaggaggctgttagcgaggttacgtgcccacccggctgcccatggtttcgagagaggaagaagcattgtcacaaatgccagagcccaccaggggcaggaagtggtggctagatttgatctagtcgatttttttccaagtactagcatccagcgtgtgaagacgtacttccgcagaatcggctggaaccgtcggtgcgcaaaaatcttgactaggttgtgtactcacgaggggggccttccacaaggggctcctaccagcccccggctaagtaacctagtgaactacaggattgacgcccgactggcaggcatggcggatgcattgggcggtgtgtatactcgatatgcagatgacatcacaatctcattccccaaagacgagccagaggaagaatgggtaatgcgggccggagagccacctcctttctcgctcgcacggtgccccaagaaaattgcattcatgcgcgccttcgtaaggcgggttgtcggcgaagaagggtaccgcgtgcatcgccgaaagaagcagtctgttcgtcggcggcaccatcgacagatggtcacaggtctggtggttaacgacggggtcaatctgcccagaaagactcgccgctggttaagagccgtggagcacagggccaaaatggccaaagagacacctttcgacttcgctaatccttccgctaaaaggcctaccctgaccccttcacagctggaaggctggagagcttttcaggctatgatagctaatcagagcacgggaggagaagagtga

SEQ ID NO: 14027 - RNA, 1020 nt, synthetic construct
  source 1..1020: mol_type = other RNA
atgggaattcgggatcccgtagtgaaactcttcgattggattgtgaacggcaccggccatggcaccactgagcttgcccgtcgactcggtatcccagagcaggaactgaggacagtggacccagtgtatcacgcgttctctataccaaagaggtcagggggtacgagaaaaattctggctcctgaaccccgcctgaagcgctttcaaagactgctgctccgacgggtgtttgccaagctctccgttcatcccgccgctactggttttgagcccggaaggtccatcgttactaacgctcgaacgcatcagggccaggccgtggtactgagattcgacctaattgactttttttctagcacgtctaccaagaggcttagaaagtatttccggcagatcggctggaataggccggccagtaagttactgttgcggttatgcacccagcaaggagggctgcctcaaggagctccaacaagcccgcgcctgtcaaacctcctgaattacaggctggatgcaaggctggctggattgatcgttaaactgagagggagatacacaagatacgccgacgacatcacaatttccttcgcaacccgggatcttcacgcagctgggaagtccgacttcccagctcgcaattctgcaggcgggactcccaatcacccaacccagacccctactgggcaggatacaatccgctctatcacacgggccgtccaaaaagttatagagagcgagggctatcgcatgcatcaccgtaaaaaactgagtgtccggcggcagcaccaacagcaggtggtgactggtctagtggtcaaccagagagtgaacttgcctcgtagcacccggcgatggctcagagccgtcgaacaccgcacacaaatgtcacagcccttaagccttacttcgtatcagcctggaagttacagcaggagaaagagtcccaccctctcccctgcgcagttggaaggctggaggtcatttcgagcaatggtccagcgccaggccatagacgattga

SEQ ID NO: 14028 - RNA, 987 nt, synthetic construct
  source 1..987: mol_type = other RNA
atgggcctgattggcagactcatcggctggctgacaaaagggcggggacacggggtggaagagttagcgcggcgcctggactcagaccttctggacttgagtcgatttcaacccgattaccgccctttcactattccaaaaagatctggtggccagcgaagaatcctggcccccgagaggcacctgaagagactgcagcgacgtattctgatacgcttgcttgcgcgccttagagcacatcccgcagccactggatttgaaagggggaaaagcattgtgaccaatgctagagcacaccagggcagggctgttgtgcttaggttcgatctcgtcgacttttttccttccaccaccgctgagcgacttcggaagtacctgaggcggatcggatggaatcgtcctgccactgagatcctcctgcgcctctgcacttatgaggggggtctaccgcagggagctcccacttctcccaggctctcgaatctggttaactatcgcctagacgcgcgtttggccggcatggcagccagattgggcggagtgtatacaagatacgccgatgatctgacgatctctcttccggacgaagagcaggagaaggattggaccattagatccggcccaccgccattgttcgggctcgagacaaaccgggataagatacggttcctccaggccttcgtcaggagagtagtcgaagaagagggttaccgattacacaggcgcaagaagctgtccgtgcgacgtcgccatcaccggcaagaagtgaccgggctggtggtcaacgacagggtaaacctccctcgcagcaccagacggtggttacgggctgttgcccatagggcacggctcgctcgccaagaaggaccaggtccatcaaggccacctagtgggggcctacccaaaaggcctacactgacacccgctcagctgcaaggatggcaggccctggaaagcatgatcgcccggcagagaacggagggctga

SEQ ID NO: 14029 - RNA, 984 nt, synthetic construct
  source 1..984: mol_type = other RNA
atgggctggctagaccgatggtttccgggggaggggcacggaattgacgagctggcccgtcgtctgcatgttgaccctgagcaactgagacggactgccccacgctatcgcgaattttcaatcgcaaagaggaggggcggtcgacgcagaattttggctccgcagactgatctcaagaatcttcaacgcagaattctccgctgcattctggccagactcaaaagccatcccgccgcaatgggatttgaacgaggccggtctatcgtgaccaacgcattaccacaccagggccaggctgtcgtgctccgactggacgtgaagaacttcttcgcttcaactcgcgccggcagagttcggaggtactttagactgatcgggtggaatcggcccgcagcagcgttgctgaccagactgtgcacacacgaagggggattacctcagggcgctcctacctctccaagactgagcaacctcgttaactacccgttggatgccaggctgtcggctatgtgtgagcggttgggcgctgtgtataccaggtacgcggatgacataaccatctccctctccgatgagaaagaggacaggccccttagaaatccccccccccgtaggggtaacgtgagtcctcccccacttagtagcgagcctaatcggctgaggtatctgcggcacttcgtgagaagagtcttcgaccaagccggttacacattgcactggcgcaaaaaggcaagcatacggcggaggaaccaccgacagctggtctgtgggctggtagtaaatcatagggccaatttaccacgcgagactcgaagatggctgcgcgctgtggaacatcgcacgctccttgaaaaacaagccaagacggcgcctctatcctcactggataggggaaggcgtaagtctccaacactcacacagacacagctagatggttggcgggccctgcggcttatgatcacccagcagatggaagagggatga

SEQ ID NO: 14030 - RNA, 1098 nt, synthetic construct
  source 1..1098: mol_type = other RNA
atgaaggatttgcagcggcggattctgcgccgcctgctgaaaaggttgaggtgccacgccgctgcgagaggctttcagcctggagagtcgatagttacccatgcgactcttcatgctggcagagcagtcgtccttcggctcgacttgagggacttctttcccagcacaggctccagtcgagtatatcagtacttccgcaggataggctggaataggcccgccgctcgccttctgaccaacctatgcacccaccaaggcgggttacctcagggcgctcctacttcaccgaggctgtctaatctcctaaactatcgactggacgccagactggcggcaatggcagctaggctcggagcgcactacagccgttacgccgatgacatcaccctgagctttggccaagacgatagagatcgtatacgatatatcattaggttcgttaaacgtgcagccgccgatgaagggtatcgggtgcatggcagaagaaagttgcgaattcgtcggaggcaccagcagcagcgagtgacaggcctcgttgtgaacgccggggtgagacttccgcgccaaacacgacggtggctcagagcagttgagcatcacctcaggaccgggcgcgttgccacgcttacaccagaacagttcgccgggtggcaggcatttcgccagatggtagaagggcggcccagaactgcgtctccagctccactgccacctcccttggtgcctgtcccagtcgagctggacggagcttgggtgctggtcgccttacaaaagaacggacatgctattcccgtgaatatgccagccgaagggatcggtcccgccgaatggacctttgcctccggagagctgcggatcgcacagggtgatcacgaggagcgggccgactgttccgtggatgccagcactgaacctcccagaatcacaatccggccagccggacaagaagcaggaaccgctcagggaattttcaggctggagggtgacaaattaactatctgtgtgagtgaggagggtcagccgctgccttcagctattccctctgtacctggtacgggctggacagtgtaccacctgagagcactcgctcgccgctga

SEQ ID NO: 14031 - RNA, 918 nt, synthetic construct
  source 1..918: mol_type = other RNA
atggggatatttaacaaactgaaaagcctgttctcatcgaattcttccgagccccagcaccaaaccccaaccaccccagcccgttttaacttgctggatttggagcaccgactggacattagtcataggcaaattaagcttataccgctcgactatcatacattcacagttccaaaatccaatggtcacaagaggttaattaccgcccctaatcccgaactgaagaagcttcagcgcaccattgccaaaagactcctgactaagctcgccgtgcatcccaacgccgtagggtttaggaaaaaccatagcgtcgtgaccaacgctaaagcccacactaattcccctatgatcattaagcttgatatcaggaacttcttccagagtactcccgcgcagcgcgtcaatcactacttcagattcctaggctatgacgctgattctgcgcaattgttgacttctataacaacacatatcgatcatctgccccagggagcaccaacgtcccctatcctttcaaatctgctcaactacaaactggatacagccctgacgacgttggctcaaaatcataaggccatctatacccgctatgcagacgacatcacatttagtctggataccaaagactcagaggcagctagaaatctcgtcaacgccgcggcttacctcttacaccagtttggctacaaactcaacaaccggaagaagcgaatcataagaaaccaccggcaacagcgggtgactggactagtggttaatgaaaaggtgaacttaccgcgcgagactagacggctgatcagggctatccagcatgcacacgacaataataagcctactacacacagccctcagcagctgcagtctctgaaggcataccaccagatgattattacccagagcgagtttgaaacccactga

SEQ ID NO: 14032 - RNA, 906 nt, synthetic construct
  source 1..906: mol_type = other RNA
atgggattattcgacaaaattaaaggcctctttggatctggcagttccggcggggtgagcggtttgacgatcgacgatctcgcccagcggcttgacatgccagtggagaggctggaaggggtagagatttcctatcatagtttcactgtgcccaagtccaatggccatcagagaaggatcaccgcccccgatgacaagctgaagcaagtgcagagagccatcctgaaaaggcttctcaacaaactggcagtgcacccaaatgctaccggcttccgcaaaggttatagcgtcgtgtccaatgcacggctccacgtcgggtcagaggtgatcgttaaactggacattcgtaacttctttgagtcaaccaagatcaaccgggtgaacaagtacttcaagtttataggatgggatagaaagactgccaacctcctgacagagcttactacctataaggggggactcccccaaggcgcacctactagttctgcgctatccaatctgttgaactacaaactagactcaagccttaccaccctggctaagaagaagggagcaaggtactctaggtacgctgacgacatgacattttcgttggatgggtctgacagcaaggtcattaactcaataatttggggtgccgaatctgctttgcacgatctgggttaccggctgaataatcgaaaaacaaaagtcatccgcaagcaccgacagcagagagtcacagggctcgttgtaaacgagaaagttgcgctgcctcgtaaaacgcggaagttaataagagctatcgaacactcccaacagaatggccgcccgagcacacatagcgccgatcagctgcgcagtctgaaagcctatcaggccatggtggagaagcagggcgaagatggcgaattagatgagggatga

SEQ ID NO: 14033 - RNA, 939 nt, synthetic construct
  source 1..939: mol_type = other RNA
atgtggcctatcttcacaccgctgtggcgaactctttcaggaggccgaagtgcccccgaagccggaatcgctcccttaccatttgaaagcaactgggcagagcggttagctaggctgggcttgagccccgagaaccagcgtgccattgtagcgtctggagccctccacccacacttgcactactggcgcttccaaaagccaaagagggcaggaggacggagagccatagcagagccagatcggaggctgaaaagacttcagtacgcgatagtgtcctggtgttttagtgctgaaaggagccacccagccgctattgcctatcagaagggccgatccacagctgaccatatctgggcacacgccggggcagagattgttatcaccgctgatatcagggatttcttcccgtccacccgcgccgaacggattgaaacctggtggcgggagagaaccgactccgacactgcgaggctcctcactctgctaacgacggatagagacggcctaccacaaggggcaccaacctcccctgggctgtctaattttgtgaatactgagctggacgctcgtctgacacgacatgcagcgccctcaggtgcccgctatacaagatattgcgatgacctggccttttcgtggcctatctctagcggtcccccttctggttttgagcgcggcgtccgtgccgctttgcatgagttcggctacaccctccaccccgaaaaggggtggagggtcagccatcggagagatgagcccgaaatcgtgggggccgttctcacaagaagtggaggggtccgactgccggacagacttaggcgcgtgattcgggccttggcaaggtcagcttcacctggcgacgtgcctaaactggccggttatagaggctacgcagctcaggtgactaatcggcccggacgccgcaaccctaaaacctga

SEQ ID NO: 14034 - RNA, 930 nt, synthetic construct
  source 1..930: mol_type = other RNA
atgtggcctattttcaccagcctgaggcggaccttaaccgggggaagaagtggaaggacaggggaccggccgccagtctctagtgaagccgattgggccgagcgatttgctagattggggctgccacctgaaaccttgaggaatatcatagccgccgattccctgcacccctattttaggtacagacggttccacaaacccaagcgagatgggggcaggagggaaatcgctgagcccagccctcgcctgaagagacttcagagagagatcatcacacaatatttcgcaaccgaacagccacacccagctgcagttgcgtatcaacgaggcaagtctactgccgatcatgtgtgggcacatgcgggcgctgaaatcgtgataaccgctgatattagagactttttccctagcactagggccgacagggtggagatgtggtggcgtgaacgcgtggactccgagacagcgcgcttactcaccctgcttaccaccgattgcggcgagctgccacagggagcacccactagtccgggcctctctaactttctcaacactgagatggatgccaagttgactaggcgggccactggagcttgtgctcggtacacacggtattgcgacgacctggccttctcgtggccgacaggttttggccctccttccgactttgagcgaggtgtcagagccacgctccacgaattcggttacgagcttcatcccaaaaaaggatggcacgtacatcgccgcggagacgagccagaggtaacaggggccgtgctaacacgctcaggaggggtaagactgcccgcacggattagacagatgatgcgcgcactagcgcggcgagctacttcagccgacacggaacggctgaagggctacaggggttacgccgcaatgattgctacgcgtccccgtcgtcgcggctga

SEQ ID NO: 14035 - RNA, 951 nt, synthetic construct
  source 1..951: mol_type = other RNA
atgaataaccctctgtccaccctgtggtacaaattgaccaacaattgggttgctatatatagacagcggtacggctacagtgatgactatctcacgctgggacagatgttaggctggggcgctatcggggctcttaatgtgcctcaggtgccttacccaacactcctgcgggtacttcggcgcaatagcatatatccggacttccgatacagacattttaccaggcctaaggcggacggctcattgcgagagctggttgagccagatgagaagctcaaaaggattcagcgcaagatcctgaaaactctactgaagaatgcccttattcacccttcagcggtcggatttagacgcaaaaagtcgactgccgatcacgcatgggctcatgcaggtgccgcaaccatcatcacagccgacatcgaagatttctttccccaaacgaagacttaccgtgtcgaagcttggtggaaatcttatttcattgagcagcccgaagccgaatctgccgcacgtctcctgaccctgctcactacctacaaggggtctttaccccaaggggccccaacctccccggcattatccaacatcctgaactacgaaatggacgcggccttggagaggcgagtggtagcctcaggaggtcagtatacacggtattgcgatgacatggcctttagctggggtggaattggcgatgtccccgcggatttcgagacagcagtcaggagtattgtgcaggagtacgggtaccacctgcaccgctgggaagtttggaacgcccacgacgagccagaattgacaggaataatcctagctcgtcatggcggcgtggagcttcccgacgacgtgcaacagaccattaggaggcttgccagaagcactagcgctagtgatatggcaagactccaggggtatcgggcttatgagtccatggtgaagaaaagacgctga

SEQ ID NO: 14036 - RNA, 984 nt, synthetic construct
  source 1..984: mol_type = other RNA
atgttaaatgacctcccaaacactctcaggcggctggtgggactaccgcctgcttacagatatacctcacccgcccggaatgaaggtgaatggtccatggtgactctttgctataggctcggtctgaaagtcgaagacgcccaccagatcatggactctgccgccttcccatctggctttcgataccgcgagttcaccattcccaaacgggatggaagtccccgtcagttattggagccaggccccaagctgaagcaagtacaaagacggattctcactatgctgcttcgcaaagcccagcctcaccatgcagcgtacggctttaggagaaagaagagcatcgccgaccatgcttgggcccacgcaaacagccggatcatcattactgccgatatccaggacttttttccaaacacaacaaggcagcacgtgaagcagtggtggcacgagcaaggattcagtactcctgaggtgagactgctgaccgcactgaccacactgcacggatccttgccacaaggagcacctacctccccccctctctcgaacctagttaatgcccagatggacacggcccttgagcgtcacatacaggccagtggtgggatttatacgagatacgctgatgatctctgtttcagctggccagaggggtatgctccccctgcagactttgagttcgctgttagatccgtccttcacgaatacgggtatgccttgcatcctgataagggatggcaggtgtgggatcgcgatgaagagccaaccataacaggtgtagtgataacaaagcatgggtctgtcgatatccccgactcaatgaaacggattatgcgcacactgcagcagcatggcaccgctgcggacgacactaggctgcagggctaccaagggtaccagaggatgatcacccgcgagccgcgaccggaaaaagcaagcgcgggcttgggcaaggctcccattaaatcacctcgactgcgttga

SEQ ID NO: 14037 - RNA, 915 nt, synthetic construct
  source 1..915: mol_type = other RNA
atgtggcaccgcctgccttatgcgctaaggaagctgaggcagactctcatccccatcagatacgaaccgcccgattatgccctgtggaacctgcaggcccgcttaggcctaacacccgcagaggtgtcacgcctggctatgccgggaccttttcccccacggtttcgttaccggcacttcactgtgccgaaaaaagacggcgggcggagagaaatctgcgcaccaggcccacgcctgaaggaagtgcagcgacagattctccgcgcttacctggatccacgggctccacaccctgcagcaatgggcttccgccgtgctctctccatcgctgatcatgcctgggcccatgcgggagctgccattattatcacagccgatatagaggacttcttccctagcacccgggcacgaagagtggctgcttggtgggccgcacaggggtttaatgacgccgaggtccacctgcttacgcgacttaccacctaccgagggtctttaccacagggggcccccacatctcctgcccttagtaatttggtcaacgccgagttggacgccgcactccacaggagggcccaacagagcgggggtgtctatactagatattgtgacgacctggcctttagttggcctgatggtggcaggcctcccgctgatttcgaaccagccgtgagggccgcccttctaggagctggatacaggttgcattccggcgcggagaagggctggcaaatgtgggcacgaagagacgagcctgaagttaccggactggttctgacaaggcgtggaggtgtagctctgcccccacccttgtatgctaggatgagaagcctcgcgcggtcagacgatccccatgacgcagcacgcttggcgggctacaaagggtacgagctcatgataagaaagagacggtga

SEQ ID NO: 14038 - RNA, 951 nt, synthetic construct
  source 1..951: mol_type = other RNA
atgctcaataagctcccagctcccttgcgcaacctttttggactgtatacaagctatatgcagcctgtcaagcatccaggcgagtatgctctgtacatgatggcctatcggctgggcctcaatagataccctgtgtacaggtttctggagccaggaccgctgcccccctattacaggtatcgccactttaccgtgcccaagcaagatggcacccgaagggaaattgtagagcctgggcctaacctgaaagcagcccagcgcagaatcctccagttgtacttgaataatcgcaaaccccatcctgccgccttaggctttagaagaaagaagtcgatcgcagaccatgcaagagcccacgccggtgccgctttgattatcacggcggacgtggaggacttcttccccaacacgtctaggcagcggatcaagtcattctggcgtcaacagggtttcagcaccctggaggttcgactgctgactgcgctcactagttaccgtggtgcactacctcagggagctcccaccagcccgcctttgagcaatttagtgaactatgaactggatgctgccctggaccgaagagtcaaaccatcagggggcacatacacacgctacgctgatgacatggtcttctcctggccagacctagcgtcccctccagcagactttgagcagacagtgcgggccctgctcagggaagtgggatacactctccacccacgcaaaggctggcacgtgtgggtacggcgtgatgaaccacttgttactggggtgatacttaagcgggatgggtccgttgatttacccgactctatgaggcgaattatgcgggagcttgctcgctctgacgaccccaacgatagagcacggctggcaggttatcagggctacgaagccatgataaccggagatgccaccccggtcagtaggaggaaagctcaagggagatga

SEQ ID NO: 14039 - RNA, 957 nt, synthetic construct
  source 1..957: mol_type = other RNA
atgttgcgcgacatccttcctgctccaattgtggatctgcttactcaatccttaggcgtctctctgcggcgtcctcgcggtttttctccgccagccggagatacatggattatctatcacttcttccgatacactctcgccatgcgcgacgaagacgcccgagcttttctggctggggggaagccccctaagggctttacttacaggcatttcactgtgcccaaaaaggacgggtcagatcggcaactggtcgagcccggctatgcactgaaagcagtacagcgccgcatcctgaggttgctggaggctcgaggggttaccaatcccgcagctcttgcgttccgcaagggcaggtctatcgccgatcacgcttggacccatgccggagcagccatcatcataacagccgatattgaggactttttcctgtccaccagccacaggcgggtgagagaagtgtttcatagcatcggctacgtggacgatcgggctcactacctcacccgcctgacaacttaccggggaagtctccctcagggtgcaccaacctcacccatcctcagcaacctggtaaacgccgaaatggacaagcagatagcccggcggacaagcgaatcgggcggaagatatacacgatatgcggacgatatggcgtttagttggccagatagattccgacctccgggggatttcgaacagacgattagggggattctgagggagcacggttacagactacatcctcgtaaaggctggcgggtttggttaaggcgggatgagcccgaattgaccggcctaattctcaccagaagaggaggagtcgacattccagactccatgaaagtgataatgagagagttggagaaggggcagtcagaggaccaagcacagagactttccggttatgagggcttcagacacatggttcaggccacgaggcgtcgctacagggcctga

SEQ ID NO: 14040 - RNA, 945 nt, synthetic construct
  source 1..945: mol_type = other RNA
atgacaaggttggaccagatcctccccgataccctggtcagagttctcagaatgatcgctacgggatatgagcatattccataccgagggcacgatgatccataccggagtatctattggatggttggctaccgagtcgggattgaccctcccaccatcagagccattatggaagggggggatctacctgcagtgtggaggtatcgccacttcaccgtgccgaagaaagatggatctccaaggcagctgatggaaccaggacgggatctcaaagcagcccaacgcgagttgttgaggaggctgaatagcctggatcctcaccctgccgcactgggctttcgagagggtctgtccatcgccgaccacgcttggacccatgcaggtgccaggaccataattacagcggatattgaagactttttcccctctacccaggccacgcgcatctacgatttttgggtaagacaaaggtgggtctacgacgagatcgcagcgcggttcctgactcgcctcactacatacagaggaggcttaccacagggcgcccctacatcacccgctcttagtaacctggtgaacgtgggcttagacaccaagcttgctgcccgggcaagaagcgctggtgctacatatactcggtacgccgacgacctagtgttctcatggcctgatgagggacggccgccagctgactttcagcacggcgtccatgccgcgctgcatgagttcggctatcgtctccagcccagaaagggttggagagtttggcaccgccgtgacgagcccgaagtgactggcctgatacttacgcggggagggtccgtagatatacccgacagcatgaaagcattgatgcaaactctggaacgtaccgccactacagaagaagactttcagcgccttgctgggtatgagggctacaggcagatggtggtgcgagagtga

SEQ ID NO: 14041 - RNA, 909 nt, synthetic construct
  source 1..909: mol_type = other RNA
atggcatctgtgctcgctcgtctcatgggaattttttccgtgtctactacaaaaatgtgtagggaagacattttcgagactcctcaggtcttccgcttgagcctgctgatggacgtgccatctgcgactcttctacgatttcgtagcggctggccgggagggcgatactactatcggccacttcgctgcgaaaagagagatggctcgccccggcacatatatgcaccaagtcccccccttaaggccttgcagcgcgccttgctgtcttacctgaattccttaaccgtccatcctgccgccctgggcttcagacgaggttttagcattgccgataacgcgcgggctcaccaaggccaggctgttgttgtgaccgctgacatcgaggatttttttgactccacgccggctcagcgcgtccgtgatttcttcagagctgagggttgggacaccaccgccgtctcaatcctcacaagactctgcacattccactcagtgctgcctcagggcgctcccacgagtcctgtgctgtcaaacttggtgaatacacacctggacgccgacttaacccgggtgattctccagagcgggggaaggtactcccggtacggggatgacctgactttcagctggtccactagagcggtcccaagcgggttcgaggcaaccgcaagggcaatcctgctgtcatatggataccacctcaacgcccaaaagggctggcggatctggagggtatatgctggagatgttgcctatatcacaggcataagactgggtctagatggaaggttacatccctctagtgaaatccagcaaaacatgcgcgagctgaggcatcagagaaatgaccctgtagccgccgcacgcctacaagggtaccagggttttattaaaatgcttaggagttga

SEQ ID NO: 14042 - RNA, 942 nt, synthetic construct
  source 1..942: mol_type = other RNA
atgagcccttggaggccattaggtcggttgattcccacggcgctccgctctatcctcccaaggtttgagcacgattccggtgccatgggcagactgtccactatactcgggttaagcgaggacgagctacgcgcctttcgactgggtccaaggtaccactatcgtcccttcacgattcccaagcctgacggccggaatcgaagactgttggctccttccgctgccttaaaacgcctgcagcgctccttgttggatgaatacctgggcagacttcccgtgcatccatgcgctacagcctttcatcctggggcatcaacagttagacacgctttgccccatgctcgaggaacccggatcgccactgtggacctgcgggacttctttgaaagcaccacagccgcccgggtcaggcgtttctttgtgtcaaaggggtggaggggggaatctctcggcgtccttatgcgcctgtgcacctatcgcggctgtctccctcagggagcgcctactagcccttgtctatccaaccttgtgaacgagagactggatgaccgcctgcgggtacttgcaagacgttcaggcggccggtatacccgctatggcgacgatctggccttctcttgggtcgaacggcccatgccagccggattccaacgcagtatcgaggccgctctggagaggagcgggtacagtattcagccaaggaagggttggctggttagggaggcacgaggacgtccccaagtgaccggcgttgtcctcgcaggagatgggaggctccacgtgccctggagatacaggctgagaacagcatggctgcggtggagaggattctggagtcgcgatccgcacgtacgagcgcagtggagagggaggcaggcataccgtagaatggtggaacggggcaaagctggtccgaggcgaagaccaggacggtcgtcttga

SEQ ID NO: 14043 - RNA, 942 nt, synthetic construct
  source 1..942: mol_type = other RNA
atgaacccaggtcaccctctttcctacctggtgcccccaacccttagaaggctactcacccctgcagggccatccagcgcacatgcacaagcactggcccagctgctcggcgttgccgaagacgagctggatgctatcaggttgggcagaagataccactatagacccattcggggcgcaaagccagacggacgcgaaagacggatactagcccccagtccgcctctgaagcgcctgcaacgacggctgctcgacgagcatctgggacggcttcctatccacccttgtgctaccgcatttcatccgggggcgtctcccgttttcaatgctctgccccatgctcgcggggccacaatcgtcactctcgacctgcgggacttctttgaggccacaagggcctggagggtccacagatttttccgcgaacagggctggtctggggaacctctccgagtcctcatgagattgtgcactttccgagatggtttgccacagggcgctccgacttcgccttgtttatcaaacctggtgaacgttcgtcttgatgagaagttaagacgcctggcggctaggagccgaggcatttacacccgctatgccgatgacctaacctttagttgggtggacgggggaatgcctggcggctttcaacgcgccgtggagaatgtgttggagagagagggatatgagatccagccccgtaaagtctggcgtgtgagccgagctcgggacagaccacgggtgacaggcctcgtgattgctggcgatgggcgggtaagggtaccatggcggttccgggtccgcacagttctgttaaggtggaggtcttggctgacgggagatcccgtggcccgagcaagatggaggggatgccaggggtaccttcgcatggtggatcgttcaagggaaggtgcccggtccaggcccaggaaaggtggatga

SEQ ID NO: 14044 - RNA, 903 nt, synthetic construct
  source 1..903: mol_type = other RNA
atgacaccaaggcaccctttggtgaggttactgccgccttgggggcgagatgtggacgaagcattgcagagggaggctgttgccgatctcctgggcgtggccgtggacgaactagacgccattcggatgggtcctcggtaccactaccgccccttagcggggacaaaacccgatggccgagagcgacgcattcttgcgcctagcccagcactgaagaagctccagaggcgcttcctagatgcgtatctggtcgaccaagaagtgcacccagctgctatggctttccgaccaggcggcagtacgcttgcccatgctttacctcatgcccggagccggcttatcgccgctgtcgatcttcgagacttctttgaatccaccagaggagggagggtcgccagatggctggcagcacaaggctgggaccgtgaggccacacgcatcttgatgcggctgtgcgtatttcgggatgccctgccacagggagctcccacttcacccggcctgtctaacctggtcaataggagactcgacgagcgtctggacggactcgctcgtcgaacaggtggggtttatacccggtacggcgacgacctcgccttttcatggcctgatgaacggctacccggcggctttactgcctctgtggaggacgtactggcaagatccgggtatgaggtgcagccacgcaagggttggagagtgggtgccgccagagacggattcgagatagtcggactggtgctcgcaggcgatgggagagttcgcgtacccagggcccttaggtggagagccgctctgttgaggtggagggccgcattggttggggatccggcaactaccagacgggcacgtggactggcgggatacctcaaaatggtggatcgcgctccccgcaccagatga

SEQ ID NO: 14045 - RNA, 906 nt, synthetic construct
  source 1..906: mol_type = other RNA
atggacctgaatcccggagagctcttgactagactgcttccgaactgcctgctcggccaagctgctacaccaagcgcgcagcggcttgccgacttgctgggtatcgacgtgcgagaacttccagccgtgcgcctcggtcctcggtatcactaccggccttttaccattcgaaagcctgacgggcgcgaacgaaggctactggccccttcacccgccctgaaggtgctgcagagacgtctcctggatagatatctggccgccttaccactacacgccgctgcaaccgcattccatgcaggcgcaagcaacgtcctgaatgctcgccgacatgcacacggacgcctgatagccacagtggacgttcgagacttttttgaatctacacgcgctgcccgcgtgagggctttctttgttcgtcagggttggcacgatgcagagttacatacgctgatgagactgtgcgtctaccgcaatggcttaccacagggggcccccactagcccttgtctgtccaacctcgtaaacagacccctggatgagcggctggagaatctcgctaggaggatgcaagcgacctacactaggtacgctgatgaccttacattcagttgggacagggatcatttgcccgatggcttccgtcccgcagtggaggatgccttgcacgcagccggctatgaagtccagcccgccaaaggctggcggatccatgggattggagacaggccagtagtgaccggccttgttctcgcgggaaacggacgggtctacgtgccgtggagtctaagatggagactctggcggtggagatggcaggcttggtggtctggggatgcgtccgctcctcttcggttgcacgggctggaatcatatgtcaggtcctgtgccgcagtgccagaggcctga

SEQ ID NO: 14046 - RNA, 1197 nt, synthetic construct
  source 1..1197: mol_type = other RNA
atggagcatctcctctctcggttcattccgcggagtctccgaaatctcctcccacgccaatcaagcccctctgttagtgcaatggaaatgcgtctggtgggactgcttggagtatggccctccgaattcagcacaatccgcctgggcaggaaataccactacaggccctttagcgttactaaacgagacggtcgcgagaggcgaatcttggcaccttctccacccctcaaaaagctgcagcggatgttgttgcacaggtatctggacacccttcccgtgcatccagccgcgatggcctttcggcgaggctgttcaatcgtggataacgcccagagacatgcagggcagaagctggtagctaccctggatttggttgactttttcgagtctacaactgccgaccgcgtgcgtggtttttttctgaagcaaggatggcatggagaggctcttagcatgctcatgagattgtgcgtgtataggaatggcttaccacagggggcacctacgtcccctgcgctttctaatctggtcaactatgagatggatgagcggattgccgatttagctcggcgggctgacgccgtgtatacccgttacggggatgatctaaccttcagctggaggacagaacacatccccgcctactttgtccccgccctggtttccatactcactgacgctggatatgctatacagcctagaaaaccatggagggtgaggcccatgtccgacgaaccaaaagtgacaggtctggtcctgggtcggaatggcagaattcgggcgccactgaacctacagtgggaggtcgtgaagttgagatggcacctcttctggcactcaggagatgcccacgcacgcgctagacttcaggggtaccaagcctttttacaagcacttgaagtcaagtacgataaccacaatcatatcaactggcctgacaatctgcctggcctgcgatgggagatcttcaagctgagatggaggctgctgttaagacctggcgactccgacgccagaagtcgcctcgctgggtaccagagtctgctgtactattaccaggctaaccgcaagaatagcgcctcaacctatcgctacatttcggaaggcaatgatgactacaacgattatgacgacgaggatgactatgatgatttcgaggattacgacaacgacgatctagacgaacttccgttctga

SEQ ID NO: 14047 - RNA, 903 nt, synthetic construct
  source 1..903: mol_type = other RNA
atgcataatcctcttgcccattttgtgccacggtgcttgagggaacttctctccattccatcaacacaagctagtgagtgggaagctcagttggcatattggctccaagttccagtcggtgagctccctaacattcggatggggccgaggtaccactatcgacccttcagcatcactaaaagggatggaagagagcggagaattctggccccttccccggcgcttaaacagctacagcacagactgctgcacaactacctgtacacgttgcctgtccatcccgctgcaaccgcatttcaaagaggctgtagcatcatggacaatgccaggcgtcacgccggacagaccctgatcgccaccctggatctcgtcgattttttcgaatctacaactgcagatcgcgtgcgcaggtttttcgtgcgccagggatggagggggaaggaactcgcggtgctaatgcggctgtgcgtatatcgagacggtcttccccaaggcgccccaacatccccatgtctcagcaatctggttaactacgacctggacgagcagatggcctctctcgctcagcgggcggatgctatctacacaagatatggcgatgatctgaccttctcatggagaaacgaccgagtgccggcttatttcgagcccaagctgagaggcatcctgactgacgcaggatacgccattcagcctcgtaaagcctggcacatacagcacatcaatgctggcccccagataacggggttggtgctgggtcatgacggccgcatccagattccccggcggttatactgggaggcattcaagctgcgctggcgattatggtggcgtccagaccctcatactgccgcccgcttacaggggtatgaaagtttttttaacacccccgggcttaggtga

SEQ ID NO: 14048 - RNA, 906 nt, synthetic construct
  source 1..906: mol_type = other RNA
atggtcaagtactcttggcaaaaaattctcagggatatccttcctcagaaaaacattatggctgctaatactgatgacacaaaccttgaaatgctgtcttcgatctttgctatccggattgacattttacaagaagtgagccggagcattcaccgtcattatacgacattcgagataagtaagaagaatggaggcacaagaaacatctatgccccgaatcctaccttaaagaaagttcagtatgagatcttccattacttgcagaacttcgcaatccaccccacagccacagccttcattcctggcggttccatcatcgtaaatgccagacagcacctgaatcaggaactcttcctaaccgtggacatcaaagatttctttactaacaccagtaccaagagggtgcggaatttttttcgcgatcagggctgggagaagcagagcctcgatatgctggtttccctctgcacttaccaaggtgggcttccccaaggagcccccagtagtcctcagttgtctaacgtgataaacatggaactggatgaggagatttaccaagcagcatccgcgtcctctgccacctatactagatacggcgacgacataacgtttagctggtcaacttcttgcatggatagcgggctaaaaaacaaagtcacccagatactgaccaatttcggctacgagatcagcccacagaaagggtggcagctgttttgtgcagagcagcagcccgagatcgtgggagtagttatgggctcagacggaaagctgagggtgccacagcgaattcacgagaagttggacaagctgcatcaaaagaacaatccagacctgcaggggcagatacgcggttatgaaaactacattaaaggggtggaatccgcttcagtctcaatcgcgtga

SEQ ID NO: 14049 - RNA, 960 nt, synthetic construct
  source 1..960: mol_type = other RNA
atgggcctgtttgattttatcgggaagttccttgggacatctgccccggagacagcaagcaccaaagctgcaagcaatgccccagcctccccctacgccaaccagaattactatattaagaaggctgtgtacctaaagtattatttgggacagaacgagaaccaattgaaagagttccgacctgaatacaatacgtttcaaatccccaagcgttccgggggtgcacggactattaacgagccaaaacccgaaacaaaggcgctccagcacaagatcctcagaatgctcaggaatggcaatacgcataaatgcgcagtgggcttcagaaggggcagaggcatcgtgcacaacgccatacctcacgtaggcaaagccgtggttctcaaaatggacatccgtaacttctttccaagtgtcacgcgagaaaaatgcgttaccgccattatgcagactggctgggagaagggggctgctgaaatcctggctgatatttgttgcctgaacggaggactgccccaaggggcaccaactagccccttattgtcaaacatcgccaacacccgcctagactgtagactctacgggctggccaaaaagctgtctactggtacccagaaggtggattatacccgctacgcggatgacataactttctcctttgctacagacgaacctggtcttgtgaggggagtgattacactgattttccaaatactgcatgaggaaggctaccaggtcaataaaaagaagactagagtcatgcggcagcatcaaaggcagacagtcaccggtctggtcgtgaatgaaacaatcaatataccgcgcaaacagcggcgcaaaatcagggcggccatgcaccggatttcagtaggagaagagcctacccttaccaacgagcagcttcaggggtggatgggaatgttaagtctggttcagaagggcaaggaggagtatctgtga

SEQ ID NO: 14050 - RNA, 972 nt, synthetic construct
  source 1..972: mol_type = other RNA
atgaattggctgtcccagcttactcgaggattgcggcgagaacggacaccggccgatttagctcgctggcttggcctgccggaagccgaacttagaccatggctggctagtggacctgcatgggccagaggctacgagtatcgacggtttaccattcccaaaaggaggggcggtgtacgggtgattgacgcgcccaccgagaagctcaaagacctgcagagacgtgttctcaggcgcttgttggccccgttagccccacacgctgcagcaactgggtttcgccgcgggcactcaatcgtggacaacgctcggccacatactgggcaggccgtggtgatcaacctagatctggcggattttttcccttcaatcgccgctgcacgggtcgacgcactcttcagggctgtgggctggaatgctgaggcagcccggatcctgaccgcgatatgtaccctcgatggcgcccttccacaaggtgcgcccactagccctgccctgtcgaacctcgtgtgcagacggctggatgccagactcgccgcattagcccgctcccaaggaggtgcttatacgcgctacgcagacgacctgacgttttcttttccagcgttcggccgcaatagacgcctgaggagacatgccggaagacctacacccggtaggaggcccgctccttcttgggtcaccccacgtagcctgctcggatgggtgagagcaattttggaggctgaggggttcagaatacagttcaagaagcaggttagagtacagcgcccccatcaaaggcagacagccaccgggctagttgtgaatcaggccgtcaacctgccccgagctacacgtaggctgatccgcgccatgcaacaccacgagaggctgggacggttagatgccgcaggacgtcggcgattacgagggcttgaagccctggcaggtatggtcgctaggcagcgggaagagcctcagcgaagatga

SEQ ID NO: 14051 - RNA, 960 nt, synthetic construct
  source 1..960: mol_type = other RNA
atgtctctgttcaactggattaagcaggcattgggcagggcacgctctcctgcagacctagcccgatggctgcagcttccagaagccgaattgagactgtggctagaccaacggcccgcttggacacggggttacgaatacagaagtttcactctgcctaagaagaggggcgggacgcgagtaatagatgccccgacggagaagttaaaagctctgcagcaccgcatcctccgccgactgctcaacccacttaggcctcaccctgcagccaccggttttgtgccaggcttgtcaattgtcgataacgccagaccccacgctggacagggcgtagttatcaatctcgatttggagaactttttccccagcatcactcccgctcgtgtggaagcggtgtttcgcgcgcatgggtgggatgcagaggcagctcggatactgaccgcgatttgcacctatgagaatgcactgccccaaggagccccgacttccccagcactcagcaatctcgtgtgtcgcaaacttgacgcgcggctcgccgctttagccgagtatttcgacggcgcatatacaaggtacgccgatgacctgacactgtcgtttccctcctttggccggaacagaaggttacgtcggcacgctggacgtcctactcccggttggcgtcctaaaccagggcccgctgccccaagaaccttgctgacctgggttcgggccatcctcgaggccgaaggtttccggattcagctgaaaaagaaggtgcgcgtgcaaagacctcatcagcgccagaccgccacagggctggttgtcaatgaagtggtcaatcttccaagagctgtcaggagacgaatccgggctatgcagcacagggagcgactgggccaacttgacgaggccggaaggcagaggctaagagggtgggaagccctggctcatatggtggccaaccagcgcgagggatga

SEQ ID NO: 14052 - RNA, 972 nt, synthetic construct
  source 1..972: mol_type = other RNA
atgaatttcctcaaggcgttcggccgcttagggggtcgcgaaagaggcttggcagagttagccaggtggctgggcctgccagaaacggagcttcgaccgtggctgtctagcgctcctgcttgggcccgaggatacgactacacacggtttaccatcccaaaacggaggggaggggcaaggactatcgatgctcccggggataagctgaaggcgttgcaacggagagtgcaccagcgtctgctggctggcctaaaactgaatcctgctgcaaccggctacgtccgcgggagatctattgtagacaacgcacggccccatacacagcaggctgtggtcattaatgtagatctagcagacttctttccctcaataactgccgaccgggttaaagcggtttggagggcacacggatggaatgacgaagccgcgaccgccttgacgcacatctgcaccctggacggtagattgccacaaggggccccgacttcccctgctctcagcaacctggtgtgtaggcggttggataaacggctctccgagctagcaagacgctgcgccggagcatataccaggtatgctgatgacctcaccctttccctccccagtctggggagaaatcgacggaggcgtcctggtcctccacgtagcggaccagcccaacctcgcttagcccaacgcgccagacatagtaggaagatcataacacagctgcgcgagattattgaggccgaaggctttagaatccagtggaaaaagcggctccgcctccagcgggctcatcaaaggcagacagccacaggcctggtcgtgaacgccgttgtgaaccttccccgggccactcgcaggcttatccgagctatgcagcaccgagatcgacttggtcagctcgacgaggccggcaggagaagactgcagggactggtgaacctgcagcagatggtgctgaagcagcgtaactcaactggcagatga

SEQ ID NO: 14053 - RNA, 1047 nt, synthetic construct
  source 1..1047: mol_type = other RNA
atgcttcgccggcctggaacagctgcagctgccgaagtaggcctgcttgactacgtgcagcaggccgagctgcctgggttcctcatgcccgtcttcgcgagcctgaatcgcctgctgaaacgcgcgcgctcaccgaaggacctagcaaggtggctcgacgttccagagggggagctgagaggttggctgtccggtccagctccatgggctcgtggctatgactacgatcactttactatagccaaaaggcgggggggaacgcgcactattgatgccccaggcgacaagctgaaggtactgcaacggcgagtcctccaccgcctattgggacccttacccgcccgtcccgaagcaacaggctttgtgcgggggcggtcaattgtcgataatgctcgaccccacgtggggcagggcgttgttgtcaactttgacctcgccgattttttcccgtccatcaccgctaatcgcgttgaggctgcatggcgcgctttgggttgggacgcagaagccgccacaatccttaccaggatctgcactctcgatggaaggctaccccagggcgcacctaccagtcctgccttgtctaacctggtgtgtagaaggttagacgctaggctgggtgctctggcgcgatctcttcggggccagtatacgaggtacgcggacgatctgacattcagctttcctggcttggggcggaaccgtagaagacgacctggccctccgagaagcggtccagcaagacgacggccaaggggacccagtaggagagtgctggccaccgtgagagacatagtgatggccgagggattcgctattcagtggaagaaaagagtgcgaatccagcgggcacatcaacggcagactgccaccgggttggtgattaatcgcaaggtgaacctcccacgagccacccgcagactgatcagggccatgcaacatcgtagacgcctcgggagactcgatgatgcaggacgtcggaggttaaggggccttgaagcccttgccgccatggtcgatcggcagagagcggcacccggaaggtga

SEQ ID NO: 14054 - RNA, 954 nt, synthetic construct
  source 1..954: mol_type = other RNA
atgaacctgtttaagagcttgtttaacactgtgtcaggggggcgtagtccggcagatttagctaaatggctggatcttcccgaggcagaactgcgggaatggctcaccaataagccagcctgggcacggggttatgagtacgcgcgcttttctattccgaagcgtaggggcggcgttagggctatcgaagcccctaataagaaactaaaagccctgcagcggcggatacttcgcagactgcttaaccctctgaagtttcatcctgcagccacaggattcgtccccggacgctcaattgtggacaacgcgcgtcctcatgccggtaggggggtagtgatcaacattgacctcgccgagttcttccctacaatcacagcagagagagtgacccaggtgttccgaagtttgggctggggcgccgaagcagctaccatcctcactaacatctgcgcctatgagggacgcttaccacagggagcccccacatccccggctctttctaatctgatatgtcgcaagctggacgagcgattcagcgcactcgtaaaacggtataagggccagtacacccggtacgctgatgatattactttctcctttcccgggctggggcgaaataagaggttaaggcccaaacccaagggacgaccaccactggcgcgacctgctcagggtggaccaggtaggactcttttgacactgatcaaaactatcgtggaagaggagggctttcgcatacagatgaagaaaaaggtgcgcgtccaaagaccccaccagagacaaacggctacgggcttggtcgttaatagacaggtcaatctcccaaggaccacccggcggctcattagagccatgcagcacagacaaaggctagatcagctggacgccgaaggccaaagacgcctcaaagggctggaggctctgatggacatggttagcaggcagagaggctga

SEQ ID NO: 14055 - RNA, 1011 nt, synthetic construct
  source 1..1011: mol_type = other RNA
atggttcagaacgcagataggaaaaaagccgggagagcagtacggcgagagtatccagtcgtgggtgtttttaagtcaatagctcgtattctcgaccgtggccgcggacctgataaactagccgcctggctcggactacggcaggatgaggtcgaagcctgggcgcaaggtaggccaccagaaccctctggccgggagttctactacaataggttcactatccctaagcgggatgggaggacccgcgaaattgatgcccccagtgatgctctgaagtccatgcagcggcgggtgctccaccgcttacttaatccgctgccagccgcagcagaaagtacaggctttgttagaggcagaagcgtcgtgcacaacgcccaaccccacacggaccaggacgtcgtgatcaacattgaccttgagaacttctttccatccattaccgcccaacaggtgcgagcgagccttgtggcctgtgggtggtcaaacacatccgctgacatattaactaacatctgcacataccagggacgactgcctcagggatccccgacaagtccccctctgtctaatatggttgcccgcaggctcgacgcaaggcttgcaggtctggtgaaaggttatgatggccactataccagatacgctgacgatatgactttcagctttcccgctttcggggcagcgctcgactggaaagccagcaccgccgtaaagcaggccagatgcaagctgctgtcaatgatccagatgattatagaggaagaagggttcaagatccagaggaagaagagaattcgcatccagcgggctcatcaaagacagaccgccacgggactggtggtcaattctcgcgtgaatctgccccgagagtttagaaggcgaatccgtgccgctgagcatcgcgagaagttggggaaactgtcggctgaggacaaagctcggttgagaggctggcaatcctggagggctatggtgtctcatcagggcgcacaggcggcaagccctccttga

SEQ ID NO: 14056 - RNA, 2376 nt, synthetic construct
  source 1..2376: mol_type = other RNA
gctgccaagctcgccgggctccccgaagatatagcccgggaggatgtgtccatcgcaggactagacggcctgagactgagctggggggagacgctgttcgcaccagacttagcagccataacacctctgactgaccaggcagggcgctttgcaggcagcgtgttgggttgcgaggctcctgcatggtgttttctccctgtgggtagaatggccacacggctgcggttcagtagcgagctcgagtccatgcctgaatcgatgagacgacaactcgccgacgcctatattgagactcacccgcaaaaggtcgcaccaggccagggaggaatgcactggctgacggctaagagttttgagtgccccgagtgggaggacttatgcgccctccagactagtaaaccaacccccgagctgctgcaagcaatggccaataccagacaacgccgagccgtgaaggaagccatgcggtatctgagactgttccgggatcgcaattacgagaactgtgttacgcgcttcatgggcacagaactctggcggaaggctggcggggttaggctacaccaggatctggctgaagatttggagaaatttctcggaatgcctggggccgtgctgagtgcacctgaaaggcagaggttcgcggctgcggcgattctggatgcggaggacagggaggagctggcaagaaatttttctcgccttatcggatcacgcgtacccgctgagttcgtgttggagcacgtgtgtgcaggcggcaggaaggacgccgtacagctcctactggacagtgccccggacgccatccgtaggagatatattatcgatttcatcgggactcacttgtgggaacgggccggaggagcttcgctacacgaggacttcgcacaggatctggcccaggctctggccagtccctccagacagctggctgagtctgaattatgtcggatggcactgaggatggctgacgaacgccatgacgccagcttggtagccgctgtgttgcccgctctgacccgtagcgataagacctgggcggccgcagagcaaggcgttgaaacacccctgttggtcgaggccgtcagggccattgacgagtccgacattctggaccgggtcctctcttttgcaaaacagccggatatcgagctcgctgcccacgacgccctgcttcagtttcttatgttcgacgaagaaatcctcgaggaacatctttggagggccgagcatcggtgctctgcaaaacgactaccagaatgcgagacgacactcgctcagcttaccgcaatcgccattcgagaacatgggaacttgcgccgcatggcccgacttctgtccgctcatgcagaaaagtgcggtcttaaggggcggcaagcggaagggttagttgcccaggccttacgatctgctgcaaggctggtgtcacggcatggacggcatagggctgctgccctggaacttctctcttgcattggcttagagtgcgctacagctttgaaatacgtgctggccaatctggataggaaggctggctctggccgcgagctggatcacgtctaccatctgtgggaactacccaagaagtccggcgggaaacgaaccatttgcgcccctccaatgccattaaagatcgttcagagagccattcttcaccgtcttctcgagccactgggagcacacaaagccgcttacggattcgtgcctgggagaagcatcggtcagaatgctgcactccacgtaggtagcgaagtggtggcgaacacagatattagcagctgttttccttccgtgaggtggcagttggttctgggggtcctccgtcgggacttggggaaaactctgctgtcaggaaccgtgtcactggttaccgacatctgtactggtcagggcggcctacctactggcgcaccaacctccccggctatactgaaccgtgtcctgctgaaaaccgacgagatacttacagcagccgcagctcgtcgaggttgtacttactctagatatgccgacgatctcacattctccggcggccgaggcgcggttgaaatgcttggtgtcgcccgctcaaccttagagcggatcggactgaagttggatcccaagaagacaaacatctttaggaggggcagacgccagacttgtaccggtctggtggtaaacgataaagtggcggtgccaagagccatacgcagaaggcttcgtgccgccgtgcacgctgtcgaacaaggacgcgaacccgcctggcatggacgggaagataccgtggctgccttgggcgggagactcaattttcttgcatcagtccagccagagaaagctgcgcccctcaaggagagactggcgagagcgctccacggagggaaagataggtga

SEQ ID NO: 14057 - RNA, 3327 nt, synthetic construct
  source 1..3327: mol_type = other RNA
atgactgccaacggggaggcacggttcgccgaagtcatcaaggcttttccaaccctgagtgaggctgaggtgttgagattgagttacgccttctttaaatctgagcccgagaatcaggcaattctcctgagtatcgctaaacggggtgcactagctagcgtagcccaagacatcgaggcccagtatccccctagctctgaggctgccacctacttgcttaaaggggaaaccctggtgcttccgggcttttgcactgccctgccaacagaaatacagctgcggtacctgctcgcgaagtgggcccattctagcacgcccaatgtgctgcagttagtccagaagttatcctcttttaagggcctaaaaagcttgatgctccaagccgagctgcaggtgctggtcggttacctcaaggcacactcgatttgggtgacgaagtgtgagcctgaggccactctcttgctccccaaggatttgatctccgggtttatgcatggagatgtggctgacgagtttttcctgggcgggagcgcgctgcaacatctggaggacttagctaattgcggactgcggtctattctagtatcagtgaataacgcctgggaaaaactcgaattcgacaagttaaacgaactcttcgaaagggttccaaatgcacttatcgatcacccgttgcagccggatctgcaagctgccctgaagaagagaatgatctcaagtagcaaacatacactggccaaaaggttgaagaggaagaaaaaccagacttggaactttatggatcagcgggtcgctaccgcactctctcatctgctggggttcaaagttccccggtgggccatcggtgatcacgaggctttcagccagattctcgtagaccaaaatctgctccagtgtttcgatgatcgccagctgcagaagctgatcaacgagatcggtatgcccgtgatgacagcgtgcgctgcgcaatctgcaacacagaaactggtcaaaaactatcctgaagcctacgcccctctgcctttgtctactatttggcgtgctgtcaatagagaagatatgttcaaggtggttggctggccaaaaatcaccctcgagtccctgaccttagctttaaatgcaggaatcgcccagcagaagctagtatggctgtcaggatacatgaaggccgtggatgctagtcagaaggaggcaattcagacacttttactgaccaagcatcttaaactcgctgcacgagtgattgaatcaaccgacccttgttggctgcaggtgccaattaaggcttgcgtcgagaatggcctttggagcgtggtccttcaggccgacgccaagagggtcatggatgaggtcccacggcgtttcctggtcgataaagtcctggggaactgtagaaggaaggccttctctagagatcctttcgaccgcatttatgacgaccagctccttgaggcctaccgggctctgacatcgaacactgctttacgaaggcacttcgtaacctctctgctcgagagatcctggtgcacagaccacaaagggaccggctacctcatactgggcggacgacgcttttcatatgtggcgttggcaactgagctgctgaggtgtaccgcatttgtcggagatcgcgactatagaaaggaagtggtcgtgcaaggccttaaatccgccaagtcacaatcccaccggcagactctgctgaggctgatacaacaagacgttatcgagactgacatgcccgaggcctggattaaagccgtgctctcgtggcccaaagaggttctgaagacactcctccctaagatgactggaaagttgctggacgcatacgtggatcgagtgggtgtaagaggcctgaatgcatgctacgcgacaagtcccaaggccctttcatccagacactttttcgccctgcgcgttactcgccttaaaaagggcggcgtgtggccagaagaccgcctattgaagagggacgaccacggctacgacgaggtgatagaaactgcgagcaatttcctcggcataagggaagccagatgtctggacatgtgcctcgagcgcatggcagataaaggagaagccgtgctgcagtatttgtgtgaacatgccaaagacgttatgagtcatgagctcacccggtgggttgatgtggttcttgccagatacgcaattgccccagaagccagactgaaagctctaaccagcgatgtgacgaccgcagatgtgaaattctggcctcagcagggtccggatggcgacgaaggtgatgtctacgcgtatttgcgggtacaccacagtttgaaggctctgagcgaagtctggtcagcccgaggtgtggtgccagataacgtgaggacaattatggccagcaagtggcccaacgatgctgcatggtttgagttaatgctcgtgctagggccttcatatgtgtccctcatccgccaggtaatgggaatgatggattttaaggctccatttgggtctagattcgacgcccattataggcactccaccatccctaaaaagtccggaggcgtgagagacatctacgcgcccgaacgggccctaaaggcccttcagacccttataaacgttaagttactgcaacccctcggtgctcacgatgccgcctttgggtttgtgcccggcaggaacatcaccgggaacgcggagcgtcatgttgggcagagcatcgttacaacggccgacatccactcctgtttcccaagcgtgggccgaggtctagtcgtccacgcactgaaacgggatctcggagaacggttgtcatatggagcaatacttaaaatcgctgacatttgtctctcccagggagtcctgcctacaggtgctcctacatcccccgcattgctcaatcgtgtccttctgagaactgacgagctgttaacagacgcggcaaccagtaaggggtgtacctatacacggtacgccgacgacattacattcagcggcggcgagggggcagttaatctgctgggcgtggctaagggggtgctgaagccgattggactgatgttggaccccaaaaaaaccaatgtttttcggcgtggcaggcgccaatgctgcactggacttgtggtcaacgaccgcgtgtccgtgaaccgagaaaagtgccgcagactccgagccgctgttcatgctctggagatggggaggccacttttgtgggatggcaaaccagaaaccgtggcacagctgcgcgggaggcttgcttttctggcgtctgtaaaagctgaggagggagcacgactgatggcccgcctagaagctgccctgcgtcagaagacgacggtatgcgcacagtga

SEQ ID NO: 14058 - RNA, 3681 nt, synthetic construct
  source 1..3681: mol_type = other RNA
atgaaaaatttccgccaggccaaagacgagtcttccttttctctagagattcgggacgccgtgaatagtctggattttgctattcccagggcactacccaggggcgatccatttgcgcctagcgtgcccgaggagtactggaagaagatccgctccgccgttgaacagttgtggcccgcacgggttcggcccttgtttaaaggaaaggatgaggcccgcgcttatcaggaggcctggatctcagctgcgtattctcctttctgggactgtctgcgaatctccgcgttgtggtgtgcgggccaacctggcaggcaagctctgctagaagcagtaagacaggcagatgcagtccctagacagtatccccctgccgcttccccccttctgaaagcggtggaaagggggccgcacaatccctacctggacgaggaatctgccctggataagtacagagaggtctttcctatagggagtttcaccccacctattgacacgtgtatgaagttaggacgcctcgtcgtagaaagcagacggaagcgaccagcctgcgtgtctgcatgggacgtctttcgctgcctccctccaacactgccacacctgtcatgtaggtggctcacaagaacgcttcttgggttcgccgatgcgtgtgccagactcgggatacgaattaagaaaatccctgctgcatgtgccgcctttttgggtcgagacgccagcattgccatcaggagtcccgcagtgcgtagtttttttctcctaccaccaaaaaaagacttttctattgatgtgcgggccccagctggtatgacactgctgggatatttgttttacgccttctccaaaacaggtgagtacgaggccgtgttcatcgtgtccgagagcctgcttcgggcattttctggcgagccaaagctgctgaggaggttcaaggagagccctgggtatcagctgttccttaaagccgccgttcaggaggagcccacacccaaagggaggcgcgattggctgggagaaagaagatccctggaaggcaatcccagggtgggcgctctgctccgacacctattcggcaaaattctgccgggctggaaccggagtggacaggcaagcttcctggtagaactggccaaaggagccagggctaactgctactttccgagggagtatcagcgtttcctgttactggtgagcagcgagcgtcagaagaggcggttggaggaaagtggccactggctgcagctgtttgacctggaagacggctgtagaaaaggagctgctaactggaaattcattctcctccaggagtcgtgggatactgtatggaacgccaaggatcggttgcaggaggagcttaccgcggagaaagacgccagcgcttacctgcgattcgtcgcgcgtcatcatccttccggcgacctctcactggacttctacaacaataaaaagatcaaggagcggtttatctatgacttccatggttcccccctttgggagaaggccgggggtgcttgtctggagccacaacaggcggaagcactgtgcttcgcctgggggtctgctagctttaggggtcgggccggaagtttagctccagcgctggaggaggtcgggccatattgcctggaggacctcctggctctgatgctaactcctgccgggttgaggcgctgtagaggtgctctcctgcgggttctccccagagcttccgcggatgcagttcgccatatcgccgacagatgcgaagagggtgatgtgctccgagccattgccctgcatggcccggaagaagctcgtgtgccagcagccctgcgagcttacgatcaactcgcacccggcaaagctgcagcattgggcaggaagctcttcctggcaggactgccagttcgcttagcgcccggatggctggacaggggatcatggagcgccgagaagctgttcttggccctctgcgagctctgcggcgatcctgatagggccgggctgagacaagcccttgaggcgtgtgctcccgaacccgctggatcaaggcggctgagcagaaaagcacgtctgatcgttgccagacttgcagcacgtgctgctcggcgctttgaaccaggtgaggctggagctgctccaggggctctgtcagctcgcgaagtcggactcgcagaatggctcctcagggaagccagatgctgtgcttggggggccgcctcttacaatggtccaggccagagcatcgcccctgcccttaacgagatcgggcccaattgccgcgaagatttgctcgcgcttatgttgactccagcaggcgtacgaaggggaggaggggcacttttgcgcgtattgcacaaggccccagcggaagcagtgctggaaattattgatcactgtaccgatgttgaggtgcttcaggctatcgccttgcacggccctaaggaggcccgtgttcctgcagccaggcaagcatttgaccgcctccgcccccagaaggcaatcgagcttgccaagaagtttttcttagccggactgccggttcggttagcctggggatgccgggacgtgaaatcttggacccgcgagaagctattcctggccctatgcgcttcttgcgacaagcgggacgctaacgagctgtgtgaggtcctggatgtatttgcacgatcgttccaggggcccgacgctgaagctgctgctagaggcaccctcgaagaagtggccagactggcagcaagggccggcagactcttagtaagcgccgaagcggggcttgtggccggattatggccaggcaagcaagcaaggatcgtgaaatggctgatttcggcaatggactggaaagccgctcctggttgccgcctccagaagtcttatcgccgtttccacatccctaagaagcatggcggcaagcggctgatttcagagcccattaagaagcttaaattcctacagagaggggtgctcgagaggcttatagccccgctgggagcacaccctgcagctatgggcttcgtggccggcaagagtatagccgacaacgcgtctgtccactcagggcaacccgtggttgcagtggccgacgtgcataactgcttcccgagtgtcgcctggccggtgctgtacagagttctcgagcgcgaccttggccctcggttaggagctccagcatgcgcactcatagccgatctttgcaccttggacggtggattacccatggggtccccggcatccccagccttactgaatagagtgctgtttaaagctgacgagatcctggcctccgaagcgaagcgcaaaggctgtcgttacaccagatatgccgacgatcttgctttttccggcggtgaaggtgccgtcggcttaatcgccagagccggcagtgtgttgtcagctgccggcctccgactggatcctaaaaaatcctcggtgtttcggagaggaaggcggcaggtggtcactggcctgacagtgaatgcgaaacccgacgtcagccgagattacaggcggcgcgtcagagcagcagctgatcggtggcgcaaggggctcgaaccttcatggctggggtgtcctgtcacccgagaacagctattggggcggatagccttcgtcaacatgactagcgccgaggaagctgtgaggttgcgaaagtggatgagagaaggagatcggctgcgcggtaaaaaggggaaggccgcttga

SEQ ID NO: 14059 - RNA, 3000 nt, synthetic construct
  source 1..3000: mol_type = other RNA
atgacagcaccagacccccgccaaaggagggctgaagacctctgtgctctgctggagcagcagggagcagatctgttcgcagcgcctaggatggccggattggacccatacgctcacgactttggcgcctgctggctgtccgagttcagtgccggcttagccccactctggccagcctgtctgagcctgtttgggcggcagctgcccaaacaggccgtgttgcagcagtgctggtctgtggctatggagcgccccctgtggttagggatgctgtatcgggcagcctgcgcggcaggcttatctcctgctgcgtcacccctgctgtgggctgaagcaagccggctcaaggccattaccgctgctagatggagaactgacgctatggcagttgcactcatggcggctgacgctgctgccgtagtggttcccgatctcggcccccaaacggccctgaaaggaagcctaaggctgcgctaccggttggcacacctttgtgcaacaggcgccgccctccagggactgatagacgctgcagcccaccagtcaggagtcactgattatcagcgcagagtggaactggcacgagccgtgcacggtgctcagtctgggggtaggaggtggcggccacttcgagaggtcgagtacctgctgctgactccgaaaagccgacagttggtgatcggaacgcctgccttgtggccccttcttctcggcgccgctttgcaaagactggcggccctcccagatcatctagctggtcgaatcgccgaacgtgattccctcagccgatggttggcttctatgatgctggccctgagggaaagacgcttggaccaggcaggggccgacattgcaagactggatgattccgccctcctgaggcagcttgtgctggtgttaagaagagagcaggcagggttgaggcgacttgatgctgacttcggcttagccactttacatgggagtgacgggagggcatgggcccctatggaggcagtagcccttgcccggctatcctccctttgtggccgcgcaatgccagtctggtgggccatgtcggccggtaaggtagctcagcagctcgccgttggcgccctccaaagtagtgagttgcctctccacgacctggtgctgctgcgtcgtggctggtgcgaagccgacgagctcttactcatagcggccggcaaaggagggctactccttgccgacgcagttggatggaggagcgcccctcttaccgatctcgtgcgcgtcgcaaatgagcccgggaagtttggcaatttcggcaggcaaaaactggccgacagactactcgccttgccagacgctcggccgtggcttctgtgcatggctggtcctcaggcacccgttttacgcgccttggcagaccgcgccatatcagattgcgcacagacttttgcgcgatcctgggggcggtttgtgtcttcttctattggcacgcccgaatggcagggtgtgatcgacgcggtgcaggatcagcctgggacatacccgctggtgttcatgtatggactcgcactcctggctgatggcagaacccccgtggcaccccaaggattcggacaggcaatgctggcctccctgtgcgtcgccgttggagatggggctgcaccactatcctcatctgccggattaccgggaccacttcccgagcaagcggcccaagctgctgccctaagcctgtcgacccaacgcctgttgcggcacctgttgcctgccgtactgcgctggctcgagttagacccccaggccaccgatggtctggtagacgagggcccagagcctctgctgatggcactggctgcgcatcctgaaagtcctctgcccctgctggatcgattacgtttcagtagcagacctgtactgcagagagccgcctggaggcagcgcttgcatagggtgtcctctctggacgacctccgtgatctcacactgcatctcccaccacaggtgggccttctgccgtggagaacccggtggcttagcctggctgccgatgacgctttgcagcgggcggtgactctcctagcctgtgccagacggaatggttggtggctccgggctttacacaagcacctaggggagcctctgtggttggatgggctgcagggggctatcacactgctgaaaggcagcgcagcgagagaagccgccatgctcgaacttgtccgtgctgtgggagcagaacttgcccccccgctgatggcagtgtttgcggctgctagacgatctgctgcccctgggcataagctcgatgcatcctatactcgctcactgcggcccaagaagagtggcggccaacgcgttatcttggcgcctgggagggcactgaagcgggtacagagggccgtcctggatcatctgctgctgccactggggagtcacgcttgcgcatgtggctttgtccccggccgatccatttgtgacaacgctgctcctcacgtgggacagccagtggttgtgaacgcagacgtcagcaactgcttcccgagcgtgaagtggcccctagttctgggagcccttcggagggatctgggccactccttggcccctgtcgctgtgtctatgctcgtcgacatttgtaccgctgagggtggccttccagtaggtgccccaacctcacctacacttcttaaccgtgtgttatggagatcagatgaggttctcgctcaggctgccgagcaacggggactgaggtacacacgttacgccgacgatttgaccttttcgggcagcgacaccgccgtccagatgcttggggtggctagacgcaccctagcgcagatcgggctcgctctcgatcccaagaaaacaaacatcttcaggcgcggacggcgccaaatggtgacaggtctggtggtcaatcagcaggtgtcagtcccacgacatattcgcagaaggttgagagccgccgttcaccgggtcgaacaaggcggtgttgcgcagtgggacggcgctgaacaaagcgctgccgcctga

SEQ ID NO: 14060 - RNA, 2934 nt, synthetic construct
  source 1..2934: mol_type = other RNA
atgctcgacgtgctcaagctcctgaatgcacagcaggatcgccttcgaacgaccctgacggaactcgaccccttagccccccagtttgccgagactgcttggcaggcgatagccgctctggctgaacctctgtggcagccgctgcggcagatggtggatacagagagggacgtgtacgtactgcaacaggcttgggctgtgtgctggaagagccggctgcatgttgcgctgctctaccgagcaggaatggcgaaccctgcgacgcgggaagaagctctgcgcctaaggggtataacactggagaggtggcaaaagccactatcccccaaggatgacgtgcggcagcatgatctcgtcgccttcctgatggctgctgacgaaaccgaagctggagtgcctcacctcggccgtaacgcgtattacaagggtagcatccgccttcggtacgccctggcccatgcctatcgctctggtgccgccttaccggcactcttgcacctcgccagcgtgcaggcatgcgttaccgcttaccagcgcaggatcgaattttcacgcgtcgttcagcagggcgctattgacggacggatgtggagaagactgggggcaactgagtacgctctgcttagcctgagcgcccaggagttactggtggacgccccagccacttggccacaagttctgctccgacctctgaacgacggaaacttcctccagctcgctgcccagttgacggaagagcgcaaacgcctcaacggcttgctgtcagacctcatgcatgctatcagaatgagacatctggggaaagccgatgctatcttagcccaagtccccgataccccactggcccacgcactgtcccagagattaaagcgagagccctggggtctagatgacgccatgacgcacccctctatgcgacccgcgttcggaccgtgggtccctatgagtaaagccagtctggcgcgcttaaggccctgggcaccacaagccttacccgcctggtggggactgagtgctaccgaggtcgcccaggctattgggtcaggcgagttagtgccccaagagccagccagcgctataacccggtatataactagacaggacctggctcccctccaaagaacctggaccagagacgagcagctaacaattatcaaggccggtgcaggaaacctactgccaatggcagccccagcatgggatgacgttccattgcacgagctggttcccactcttcaagccatgaggtttgggacacattctattctggcacggaggcttgctgcgttgcccgatgcttcagaatggatcgcattgatggccgacgctcctgacgccgatcatgcacggaagttacgagagctcgcccaggccgccattgacacctgttggcacggcaataggatttcctgttggtccgagtggatcgtgtcagcatggggctgcgcagggtgggacagagtgcaacagatcgccctggcgcacaccactccactaaaagcagcagtcgccatgttcgcgagttcacgcatgccactcctccctggggagttccaggcagtgttagctagatccctgcaccacgctgagttgttgcccccacgccctctgccttggattaggcggtggctttcttatgatcctcttgctgcaagagctcttacactgcatgccccgttgctgtggcttgaacggctcgcccgcaacgtggccactcctacacagactcttgacgcccttcttgcctgccagtatgagtcggtggtgcggatggcttggaggaataggctgaaacgagtgactaggacagaggaactggccgagctagccatgagacgaccaaagggagcgggacctgccggatctgtgtatagatggctccagctgcccggcgctgatagaaatgccacactggtactaatccaccggcatgatgtgcgcagactgcgtcttttgcacgaggagtggggctctaccactttcgatgccgcttgccagagcgcacagcagcagttgattagcagggcagacgctggtgaacctcaggctagacgggaagccgccatgctggagctgcagacccgtctcgggctggattttgcagaacatatgcatcaggtcctgatgctgttgacccgtgacgccccttccgggcacaaacttgatgcgtcctaccgttctttcgaaatccccaaaaggcactcaggcatgcgacgcatcagtgcgccccacgctagcgtgaaggctgctcagaggatagtactgaacgcacagccacacgtagggcagccagtcgtcgttaacgcagacatccgaaattgtttcccttcggtcagatggcagctggtacttggcacccttcgcagggagctcggcaggcaattgtccccgacagcaattagcctgttgacagacctgtgtacagcacagggggccttaccagtaggagccccgaccagtcctgctcttctgaatctggtgctgagacgcaccgatgaagtacttagccacgctgcgcaacgcgtcggtgcacagtacacaaggtacgcagacgatctcacatttagtggggatcacagagcagtgggactcctccggctggccaaaaggactctggggtgcatcggcctggagttggaccctaggaagactaatgtttttaggagaggcaggcgtcagatggtgaccggcctcgttgtcaatgatcgggtgtccgtccccagagcactccggaaacgtctgcgggcggtggtgcattccgccgaacaaggcattgcaccgcattggaacggacgcgcctgtgccgatgatctctctgacgttcgtggctggttggcctttatgggcctgttgcacgccccccaagctgcaagattgcgagcccggctaaatgccgctgccccactggatcaaggtgtgcgggacgcatattga

SEQ ID NO: 14061 - RNA, 1386 nt, synthetic construct
  source 1..1386: mol_type = other RNA
cggcgttggttgagctacgacccactagccgctcgagctctgaccctgcacgctcctctgctgtggcttgaaagactagcgcgaaacgttgcaactcccactcagaccttggatgcactgctggcctgccagtacgagtccgtagtccgcatggcctggcgcaacaggttgaaacgcgtgacaaggactgaggagctggctgaattagcaatgagaagacccaagggagcaggacccgcaggttccgtctataggtggctgcaactgccaggggcggacagaaacgccactctggtactcatccacaggcatgacgtgcgcaggcttcgattgctccatgaggagtggggctcgacgacatttgatgccgcttgccagtctgcgcagcaacagctgatatctcgagctgacgctggagaacctcaagccaggcgagaagcggccatgctggagctccagacacggctcggccttgacttcgccgaacacatgcaccaagtcttaatgctgctgaccagagatgcaccaagcggtcacaagctcgacgcaagttatcggtccttcgaaatccctaagaggcacagcggcatgcgccgcataagtgcccctcatgcttcagttaaagccgctcagaggatcgtactcgataagcttctgcagccccttggggctcatctggcagcctgtgggtttgttccgggccgcaacattgctcacaacgcccaaccccatgtcgggcaacccgtggtggtgaatgccgatattcggaattgctttcccaacgtgcgttggcagctggtgttaggaacactgcggcgcgaattgggccgccagctaagtccaacagccatcagcctcttaactgacctgtgtactgcccagggggccttgcctgttggtgctccaacgtcacctgctcttctaaatctggttctgcggagaaccgacgaggtgctgtcccacgccgcacagagagtcggtgcccagtacaccagatacgccgatgaccttaccttctctggcgaccaccgcgcggtgggtttgcttaggctcgcgaaaagaacactggggtgtatcggcctggagttggacccgcgaaagaccaatgtatttcggcggggaagaaggcagatggtcaccggcctcgtggtgaacgatcgtgtgtctgtgccaagagcactgaggaaacggctccgggcagtcgttcacagcgcagagcaggggattgccccccattggaatggccgtgcctgcgctgatgatctttcagatgtgcgtggatggttggccttcatgggactgctccatgcccctcaggcggccttactcagggccagactgaatgctgcagcaccactcgatcagggcgtgcgggacgcttattga

SEQ ID NO: 14062 - RNA, 1497 nt, synthetic construct
  source 1..1497: mol_type = other RNA
agcttcaggcaggtggtagcgcggagtctgcatcacattgagctgctgcccccccgacctatgctctatatcaagcgatggattgcccgcgatcctgcctccgcaactgcactcgcagatcatggccccgtacactgggtacagcggttggtcgcgaatacaacgaccccgctcgccgcccttgatgccttaatagcttccgaagggctccctgcccctctgagaaggttagcgtggagaaaccgcatcgccagaacgcgggacgcccaaactctcgcagaattatctgcccgcatgccagccaacacaggccattttgatcagctcaatcagtggatggtccagggaactcaggcctccacagcaatggcactcgtgctgaccgcacgcagagatgggcctaggctgctccaactccaccagaggttcggggatgaggtgtttatcaccgcctgtagggaagctgctcaactgctacgccagatggcccaggaccccactagcggtacgagacagtcaggccgacacgacgcagctgccctggaactgctgggtcaccttggcgctcaagcggcaccccacttgatgcccgccttggctttatgcaggagccagcagccggctggatgtaagctagacggcgcctacgcccaacatagaatacccaagaaaaatggcacactgcggcttatccatgcgccccacccagcactgcgaaaggctcaacggttgattctggaccagctcttagcccccctaggggcacatcctgcagtgtgcggatttgttgccgacagatccattgttcacaatgctctacctcacgtgggccaggccgtcgtggtgaatgcggacatcaagaattgtttcccctcagttcggtggccgcttgtccttggagctctgcggcgtgagctgggacactcactgagccccgctgctctgtccctgttggtggacttgtctaccgcaggaggtgctctgccagtaggtgcgcctacaagtccagctctgctgaacctggtgttgcggggcacagatgaaaccctccatagttctgcagagcgagcggggctcaggtacactcgttatgccgacgatctgacattctcaggcaacagtcaggctgtgggtctactgcgccttgccgaacgtactctggcccagatcgggctgacccttgaccctgccaaaaccaatgtgttccgccgtgggaggagacagatggttaccggattggtcgtgaacaaccaagtctctgttccaagggctgctcgcagaaggttacgggccgcagttcaccgcgtggagcttaaagagcagccacattggaacgggcagccacaatccatggcagctctgagaggcaggctcgcttttgtgtcgatggtctgcaaaccgcaagcccagccactggtggatcggctccagagagctcttgcccaggacgagcgacccgattctgagcctccaagcccacagggaagcttggcctga

SEQ ID NO: 14063 - RNA, 2466 nt, synthetic construct
  source 1..2466: mol_type = other RNA
atggccctcaggcctgccagaggtaatctgcctctgcccaccctagaggtcctaaggccaattctcctgaagagttttggcccccaaggaggtagacgctccttcctgaattccattccaagagtctctgggctggcgacatgcttggaagagggctttctgcaaggcctgagcccactgagccgcaccgaattcgatgagctaccgagcgccgtgaggagatggttcttgggatgtcctgcgcttgtttcagttggcttggacgaggggtttcgccgagatgtggccagtcaccccgactcccccgaaatggtagccctggagcactgggagcagaaagttctgccgaaagccctccatgcgatgcggtctggaatcctgtccgaagcagacggcttcccagcaggcttttttcggaatccactggcactgcgtcaacaggagccaatcagacaggccctccggtcacggaagcacttgtttgggccttctgccgacttcctcgggcaggaactgcctcaggccgccatcaggcgatttgaccctcgcaccaggcgcctgttacagtttcatggtgccagggcagaccagcggcttttggggggaccaggggatgacctcgaatccctgttacaacttgtgcgcgacacaaccgtggggcagcttgcagacgcaattcaccaatgttcatctgagggccccctcttagatctggtgcgactccaccccactgagcccgctgtcagggaagcaatggaaagagtgcttgggatcccaggcctgagatgggggttgctgcggatgctgggcagacctgtgctgcaagcagccggggaggatgcgctcgtatccatcttacgagccaaccccgatgtggtgacctgctgtgatgtcgagctcgctaacaggccggaattcggtagggccctcgtgcgatgctttaggagccgcgatggggctgctcgtgtgttgcacaggctgcccggtcgcgctgtttcagccttactttcggagacacaccctgtagtcggactagggggtgaaattgctcaggcgggggcacggagcagaaatcgaccgactcggtgcgctatcctggctctgttggttcgccacgcaccccgtttgatcgagggcacgtacgggtgggtcattccagctggcatccatcaggacgtggcacgcagggcactgtatcacagaagacatggtggactcggcgccctgttccggtttactgaccggaaaggacgccctcattggcaagagactgtgaggaagaccggagctacacctgccttgcgcagggtcctcagaagagacaggcccgacctgataccggagttgcataggtgggatgcattgcgggcgctgaaaacgccaggcttcaggcggcgactggtggcattcctcgaaggagatttcgaagtggacctcggtctggctccagccgctctgagacacctcgtgccttgggtccggaaacggtggattcgacagcccacagttgccctggcatacgaaatcgctcttgccctttcgccccgcgacgctagataccttctggccttgtgtacacagcgtgcaggaattgggctcatgcccccagggggcactgcattcgatagtctgtatagaacagtgcatataccaaaaaggagcggcggtacaagagcgctgcaggtgccgaatccgagcctgaagcggcttcagcggaggttccttgcccacggcttcgacgcaatccctctgcatgatgccgcccatggattccgtaagggacggtcaatcctttccaacgctgggccccacgccggaaaaccctgtgtggtgaacgtagatattgagggcttttttcccggcaccacctatagaaatatcttacgagcttgctctgagctcgcggatggagctcttagcccagctgccaggcacgtggttgccgatctttgctcttaccagggagccctaccaaccggtgctcctacgagtcccgccattggtaatattgtcctacgggcggccgacgccgccataagtaaggctgttcatcgcttcggcgtagcctacacccggtacgcggacgacctcaccttcagcggtggtactggctgtgtgggcgcattgcgttttgtcgagaaagtgctaggagaattaggctatcgcctgaacgctaagaagacgaacatatttcgacgcggcaggagacagatggtcactggcctggtagtcaaccaggcaccacacctgccccggcgtactagaagactgatccgcgctgcagctcacagagccgctacaggaggggaaattcagtggaacgggcgacctatgtcccgccctgagctcgagggccgtatagccttcctcaagatggtgcatccagaggaggccagggaactgctgggacggttaggcggcgatggagctcctggaggagttcctggcgggaaggggtctgcctga

SEQ ID NO: 14064 - RNA, 3114 nt, synthetic construct
  source 1..3114: mol_type = other RNA
atgggggtggaccctaaggtcgatagggccgcactggccctggctagctccaagatgcaagtcgacgtttcagccgccactcttaagctggaggatgaagcagtgtccgatgtagatgagatccacgcccggctagccgaaatccttatctccaacggaaccaacggccggcggcttagggaagaggctagagacttagcacgtgaccgacagcgctgttggcgtggtcgggctaagtcccgaggcataagcgtagatggatatgcccgcaacctcatcgccagtgcgccaagacattgcctttgcgaactgattttcgtgtacctggatgccgaaaaagcttcagaggaagggttttcaaaggaggtggccgaatatctgaagaggagtaggaccaggagatctaacctattccgacaacttctggagacaaacagggtaccgacttctggagcgctcctgcgggtgctcgagtttagcgcaggtaaaattacccctgtgttagccggggaggcttttgaaggaaagtgccccgagaaagaaatagccccacgtctctctgccctttatcagtacgctagatctccggaagaggcagatgctttttgtatgaaatttggccatgccgtctttgatcgagagaagttcgactctctgtctcggaagctgaaaagtcgcatactgagtcagaagaaactgtccaggcgtctcctgacctccgacttccgacgggaaattgaaaacgatcctctgtcccatccagatacacccgagagcttgcacctcgctgcaacgcctaaacggaaccgggaggcatttcgacggatcgcgagcggctcttggcaacacgaagaagttgaggaactgatcctgagcggagctgtccatcagttcgcgagcaggatcgacaaactgttagcccgcaaggcctcttgggtggagcactcacggtcatctgggaggtattcctgggacgccgagagcggctggaagacaaatcctttcgagttggtgagcagtcccactagtaagaccgtacgcgaagcgattgaagcaattcggcctcttgccctgcatgacgatttgttcatcctgcagctggagactttggatgaacgcgccaagtttcttggcgatttgccatccggacggaggcgacgcatttgtcaacgtctaggtgagaaaccctatcttgagatactggaaaaagccgtgggtctagatagaggactcgctgagaaattgctgcggtgccgtgagaaatctcgtgagacactgagagagcagtttatacctagaagaagctccgagacagctatgattgatctttggttggagtgctttgactcccaggaaattttccgcgagttttttaagctgaagcgcctccaaggccggtggaggaccgtcttagaatactttgtgcgcgcaccgtacacccacctggggacatggcgccagaaggaaaagaggggcaccaaagggccccttccgtcacgcttcctgaatgcagtcctggagagcggtggagactggagaactttccagacagtaatgactcggctcaaagccgaagacttggctagactggtcgagcacgcacctgaccggatgcttacatggttaaccggcatctcggagggcttatcgtccgggaatagaaaccaggagttcgcctgtttcttggatgctatggtgcccgccattccaaagcgcttaggagacgtgctaccaagggagatgagcgacactatgttccgaaccaccctggagaagttggccggcccaatcagaaggggcgtgctcacaccaagcggctatagatggctcctgaatcgcaatacgagaggtggagatcccgcatggctggagctactggaggccagcagagagcgcaatcttagtccctccgaggaccccgcacttcatgttctggctagcggcatcctggcattaggggggcgcgacaggttccgggttctgttcgaagcctatcccactctgtacttcggtgaagccctggagaggctcgacttgtggactgtagtgcgacagaccttcgaccacccatccctcgccagatggctggagaggaaaactgaaagatctaaactcgttgtgctgatacccaaagtacgccgggaatatagatcaagaccaacagtcgctgccgctctggaggtggcgcttcgattttcactcagcgatgctaggtacctaaagtggctggccctgaaacgttggcaggctagaccgtgcgctgagggaaccgcgtttgacgacctctatagaacgcatcgtctccctaaacgggcagggggaagtcgggttatcacagcacctgagccccgactcaagaggctgcagcgaagactgttaagaaacgggttcgacgagctcccccagcactcagcctctcacggattccgccaaggccgctcgatcgtgtcgaacgcggttgcccacacgggaagggagatggtggtcagggctgacattactagtttttttccttctactgggtacgcccacgtgctcagatcatgcaggttgttagcggacggccaattgagtgaaggggcagtgagactcgtcgccgaggtttgttgttacgctggtgcactaccaacgggcgctcctacaagccctgtcatcggcaatctggtgctgaagcctgtcgacgcttccttggaggcggccagtaaaaagctcggtattatctacacacgctacgctgacgacctggcattctctggggatgatggcacccagaagattctcccatttgtccgaaaagtgctgtccgattacgggtaccagtccgatccaaagaaagaacacattttccgccgaggacggaggcaagtggttaccggcttggttgtgaatgagaaggcacacgtgccaagacggatccgcaggcggcttagggctgcagtgcatcacgccagccacggaaagaatccccattggcatggccacaagatgaacgaaaccgagctcctagggagactcgccttcctgcagcaggcacatcccgaggaagcctcagaactgcgtacccagttgcagcagagggaacatcagcgggataggaagggtcaggaagaatga

SEQ ID NO: 14065 - RNA, 918 nt, synthetic construct
  source 1..918: mol_type = other RNA
atgagtgatttgcgggagatggaccacttgcgcgctattgcatgggccggtaggggagcaactaacttacaggctggctgtctgctggatagccgctacaggacctatgaactgccaaagagatcgggcggcgtcaggattataaccgcccctgacccaagactgaagcgtttgcagaggcggctcttagtcggcgcctttgaggctgttcctctccacgatgcggtccatgggtttcgctccgggcgatctattgccacaaacgccgctcggcacgtgggtcaacgactggtggtaaatgtggatatcgcaggcttcttccccaacaccaagttccaacaggtcttaagcgcgtgcaaaagagtggatggaggccgcctctctccttatgctgcccgtctgctggctgagatctgttgctacgcaggtgcgctccctactggggcaccaacctcacccgccgttgcgaacatcgtgctcagacccgcggacaccgccatagctaatgctgcagccacgcacgggatttcctacacaaggtacgccgatgacctgactttcagtggcgagggggacgctaagagaatcatcccgtttgtccgccgggtgctagctcaggccggatatcgcttggatcagcgtaaaacacagctatatagacgggggcggcagcagctggtgacaaatcttgttgtgaatgaacgggtgaacctgagacgctcagaccgccgaagacttcgggcagccgtacaccataggtgcgtgggacgacccgccgaatggcatggaagggccatggacgaccatgcactggagggccgtatcgcacttcttgccatggttgatagaaaagaagctgacctcctgctggccaggctcaggagccaagcatctggatggcgatcccgggacgcctga

SEQ ID NO: 14066 - RNA, 2823 nt, synthetic construct
  source 1..2823: mol_type = other RNA
atgagtagccggttttccctgccctctcttctgctgagttcaaatgaggacagctacttcgccttcctaagagccctgcctgtggagcagaatctgacaagccaggacatactggcgttgtgtaaaaaattagactggcgaagcctagattcagcgtccaagtgccaggccctgctgacccagctggttaaggatagctccgctgacttcgaggaactggcgcatgacattgacattagcagccagtctttttggcggaaccttctggcgtgctccgaagcttccacacggcctggcctacaatttcttatcgaggctaacgaagcctggggaaatgaggtgctgggcagtaatcaagcaaagatcatggacgacctaccagctaataaaattgtcaatgcactgatgaccctattagtggaccccgctcgtctgacctctacgcagcttggcttgatcgccccaagacagagggccgcatgccttcatcactatctcaggcagcgggtccccgccgctaggaaaaagaaaaacctggaactcctgcctattttccgaagtgcccgaaaaatttatggcccagaagccaatccccgagtggtgcttctcgcagtgcaacgggcccttattagacaatccctctccgcgaaaaaaattggtaagcgcgaattcctgatgctggacgacggcctgcaatccgcactgactgcttcccccgtgctgctggacagatttgtagcctcccagtatcggcacgtgctaatctctatgcggagacagatcgtgcgcgtgaagaaactgcccatattggacctcacccatacaatccagagtctcgagagcgggaatctgagtaacaaactgattccggcattagaattttggcgcttcgtaagacccgatttcagtaaactcgtggttaactctctcctgaaaatcgccgacacgtctgaaatcactcagagtacggcccttgctcagtggtgtggaacaacctcatatgacatgtcgatcgggtttctcagtgttctgtcagcatttgcaccgctggaaaagttcctcagttacccggataggacacggagagatattgcctataagatgaacgccaaactgttgctcttggtgttgagggcaggccccgtccctgagattggccatgtcgcaaaactggctgccaagaagccgggcatcctcagggcctggctgacagaatgggatcgctggcagaaagatgaggatatctcatacggaatgtccctcatgtctgaaatcattgctaacagtcggcaggtggatgtccactggcgagtgttagagcggcagatcgcctcgttacctctatcaaccttaagcattttcctttccagcgataattcgaaattccacaacgggacacgcaatcagtcacgtctgataaaactgatgttacagagctggcgccgtggtcaaaagcacgataatgctcagcgcctgctgaagatatgtcgccgccacgggcgcacgatattggaagtagcaggcgatagcctaaccgcaatggagatcagatgcatagccggttcaaagtacctcggcgagctccggaaaattatcgcaagccgtagccagaagattcctgggtggcggcaattcgtgactgtatcccttctcaaagcggaacgcgcaccttacctccttaatcggataatcgagggaaacccacacctggtcgccgaagccttccacgtgcgtcccgatttggtgaggtggaaagatgtggaattggtggaccctaacgacctagttcatgccgccactcactctaagaagtttgccagaaagctggaccttaggttgactgaccggcgacgtaggagcctcttaccagtcatcagggctctctatggcaataaacctcgctcctgtgcggcctacgagctggctatgctgacagagctgaagttgtctagaacatttgtgtcactcgcactgatgctggctcacgccaaccaagttcccgagggaaatactttcaacgcgttttacaagacatataagttgccaaagaagtctggggggagcaggaccataactgccccctccacaatgcttaaagccgtgcagagagggctgctgaagaaggccatcgccccaatggacaacagcccttctgcaacaggattcaggaagggatcatctattgtgaagaatgcgcaggaacacgttaatcagaaaatcgtcgtcaacgttgacattaccgcattttttccaaacacccgctactcgctgatcagacaagtggctgctcaggccgttgatgggcatttgagccccatcgctcaatggcttttggctgagatttgctcctatcagggagctctccctaccggtgcacccacttctcctgcagttggcaatatcgtcctcaagcgagccgatgcaaccatcgccaaggctgcagagcaccgacggattaagtacacccggtacgctgacgatctcactttttcaggtgaggatggagtcgttgatatacttccactcgtagtgagaaccttaggggcctgggggtacgagctggacaacaagaagaccaacatcttcagaaggggtaggcgccagatcgtaactggactggtggtcaacgagaaaccgaacatggctaagccattgagaaggaggcttagatctgccgtacatcgacgcctgtccggcagacagccctcttggcatggcaagccaatgagcgactcagagctgttgggtaggattgcgttcctcgcccagacgcagccagctgaggctaaaaagttaagggatcaactggaggctgtccagtga

SEQ ID NO: 14067 - RNA, 3984 nt, synthetic construct
  source 1..3984: mol_type = other RNA
atgctggtggtggtggaggtggctaaatggcggactcagaaagaagctaatatgctgaatgggtacaggcgccctaacagcatggcttcacagcaaggggagcagtgcattcagtcagtccccttctgtagcacactgcccaatattacatccggacttaagcactgggagatggactgtgtcagaccatctacttattttaagagcattgctctccagctgtggacagaactgcaaattgacaagaacttcgcaaaggaactgcagcgcaaccacaggtccgccaatggacttcagtgtgtgcgctacttgcacgccacagcaaaatcggacgctgatcgcgctctgacgtggttgtttgcgacccacctcctcccaagctggaagcttccacagcccatgctccctatgctgctggcccaactgcagcgggagtacaaagacgtggctttggtgcaggccattatgcgcatggcagatcagtctgttaaggccggagaggctggaagagcctttgaccacgagctggatcacgagttcgaccatgcgcccgaggcgctggtatttgtggattcagccgacgctcacctgtttctggaggccgctaataagaagtgctccgcggacgctccactctggatgtgcctgtcgacttgtgtacgaccggacagaaacgccgcaaacggcgcatgcgcatgcccatgccacgcactggagccactcagccagctgcggaggctctattctctgcttgcacgcgctcatcgtcgcgtccctcagggaaaaaacgccttcgaattggaaactttactatctgtgacagacctttcaactccgaaccctacggctcacgggccagtggacctgagacagacatcgcatgtggcgcacaaccgtatcgaccgatttggcctggatttcatcatcaatcaactgccttttgggtcagtgattgccggtcctctgaggcgagcaatgctggataccgtgttcctgggcgaatttgcccctttcctggattcaatagccaatgaggcaccccctgcgggccgaatgagacagctcaccgatcggcagatctcccacgcacactcactgcgggtgcgccataggaatgagtgggattctgctatcggtgctaccctggacttagttaccgctaggtccaccgacgccatacctgccgactctaatgccatccaggaagactgttggaatcacctccgcattgtggatgcaatcctgcatgaggctaacccccgccgcagaataggagagtatctaaggcggatcgttgccagagaagggccggcattgcagccagacgccgctactaagtgtcagcccacagagcctctgctggaagccatggagctcattggccgggcactcatcctgagggagctgcgatctacggtgggcggtccgaaaccactcacttctaccagcaccatgggcctgttggggcgttttgccatgcccagtgagtctattagcaactccctcaagctcaaccttccagaccctcccatcgctgcaaccccttctgcacctgaaggtccctggtacagaaggcaggcaaatgatcctaagcacactaatttggacagcattaagcattgtcttagatgcctctacggctgccggagcgatgccatcatgctatccattgcctctgtctttgacggacccactaaagcagttgcaatggccacttctggaaattggttgaaaccaggtgccctggctagatggatgcgtaccagttccataccttcttccaaccgttttgattttgtccgacagcttacgttgacccacggcgataaacttgataagctcttgcctatgttcgcccgcgaaaggacctgggacgaccatcggcccctgttcaaagggcagcaacgtccaactaacgcaacggagcaatggctcgtgcagagtatcgagttgccccccaagagtcttgccttattatcaccccgcgcccggaaggcctatctggcaaatttcatcagacggtacggcgacctggccacaaaattcctcgcaccgaatttccagtctagaatacagcgggaaaagaatggacagctggactttgctggcaatgccttaggaacagtggcgtgtgccgttaacgaactcccctggcggacagttcgagctgcccttcctctgcatgttattgaaacggttatctcggaatccaaattcggggccgctagagtccccgcaagtgtacctccatctgtgcccccctcagtgccacttgctgacgtcaagaagctgttctcttaccatggtgaatccgctctagtagtctgggcacgcgcgtggcaccgaatagtcagctcagctgctactacccaatccgggaaggcccgcgcaaccaaggccctaatccgcaatatcagcaagggaaagttcaacctgcaatgcttttgtgagctggcaagccagccgcccagtgcctcaaaaagtaagaagcggtttgtgtccgattttgccacaacaatcttggccatcccagctatcgtgcaggctctggtaagccaaagcaagagtctcgaccaaacctggttcctcctgcaaaacagcagaggacacgccttggccgatctcccccgaagccagcttgagaacttcgtgctgtccattgacagtgaccttagggacatttcagatggtcccccgggcgattccccagctgatgcaaagaaactgaaccggccttacaggaaggctctgcggtcgcctttgaattttgtggcccagtttgtggatgtgatagcaaggaggctgtgtacagtgtccgcaagcgacgatgccgccattaccgcacaaaaaattgatctggcccgcctcctgctaagggtaatcgctacccgggagcttagagcgccagctagtgttgaaaccatagagcttctgacacagcggctatcaactcgccgggacgctcagttaaccagaaaagccgcccaaggaaggtgcaaacccctgaaagagccagccgaggaaactaccgtgctcgctgtcgcactcgaacttgcaaaacagggcctggccgacgaattccagcaagtgttaatgatcacccggactgctagtctcgatgatcgatatcgtgcccacagaattcctaaaaaacgggggggaatgagggaaatccaccagccggatgctgatctaatgcgtttacagagaaaggtcttggcgcgctttctcgcacgcgctccaatcagtgagcatgcgcacggtttcgtcagaggcaggggcatactcacaaatgcgctggagcataccgggaaaagagtcgtgctgaatgtggatattcggaacttctttgggagcctcccaatcgaacatatcagggccgcgcttaaccagactagactgcgcagccaggtgccaaagacagagaaccaggggtgggccgtcagagacagggagagcctgtcaccagccgcgttggatgtactggttaaaatcgttacccgtgccggatctttacctcaaggcgcgccgacttccccagccatcacaaacattgccctgcgccacacagacggtatattggctaaagcatgcagaagaattggcgttagctatacgagatatgctgacgatcttactttctccggcgccgatggccccgttcaagggattgtcccattcgtacgggaactgctgacgaggatcggtctagagctacatcctgacaagacacatgtataccgaagcggccgacagcagttagtgacaggcttggtggtcaacagttggcccaatctacccagacgggataggaggcggatgcgtgcagctgcccataggctgggaaccaccggtaaggccctgaggtggaaagggtcccctatgtctttggccggcttccaggggaggttatccctccttaacatggtcgacgagagtcgagccgactccctcaggttattggcgaagatggaacccagatga

SEQ ID NO: 14068 - RNA, 954 nt, synthetic construct
  source 1..954: mol_type = other RNA
atgtcgactattacatcatttacactcccaacatctttgcaagcccttgcaccgggggtggggaaacggtaccatgtctaccctctagtcagcgggaacaataagaagaagaagcgatggatagaggcgcccgacagcgaactgaaagccgctcagagatggcttctggacaactggctgtatcacctcccacccaccggctttgcacacggattcgtgccgggtaggagcattctcacaaacgccgcggagcatgtcggtaggagatgggtcgtcactgccgacgtaagagatttctttccctcaataactgccggaagaatcgccacctgcctcgccgagctagaactggacgccgctgatcgctccactgtggtgcagctggttacgcgtaggggacgcttgcctcagggagctcctacgtccccacaccttgcaaatctagtggcccgtaccctggatctccggttgtctggcttggctcgccagcatgactggacctatactaggtatgctgatgacctgactttctcagcgggttccccaaccagtccagataccggaatgccccctcacgaattattatgggcaatcgaacgcatcgttagcgatgaggacttccagctggccgcagacaaaacccacgtaatgccccaccaccagcggcagaccgttacaggcctggtggtgaatcaacgggtggctctccccaaacctagacgcaggaccctgcgagcaatgctgcacaggctggagacgagtggccctgagacactggatctgcgtcaattacaggtggcccaggggcatctggccctcagtaagttgatcgacccagacggttacgatcttgcctgtagacatcttggcgaactgattcgaaactctgttgcaggctctgctctggggactgctgtggatagcggctccacagctaccacacggctcgactga

SEQ ID NO: 14069 - RNA, 1038 nt, synthetic construct
  source 1..1038: mol_type = other RNA
atgtccactagagcccagcgggcacatcctggcccactctttctgctccgggacaggaccgatccacgctgtcaccgaagagccctgattgacgcacatcgcaaacaccgtcccaacccacttaccaccacactcactagccttcctgattcactactggctctcgccggcgatacagagagacggtatcaggtgtaccccctggtgaatggcagcaagaggagatggatcgaggccccagatagagagctcaaagccgcacagaggtggctgctggaccactggctgtaccaactggctccaacggacgctgcccacggattcgtccgaggacggtctatagtcagtaacgctggacaccacgtaggccgggactgggtggtcactgccgatctttctaacttcttcccatccattggtgcggatcgcgtgtcacaggtgattgccgggctggatctcaacgcaaatgcctccgacgcagtggtccgattggtgacaaggcggcgacgtctgccccaaggtgcaccaaccagtccgcatctcgctaacctcgttgcccggcggctggacttacggttgatcgggtgggcgcgaaggggaggatggaattacactagatatgccgatgatctaaccttttcgggtgaggggaatcccaggacactactgttgactgtagagagaatcgttcaggacgaagggtttacattagctcctggcaagactcatgtgatgcccagacatcagcgccagctggtcacggggatggtggtgaacgaacgcgttacgcttcctaagcctcgccgcagacttctcagggcgatgttgcaccgcctgcaaaccacaggcgcagacgctgtggaccctggtcagctgcagatagctcagggccatttggcactggcccactttgttgacccggaaaggttccaggccgaatgcagggctctggccgacttacttcgtggggaggcgagcccccaagctgatacccctaatcccacagtatgcacccccatcgataagaaagtcgactga

SEQ ID NO: 14070 - RNA, 939 nt, synthetic construct
  source 1..939: mol_type = other RNA
atgcccaccgagtatatgtccgactttatgcccacaactctgccatgcccacccgctgcagtgctcgctctagctgactctgcagagcagagataccgggtgtacccactgatgtcaggaagtaaaaggcgctggattgaggctcccgatcaggagctcaagactgcgcagcgctggctgcttgaccagtggctctatcagctggcacctaccgatgccgctcatggcttcgtcccgggtcgatccatagtatcaaatgccgcacggcatgtgggatgtgcctgggtggtcacagccgaccttagaaactttttccctagcatcggggcgagcagagttgctcaagtgctcacagagtttgagcagcctgcagacgtaactgccgccttagtgcgtcttgtgacccgacgtcaacggctcccgcaaggtgcacccacttcgccacagctggctaatttagtcgccaggcggctagaccttcgacttttgggctgggcccgccgttcaggatggaactacacacgctatgccgatgacctgacttttagcggagccgggaatccacggcctttactggaggcactgaagcagatcgttcgggatgaaggcttcaccttggcgcccgggaaaacgcacatgatgagtcaccaccagcgccaggtggttaccggcatggtagttaacgaaagggttgccctgcctaagccgcacaggaggttgctgagagccatgctctaccgcctggaaaccatgggggtggataaggtcgacccacaacaactgcaggtggtccagggccatctggccttggctcacttcgtcgatcccgccaggtttgaggcggaatgcagagccctcgcaaccttgctaagagaagctagctcttccctgcctgctacagcctccagttctttcgtgcctgcagtgacgaaaacatga

SEQ ID NO: 14071 - RNA, 924 nt, synthetic construct
  source 1..924: mol_type = other RNA
atgaacagaagcgccttcgaccccggagtgaatgagacatcaggcgacctcatcgacctggtcgagagcctgaacgttcccctgcaacgactgtccgaaatagcagcgacagcaaacgagcggtatgacgtctacccactggttatcgggaaaaagaagcgctggattgaggccccaagagataagttgaaacagttacagcggcggctgctcgacagtgtgttctacaggctcgtacctcatgagtcggctcacgggtttgtcagaggccgatctattgtctccaacgctaggcgtcattgcggcagaagatgggtggtgactatggacatccgggatttctttccatcaatcggcgccgagagggtgaatcgtcaactcctgagcctgccaatgacagacgccgaacgcgagattgttgtaaagcttgtgaccaggaacgccaggctccctcagggagctcctacctcccctcacctcgctaaccttgtctctcggcggctagatatccgactgcgccgtctggccgatgaagcaggttggacatataccagatatgccgacgatctcgcttttagcggagaaggccgccccaagcaactgatcaggatcgtggaacagatcatacaggacgaggggtttcagcccgcaaggcagaaaacccgcgtgatgtccagacaccaaagacagattgtcactggacttattgtgaatgagaaggtggccctgccacgccccaaacggagactgttgcgagccatgctacaccggttgaggagtaccaatgagccgctttctagtttgcctgatatacgagtaatccacggtcatttagcattagctacgttcattgatccggatggttaccgcgaaacttgcaatcaggttgcgcagctgattgaagggaggtgttcattcgtgtga

SEQ ID NO: 14072 - RNA, 924 nt, synthetic construct
  source 1..924: mol_type = other RNA
atgggaaatgccttaagcgaatccgaaaacgggcgcaccgccggagactcgattaggcttgcggagattttatctgcaccacccgagcgactgaacgaaatcctggcaagtgctgatgaactctatcgcgtctaccctttgattaagggccgcaagaaaagatggatagaggctcccaggagcgaactgaaaaggctacaaaggcgtctactggactcagtactttatcggctggtgacagatgaatccgcccacggctttgtccggggtagaagtatcgtcactaacgccagaagacactgtgggcgggcctgggttgtgaccatggatatccgggatttcttcccaagcataggagctgagagggttgaccgccaactcgtgtctctccccatgacggaagtggaaagggagaatctcgtgaggctggtggtgcggaatgggagattgccccaaggcgctcctacttccccacacctggcaaatcttgtatcacgacgattggacctgagactcaaacgcctggccgagacaaccggctggacatacacccgctacgctgacgatctcactttctctggcgagggcaagccaggtaagcttgtccagattgtcgagaatattatcgttgacgaggggtttcagccggcctgtcgaaagacccgggtcatgagcagacatcagcgacaggtggtgacaggtctagttgttaacgataaagtggccttgccgaggcctaagcggagattgctgcgtgcaatgttacatcatctgtcatccgccaaccaggacagtgtatgcctccccgatatccacgtgatccacgggcatctggctcttgcggccctggtcgaccctgatggatatcggctgacgtgccgtcaggtggcacagctggtggagaaccgctacgacgacgcgtga

SEQ ID NO: 14073 - RNA, 1065 nt, synthetic construct
  source 1..1065: mol_type = other RNA
atgacaaaggctaacctgcccactaatggctgcgatgatctggctaatctcctggacctcgacccaaacagactgacacagttagcaggagaggctgtcaatctctacgagaggttccctctgaaaacccgaagacgacggccccgttggattgaagcgccaaagccgtttttaaaattggtgcagcggcgtctcttggaccggctgctctacgccaccccacctcatagtgccgcccatggcttctaccccgagctgtcaatactcacgaacgccagaattcatgtgggatccgcatgggtagtctcctacgacttggaggatttttttcccaccaccgatctcgacaaggtacgcagtgtgctgaataagaggtacgatgtggaagaaggcgtgcttgaaagcatcatccgattgacctgtaggaacggcaacctaccccagggcgctcctaccagtcctcacctagctaacctggccttctaccagggcgacgaactgctgtcagagctagcaaaacagcacgatttaggatatacaaggtatgccgacgatatgacattctctgggaaggagcttccggcggagctcgatgatgaggtgaggcagattgtccaccgagtggggtatcggctggctgaaaaaaaaactaagcgcatgggtcggcaccagtgccaaaaggtgacgggattggtggttaatgagggggtccgcctgccacggaagcaaagacgcagactgagagccatcaggaatgacatcgccatgatggggatggaaagcgcccttgcccgctcagggtatggaagcgtatgccagctccaaggacatcttgcatttgagcgcatgacaaataaatctaacggtgtttctcgtggactgcagaatctgcggcctaaaaacgcgcttgcaggccagccacctgttgaacccgaagataaggacggcggtcttcctcccccctcttgtccgagcgtgagaaggaggcaatccgctgaccacggcggtactccacaacagatgccagactcggagctggagtccactgttcagactgtcgggtga

SEQ ID NO: 14074 - RNA, 921 nt, synthetic construct
  source 1..921: mol_type = other RNA
atgcgcactacagaaacgcactccgttatcgtgcaggacatggacatctacccagaagcggatgccgtacctccgccactgacaagcgctgatctggcgaagtcactccatctcagtgaggagcgtctggtgagtctgctttcgtcagcagagaaatcttacaacagatttcccctgaagtgtgggcggagaaggcctaggtggattgaggctcctaatccatttctgaagcacgtgcagcggtgtctgcttgacaagattctgtataccgtcgtcccacatcccagtgcacacggatttcaacctgggagatctatcgtaagcaacgcaagaatgcactcttgccgggagtgggtcctatctatggacatgaaagacttctttcccaccaccgacattcatatggtggagaaaatgctgcaagagcatttcaacttcactcaggaaaccatagaggcgatcctccgattgacctgcagacgcaacgctcttccacaaggagcccctacctccccccatttggcaaatctagtgtttatggagggggatcggcgccttacggcaatggccatcgagcacggcatgacttatacaaggtacgccgatgatatgactttctcaggagacactctgcccgaagatatcgaggagcaggtcgaattaatagcccaggaagctggttatcggatttccaggcacaaaacccgccgaatgggccagcaccagtgccagaaagtcacaggtctggtggtgaatgaaggcgtgaggctcccgcgcgggaagagaagacgcttgcgtgccattctcaacgatgttcgaaagaatggcatggacgctgccttagctcggtccggcttcaggagcgccgacgaattgagcggtcacctggccctcgccaggatggttggaacagtgcagtga

SEQ ID NO: 14075 - RNA, 939 nt, synthetic construct
  source 1..939: mol_type = other RNA
atgctaaaagatctacagcatcctctcgaactgtcaaccgccgagctccagcctttcgctagccgcattggctttccaactgatgtgttatttgacatcctgtccaaaaaagaagaccaatactacagattccccataagcaaaaggaatggtaagaaccgctggatagaggcccccaagaatgagctgaagagtatccagaaacagctcttgctgcaaattctctatgaacagaaggctcattccgcagcacacggatttgtgcccaatagaagtattttgactaacgccaagcctcatgttggccagaattgggtcgtcaactttgacatcagtaacttcttttcgagcacccaaattcacctgatccacaaagtgcttcagacataccctactctctcaaagcgggaacagcacataatcttcacacttatctccaaggataacacgttgccccaaggagctccaacctcaccgcatattgctaaccttgtactttatgactttgaccacttcatatctgattatgcgcagaagcatcagctcgcctacacaaggtacgcagacgatctgacattctctggggaccagattccgaaggagcttccactgatcgtgaaaaagcgactgaaggaggatgggtatcacctggcccagcacaaaacctcatggacggggaagcataagaggcagctggtcaccggcctggttgtgaatgacaagatcaacttaccccgcccaatgcgtcggcagatgagagcaatcattcactccattaaaacaaatggcagcatcaaagcattcgctaccagctcttggtccagcgatcagctctacggtcggattgctctgcaggccatgtgggactctgaagccgcggagaaacaactgcgagagctgttgggagcccaagagttagattggactgcctatatctga

SEQ ID NO: 14076 - RNA, 1176 nt, synthetic construct
  source 1..1176: mol_type = other RNA
atgcccgttatcgataaggtggatgaattcaagatgatgtttaacggcgtgaaggacccagtaggaatctttgacttctgcggggttaacgcagagcgcgccttgaccgaaaagagtaaagacgctgaactggtcgagaaactcaatcaatttctggacggtcagttcttcaccagccactcaatagatcgtctcgcgcgggtggttggtgagggtactgatatcattagactggccaaagtaggctacagaggctccatctatatgttaaacgaatcggtggaccagtttgctgaactgtctgaggctatcggcttccctaaggaaatcattcagcagtacgtgtctgatacagcttcccattatagtcgctttttcatttggaaggatgaggctaagaccaaaaagcgatggatcgaggcccctgacgataccctgaaacaaatgcaggaggccattttaaggaatattctctacaaaatcgcccccacgaaatttgcgcacgggtttatttgtggccgcagtattgtcacatgcgccaaggcgcacacggggaagaagtttgtcttgaagctcgacctgaagaacttctttccatctataactagggaaatgctgcttggagccatggcaccctatataaacgaatccaactttaagttcgtcttgcccgccatggagctgtgtttaatggagggaagactaccacaaggggcacctactagcccggccgcaagcaatatcgtggctcgtcagctggaccttcttatgtacggaatctcctctcagtttggctgcgagtatacacggtacgctgacgatctaatattcagctcaaatgagagggacatctataccatgataccgatcatcaagaaggctatcgcaaaattcggcctggtggtgaatgagaaaaaggtgaaagttctgaaaagccatcaacggcagactgtgactgggctcgtcgtaaattcagatgggcagacatccgtggcccgaagaaaacggatgaaactccgcgcattcattcatcacattttgacaggtcggtacccactggatcgagtcaactttgccaggcttaagggaaatatcaccttcattgccatggcaaatcctaaccagggcaggtggttcctggagaaatgggacgaaattcaggccatgagaggatga

SEQ ID NO: 14077 - RNA, 927 nt, synthetic construct
  source 1..927: mol_type = other RNA
atgtttggctggtggcgacgcaggaaagagcgtaggcaactgactgagaagttgctgttcatcaaccggaacatcgccccacactatcattctttccccctcaaaaaggccacaggcgggtaccggacgatcgaagctccagtggaggagctgaaggaagcgcagagactcattctgaagaggtattactatggacttgagtgcagcacagccgctcatgggtttgttagggggcgatccattaccacatgtgcccggcaccattgcgatagactcgtggttgtagctgtagacatcaaagacttcttccccagcatcaccagagacatggtggagaagattacccgcgatatggtcccagagctcgcaaaaaataaggaactgttcgatctggtgttgggagcgattacaagcaatgatgccttacctcagggatcccctgcttctcccactttgagcaacctagtttttaacggaattgacaatcagctggtgagtcttgcctgcgcctttaaagccaggtactcccgttatgcagacgatctcttctttagctctcggtacaaccgaaatctgcctggcataattagttcagtggaacgcatcctaaatgcgcacggattctcgataaataggaaaaaggtgcgcgtgatgagaagaggccagcgtcaggtcgtcgctgggttaatagtcaacggcaaaactcccgccgtgggtcgagaacaactgagatcacttcgcgccgctattcacctgttggagaaggaacttcagggcgcaggtccacagagcccgagtgttgcaaagctgatggagtcaatccaaggtaaaatctctttctttcacatggtcaaccctcagtcagtgcggagactcgctcgcacctttaaggcaatctgtaggcagcaagcagcccggtcctcctga

SEQ ID NO: 14078 - RNA, 927 nt, synthetic construct
  source 1..927: mol_type = other RNA
atggttgatctactgcccctgctagtgaaggaaggagcaatggaggagtccagataccgcatgtatcggatcagaaaggccaacagacgctttaggacgattatggagcctgacccagctcttaaaagtctgcagcgctccatcttgagatggctgatggccaggaggatcagggcttctaagtacgcacatgggttcgtaaaggggcgtagcaccacaacaaacgcagccctgcacgtcggtaaacgggtggtggtccgaatagatattcaggacttctttcctaccatcacagagcgccaggtaaagtacgcgctgaccagagaggggctcctttctgatgatgcggcccgaatcgccgacctgtgcactgtggaaggcaaactcccacaaggcgctcccacctcccccttcctgagcaatatgatatttcgtgtgctcgactaccgactggccggtctggccaagaagtggggtgcaacctattcgcgctatgcagacgacttaatattcagttcagatcgggatgacttgcaggctatttaccacccagtcgcttcaatcctcgaggaagacggattcgaggttaaccctgataaatttcgggtttaccgtagcacaagaagacaacgcgtaacgggcattgtggtgaatcaccatccaactctgcctcgggaatctagaaggcggcttagggctgcactgcaccatgttcgcaggtctattgtgactggagaggaagtccccgccgagcgcttggacagcatcgaagggagcgccgcgtatttaacaggcattgaccgggagagaggccggcggttattggtggaagtccgagatctcaaagcactgctcgcccttcgcactagaatggtgagtaggaggcgaccgaggcgtacctcaggaatcgctgccgctccgtcctga

SEQ ID NO: 14079 - RNA, 963 nt, synthetic construct
  source 1..963: mol_type = other RNA
atgaatgccgctcccttattagtctccttctataccttgtctaaattcctggacgcactgccagagaagcatcggaattcctaccaacgtcagatcgaaaatctcttcgctcagagccttccgccatgtgtatccgaaatttgcctggccgtgctgttcgggtattcagtggattttgtctacgccctgagcaagaaccagcataagttttacaggtccttccagatcagacagggacggaaaactcgcaccatacatagtccaagagtagcactgaaggtggttcagaagtggttgggagtgcacctgtcggatgcaattacattcgagcctcacgtgtgtggctttgtgaagggtaagagctttgctgatgctgctaaaattcaccaaggagccaagtgggtttactctgtcgacattgaaaactttttccctagtatcacgattctccagatatccaatgcgctggaaaaactcggctatacaaaggaatcagcagagttgctggcaaatatttgctcactcaactccactttagctcaaggcagccccgccagtcccgtcatcagcaacattgtgatgaaagacatcgatctccagctgaaagagctagcggacaagtacgagctgcaggtgagcagatacgccgatgacatcgtgtttagcgggaccgagcctttcaacgaggggatccccaaagacctgaataccctctttaattctacctcattcactctgaacaagaacaagacctatttttctgacagtgaaaagggtcagcgccttaaagttcatggccttctcgtcaaaaaagataagatacgacttacgaaagggtatcgcaataaaatcagggccttccggcacatgctggaaaaggagaaagtgtctgagaacgacttgcaacgattgaagggccacctaacattcgccgagtttatcgaaaggaagaaccaggtttga

SEQ ID NO: 14080 - RNA, 963 nt, synthetic construct
  source 1..963: mol_type = other RNA
atgaatgcagccccactgttggtgtccttcgataccttgaagaagtttttagatgccctgcctgaaaagcaccgcaaaagctaccagcagcagatcgaaaaattattcacacagagcctgcctcctagtgtcagcgagacatgcctggctgtgctctttggttactcagtcgattttgtgtatgcgttgtcaaagaagcagcacaagttctatcggtccttcaaaataaagcagggaaagaaagtccgtatcatccatagcccgcgagtggctctgaaagttgtgcagaaatggttagggacgcatctgagcaatgctatcagtttcgagcctcacgtatgcgggtttgttaaaggaaagtcgtttgcggacgccgccaagatccaccaaggtgccagatgggtatactctgtcgacattgagaatttcttcccaagtataaccgtggtgcagatttcaggcgctctcgaaaaacttggctactctgaggagtccgctaaattcctcgctaacatctgttcgctgaacgggactcttgcacaagggtccccagcctctcccgtgattagcaacattataatgaaggacatcgaccagaggctgatcgaactggcagagaagtatgtgctgaaagtctccaggtatgccgatgatatcgtattttccgggaaggaacccttcagcacagacatacccaacgagctatctagtatttttggactgacccccttcctgcttaataagaacaaggcctactttgccgactcacagaagggccaacggctcaaagtgcatggcctcctagttaaggaggacaagattctgttgaccaaaggttacagaaataaaattcgggcgtttagacatatggtcgcacagggcaaggtgtctgagggcgatctcccaaggcttaaaggacacctcactttcgcagaatttatcgaacgcaacaatcaagtttga

SEQ ID NO: 14081 - RNA, 963 nt, synthetic construct
  source 1..963: mol_type = other RNA
atgaatgccgcccccctgctggtgtctttcaactctttcaataagttcctggaggccttgcctgtgaaccacagaaccgcctgcaagcaagagctcgaagagatttacggaaagtctcttccaatcggaatcagcgaggtgtgcatcgcagttcttttcggctactccctggatttcgtctatgccctgtcaaagaagcagcacaagttttatagatcgtttcagatcaagcaggggaaaaaaactcgtaccattcattccccgagggtggctctgaaggtggtccagaaatggctcggcgctcatctgagttcagcattagtgtttgaagaccacgtttatgggttcgtcaaaggtaagtccttcgttgatgcagcgaaaagccatcagggtgctaagtgggtgtactctgtcgatattgagaactttttcagtagcatcaccgacctccaaatctctgaagcatttaaagagttgggatacagtcacggctctgccacactcctgagtaatatttgttccctcaacagtaaactggcccaagggtcacctgctagccccgtcattagcaatctagtaatgaaagacgtggatgccgggctgaaggcgatggctaataaatacggactgcaggtgagccgatatgccgacgacatcgtattgtcagggaaggcagaattcaaatccgaaattgccggcgagctgcatagcatctttgaggccacgactttctcccttaacacagacaagacttactttgcagatgctgaaaaaggtcaacgcctcaaaatacacggcttattagtgaaggaggatacagtcatactaacaaagggctatcgcaataagatacgggcgtttcggcatatggtagagcagggaaaggtgtccgctgacgatcttccaaggctgaaaggccacttgaagtttgctgaatacgttcagaggcagaacgacacctga

SEQ ID NO: 14082 - RNA, 1119 nt, synthetic construct
  source 1..1119: mol_type = other RNA
atgcaaaaaagaagtggcgaggaactatctcgcgggtgcgcctcatgtcctttcgcaaaggcccgacataggaacacggatggccagactagtattcgcgcaagccccggctggacctttgttcaccgatgcaagttcttcgaaaaatatagcgtgatgaacgcggctcctctcttggtgagcttcaattcgctgtccaagtttcttgatgctctgccagaaaagcacagggaaaacaatggagatcagatcgagagtctcgttgacaagtcacttccccccgtcgtgtctgaaacatgtctcgctgtcctcttcggttattccctggattttgtctacgccctctctaaaaagcagcataaattttaccggtccttcaaaattcagcaaggcaaaaaggttcggaccattcattctccacgtgtagccctcaaagtggtgcaaaaatggttcggagcccatttaagcaatgcagtgtcatttgagtctcatgtatgcggcttcgtgaaggggaagagctttgcggacgccgctaaaatccaccagggtgccaaatgggtatactccgtggatatagaagacttcttccctagtatcagcacctttcagatatccaacgcattggagagtgtgggatatagcaaggatgccgcgcagctgctggccgacatcagctctctgaatttcaagttagcccaggggtccccagcatcgcccgtgttatctaatatcgtcatgaaggacattgacaagcaactaaaagagctggctaaccagtacgacctgcaagtcactcggtatgccgatgatatcgtgttttcaggaaaaggtgtttttcaggaagcattgcctaccgagcttgaagctatctttgaggggacaacattttccctgaataagaacaagacatacttcgctgacagcgagaaggggcagaggttgaaaattcacggtctactggttaaggaggacaagataactcttaccaagggatacagaaacaaaattcgcgcatttagacacatggtcgagcagggcaaggtgtccgaggacgatctgccgagactgaagggccacctgaggttcgccgagttcatcgcttcaaaaaacgaaaattga

SEQ ID NO: 14083 - RNA, 966 nt, synthetic construct
  source 1..966: mol_type = other RNA
atgaatgcagcccccttactcgtgtctttcaatagcatggacaaattcatcgaatctttccctaggagccaggtagagaaatacagacagaacattcagtttctgtatgagaattcactgcctcctgccgtttctgccccctgtctggcggtgctgtttggctactccacagactttgtatacgccctgtctaaaaaccagtacaagttctataggaccttccaaatcaagcatggcaaaaaactgcgaaccattcactcgccccgcgtggccctaaaagtcgtgcaaaagtggctcgggtaccatctgtcaagcgctatttcttttgacagccatgtctgcgggtttattaagggccgtagctttgtggatgctgctaagatgcacgagggtgccaagtgggtgtacagcgtcgacatcgcagatttctttccctccgtgtcctccgagcaggtcacagaagcattggtatcaataggttatttcagtgaatccgctgagcttatcgcaaatctatgcagtcttgatgaggttctgccacaagggtcaccagcgtcccctgttttatctaacctggtgatgaaggatatggacaaagagctgcttcacctggctgacaaacacggactcaaggtcacccggtatgccgatgatatcgtctttagtggccgcgataacttcatcgaagaactcccggaagccttagacagtattttcgagcagtccacttttagcttgaatcgggacaagactttttttgctgatgccgagaagggacaacggcttaaggttcacggactgttggtgaaggacgatcaggtgacactgacgaaagggtacagaaataagataagagcattcaggtatatgctcgaccagggaaaagtgtcggaggaagatatcccacgactccagggccatttgaagttcttcgagttcataaacgaaaagaacaaaaacgactga

SEQ ID NO: 14084 - RNA, 966 nt, synthetic construct
  source 1..966: mol_type = other RNA
atgaatgccgcaccactgttagtcagcttcaacagcatgaataagcttatcgaaagtctccctttatcacaggtggagaagtatcagcagaacatccaattcctgtacgagaagtcactgccccctgtggtaagcgtaccctgtcttgctgtgctgtttggatactctacggactttgtttacgctttgtccaaatcccagtataaattctaccgttcctttcagatcaaccacggcaagaagctcagaactattcactctccaagggtcgcgctcaaagtggtgcagaagtggctagggcaccaccttagtggagccatcagtttcgattcccacgtttgtggcttcgtgaaaggtagaagttttgtggatgcggccaaagttcatgaaggcgcaaagtgggtgtattcggtcgacattgtggacttctttagctccatttctaaacagcaagtgtccgaggctctggtgaacatagggtaccttcccgagagctcagaactgatagcaaatttgtgcaccctggataatgttctacctcaaggtagcccggcctcaccagtcctctctaacctggtcatgaaagatattgaccgccatctgcagtatctggcagacaaatacggcttgaaggtgtccaggtatgccgatgatatcgtcttttcggggacagacgccttctctgacgaactgcccttggatctggaggccctctttgaaccaaccgctttctctctgaaccgggataaaactttctttgcagacgctgacaagggacagcggctgaaggttcatggccttctcgtaaaagatgacaaggtgacactcaccaagggatacagaaataaaatcagggccttccgacatatgttagagcaggggaaggtctgcgaggaagacatgcctcgcctgcaaggtcacttgaagttctttgagtttatcgagagcaagaacattaatcagtga

SEQ ID NO: 14085 - RNA, 1020 nt, synthetic construct
  source 1..1020: mol_type = other RNA
atggacgcttgcccctccagtaagctgatctatgagatctgtgtcatgaatgctgcaccgctcctggtgagcttcgacagcatcgataaatacttagaggcgctgcccgaaaaacaccggacagcccactcagccgcgttgtctgatcttttttcaagaggtattcccccaatcacatccgcctactgcctggccattctttttggatatagcctggagttcatttacgcgatgactaagaggcctgataaattctaccgagtgttcagcattaagaatggcaaaaaaacacgaagaatccaggcccctaaggttgctctcaaggtgattcagaaatggtttggtgctcatctgagtaataacctgacttttcatccacacgtttacggatttgtcaagggcaggtctttcgtggatgctgcaaagcatcatatcggggcccgctgggtgctagctgtagatatagacaacttctttcctagcatttctaaagaaagagtgctgttgtccctcattgcccaaggttattctaacgatgccagtaaactcatctcagacctgtgttgcttgaacgactctcttgcacagggcagtcccgcaagcccagttctatccaatctgtgtatgcagtccatagacgactcgctcatcaagctgtccgagaagtataaggtaacagtgaccaggtacgctgacgatatcaccttcagtggcatcggagaattcgatgaggggctgaagcgggatttacaagaattaattaagagctcaggctttcagctcaacgatgacaaaacctattttgccgacagcaccactggaaagcgtcttaaagtccacggcttgctcgtgaaggaggattcggtccgcctgacgaaagggtacaggaacaaaatccggctgtataagcaccttcagaagtccggaagaatttctgaagatgactaccaccgcatcaatgggcatataaatttcgcagacttcatcgactcaatgtccgggataaaggacgccatttga

SEQ ID NO: 14086 - RNA, 966 nt, synthetic construct
  source 1..966: mol_type = other RNA
atgaacgcaccaccccttctggtgtcattcgctagtatcgacaaatatttggaggcccttcccccccagtacaaaacccagtacgaggatgaaatcaagcgtctgtatactaacggctttcctcccatcgtttctaagctatgtctgggagtgttgttcgggtactcatccgactttatatacatactggcgaagaagcctagcaagttttatagaagcttcactctcaaacaaggcaaaaagacccgaaaaatcttcgctccaaaggtgggtctgaaagtcatccaaaagtggttcgctacgcacctcagcaatgtgattgagttccaccctcacgtccttgggtttgtaaaaggcaagagcttcgcggatgccgctcagctccatattggagcccggtggattttttctgtggatatcgtggacttctttccatctataagtaaggaggccgtgattgaagccctcatacaaacccagtactacacatctaaggccgccgaattaatttcagacctgtgttgcttgaatgatgcattagctcagggaagcccggccagccctgtactctccaatattgtcatgaagccatttgacgagaagctcctggagctaagtaaaaagtacaacatcgttgtgtctaggtacgcagacgatatcgtcttctcggggaaggacgagtttgataccaaccttcataaggatttgaacgaactgttcgcagaatcatgcttcacactgaattcccagaaacagtattttgcagacagaaataagggccagcgcctgaaggttcatggcctgttagtcaaagatgaaaatattgccctcactaaagggtatcgcaacaaactgagggcttataaacacatgctgaacacaggtaaagtgtccgaaaaggacgtggagcggctggttggacacgtgaaattcagtgagtttatcgagtccaagaatgtaaactga

SEQ ID NO: 14087 - RNA, 957 nt, synthetic construct
  source 1..957: mol_type = other RNA
atgaacgccgcgcctctcttggttagctttctgaaagtggagacatacatcagggcactgcctattaagcagtctgaacagtacaaggatgagattataacactggtggaaaagaagttgccaccagttgtgtccccttattgcctggctgtgctgtttggctactcgcttgaattcgtgcatgccttaagtaagaaccagcacaagttctatcgacgcttcgagatccgccaggggcgtaaaaccagaaaaattgatgctcccaaagtcgccctcaaagttatccaaaaatggttcggctttcacctgagttcagctctcgaatttgagccgcatgtcttcggattcgtcaagggcctgtcatccgctaaagccgccaagctgcatgtgggggctcgatgggtgtacagcgtggacattctgaatttcttccctagtataagccagataaagatcaaagaggcgttaataaaggaagggtacaccgataatggcgcatctttgctcattggattatgctgtctggacggagcactagcccaaggctctccagcaagccccgtgctaagcaacatttttatgagggacattgacaagaaactttccgagttggctaggaaatatctcattactatgactaggtacgctgatgatatcgtgttctccggtagagacaattttccccagaaactgaaagacgaggtatcacaattgatcatcgaagccggactggtgctgaatgagaacaagcagtattttgcatctgtcgacaaggggcagcgccttaaggtacacggcctccttgtaaaagaagaggccgtccggctaacgaaagggtatagaaataagatccgggcctacaaccacatgctggccaacggtaagatctccgagaaggacatcccccgggttcttggtcacctcaagtatgcgaagtttatcgataacctgaattga

SEQ ID NO: 14088 - RNA, 951 nt, synthetic construct
  source 1..951: mol_type = other RNA
atgaaggcggcgcctctgcttatcagcttccacgagttgggctcttacatcgaggccctccctgaaagccagaaacggcgttacgctgatgaaatcagcaagttggccgaagcaaaattgccccctgtggtgagtccgtattgtcttgcgattctgttcggatacagccgagaattcatccacgcaatgtccaagcaacagcataagttctatcggaccttcaccattcataaagggagaaaacgcaggacaatacaagctccaaaggtggccctgaaggttatccagaaatggattggctatcatctctgccaggccatacagaggcccgagcacgtctttgggtttatccccggctgctccgccaagatggcagcagagcaacattgtaatgctctatgggtttacagcatcgatataaaagacttctttccgtctatttcagatgagctggtagagtcagctctgcaggagctcgggtattccgagatgggttcaaagttgataactagcctgtgctgttttaacggtgtgctggctcaaggctccccagcttcgcctacgctatccaacctcatcatgattaaagtggatgacgaccttcgcaaactcagtgaagaactgaacatttctgtcacacggtatgccgacgacatcgttttttccggcaagaacgagttccccgaagggcttgggggtcagatttctaacatctttcaggatgccggattagagctgaatgaagaaaaagagtacttcgcagacagtaggaaaggacagagattaaaggtgcacggactgctggtcaactcagataagccacgactgccaaagggctacaggaataaagtgagagcctacaagcacctcctgaattctggaaaggtcagtgagggtgacctgaagcgcctcttaggccacgtaaattatgccaatagcattgagtcgtga

SEQ ID NO: 14089 - RNA, 963 nt, synthetic construct
  source 1..963: mol_type = other RNA
atgatcgcaccccccttgctggtatcattctctgacatcaacagctacgtaaattcattgagtgaggagaaccaggctttacatgaaaataacattcggagcctgtttgaccagaacctgccaccaatcggatctattagtacactgagcaccatgttcggattcagcccgcgctttgtcgccatgctcctgagtgatgtgtcgaagcaatatcggaccttcgaaattcggaaaggtaaaaagaaaaggaagatccaggcacccaaggtgggcctaaaggtgatacagaaatggtttggtcatcatctctcaggggcgcttgtcctcgacgatggcgtgtatggattcgtgcctaaccgtagcgccatagacgccgcgagtaagcactgcactgcctcctgggtctactcctttgacataaaggatttctttccctccacaactcgtgaaactgttttgagcgcattggtggagctggggtacgtggaggagtccgccgaactgatttctcaactttgttgtctggacaataaattacctcagggagccccctcttcaccagccttgtctaacctcgtgatgcgaagaattgataccgaactggctcgattcgctgatgagaacaacctgacatacaccaggtatgccgatgacatcgttctgtcggggaaggaggagtgcccggaatccctctccgaggctgtccggagcgcctttaaagatacggactgggaactgaatccaaacaaagaatactacgctgacgtcagaaagggccagagacttaaagttcacgggctgcttgtgatgggggagaagcctatcctaacaaaaggttataggaataagctcagagcttacaactatatgatcgaaaatggcaaggcaaaggagaaagacttacctaggctgaagggccacattgagtatgcacgcctcgttgatcgctggaataatggctga

SEQ ID NO: 14090 - RNA, 963 nt, synthetic construct
  source 1..963: mol_type = other RNA
atgaatgctcctccactcctggtgagttactctaccgtcgaatcctacctgagtgccctcagccaagattctgtctcatcctatcagaaagagataaacgacctagtcgcacgcggactgcccccagtggtgaatacgaaattgctcgggctgctgttcggcctctccaataagtttatcacttccctcctgattgacaagaagagacactatcgcaacttcaatctgcggaaaaagggtaaagtgagaacaatcaacgcacctaagatgagcctgaaagtgatccagaagtggtttgggagtcacctcgcctcaagcattgattacgcatcgtacgtatacgggtttattccaggtagaaaagcgctggacgccgccaaggtgcattgcggatccaggtgggtttatagcattgacatcgaagatttctttccttcaaccccgtctgaactagtttacgaatcccttaagagcctggggtataccgagctgggcagtaagatcatcaccgagatatgtacgcttgacggctacctaccccaaggagccccttccagtcccgctttaagcaacctggtcgccaagaatctggaccgacatttgtataaattgtcaaccgatcttggcgtaaaatatacacgatacgctgacgacatcgtgttttcaggtgcggaggatttccccaagaatctgccggaaatcatcattgagattttcgctgacacaccatggtctttatctgaacgtaagaactatttcgcagacactttacttggacacaggctgaaagtccatggcctgctcgttaaggaggacgccgtgcggcttactaaggggtaccggaacaagatacgcgcctacaaacacctgctcgagcagggaaagatcaaagattctgatttgcagaggataaaaggccacttgacatatgctaagctcattgataacgatagcgagctttga

SEQ ID NO: 14091 - RNA, 984 nt, synthetic construct
  source 1..984: mol_type = other RNA
atgattgcaccacccttactggtttcttattcctcccttaatgaatatctggaggctctgggtcctgagcttagttaccagtataagaccgaaataacgcagttattcgaaaagaggctgccaatcgtagtatctttcaggtgcctgtccgtattatttggcttcagcacaaactttgtgtacaaactggcccaacaaaattggaaattttaccgcaccttcaccatccgtaaaggcaaaaaaaaacgcaccatccaggctccaaaggtcgcgttgaaggtcatccaaaagtggttcgggtaccacctgagcgaagtcctctcgttcgataaatacgttcatggttttgtgccgggacgaagtgccattggggcagcgaatgtccacacaaacgctcggtgggtgtactcagttgacatcgaaaatttctttcccacaactacgaaaaaggtcatcaaagaaagcttgatctcaatcggatattcattcgaggcagctgacctgattgccaacatatgctgctacaaggacactctggctcagggtgcccctagttcccccgtgatttctaacctagtgcttaaagaactcgataagcagctcaagaccatagccgattccaaccagattaggttcactagatatgccgacgatatcgtgtttagtggcattgataagtttccgaccgagatcaaggatcagattagcgacttgtttaaggaaacatgttggaagctgtctcctgagaaggagtatctagcggagtcacccatgcgcctgaaggtgcacggcttcctcgtgcatggggagaaagcccggcttactaaaggctatcgaaataggataagagcatacaagcatctcttgaatgccgggaagattagaaacgaggacctgggccggattgtgggacacgtgaaatacgccgagagcgttatcaaggctcagaaaccaggactctgtcctgactctgcacacagctga

SEQ ID NO: 14092 - RNA, 954 nt, synthetic construct
  source 1..954: mol_type = other RNA
atgcttgcaccaccgttgttagtgtcctacacaagtcccgaggattatctcattgcgttggacccaggactccgtaggctgcatcagagtaagatcaagcggttgctcgagcagggtctgccccctgtggtgagctccagatgcctgggggttctgttcggttactccaccaagttcatcaatgccatggcccaacagaattggaagtactatcggtcattcaccattcgcaaaggcaagaagaagcgcaaaatccaggcaccaaaggtagcgctgaaggtgatccaaaaatggtttgggcatcatctgagtgaaagtctctcgttcgacgaccacgtatttggcttcgtccctggcaagtctgcaccctttgccgctaaacagcacactaacgctcgatgggtctatagcgtcgatatttctaatttcttccctagcacccccaaggacgtgatttcaacaactcttgtggacattgggtactcagaaaaggctgcaaagctgatgagcggccttctatgtcaccgcgactatcttgcccagggctcccctgcctccccaatactgagcaatctggtttttagagagctcgataaacagctcaaagagatcgccggaaacaataggataaggttcacccgttacgccgatgacatagtgttttctggggtcgaccaattccccgaaaacattaaagaacaggttaacaacctgtttgctgattcttgctgggtgctgtctaaggagaaggagtatttttcagagattcctaaacgactgaaagtgcacggattattagtccatcgcgatagaccgcggcttacgaagggttacagaaataggatcagggcctacaaatatctattggagacaggccaaatcgaaaaacgggatctgagcagaatcatgggacacctcaactacgctaagtccatcgacactcaggaaaaatga

SEQ ID NO: 14093 - RNA, 954 nt, synthetic construct
  source 1..954: mol_type = other RNA
atgaaggcacctcccctgttagtgtcctactcatcgatcgacgattatctgtccgcaatttcaccggaagacagagagcaatatgaaaaacagattaggtcgttggtctgtaaggggctcccacctgttgtgtctagccagtgcttagccaatctgtttggatataccaataccttcgtgcatagcatggcttcaaagaactggaaatattaccgtggattttctatcaggaaggggaagaagaagagatacatccaggctcctaaggtcgccctgaaggtgatccagaaatggctcggctttcatcttgccaaatccatcaactacaacgatttcgtatatggttttgtggaaggcaaatccgccatagacgcagcagcctgtcacactaatgcaacttgggtgtatagtgtagacataaaagacttcttcccctcaaccagcaaagagacattgatcagtaaccttgaatccctcggttactccaggaaggcttcagctctgattgcgagcttatgctgttacgaagattatctggctcagggaagtccaagcagtcccgtgctatctaatctggttatgcgggatattgacttggagttgtacaaaatcagcatgatccacggcgtcaggctgacacggtatgccgacgatattgtgttctctggacaaagcgagttcccagaatccctgaagcgagaggtcaagagcctctttgtggatacatgctggtccctgtctgagcagaaggagtacttcgcgcaaatacctaagcgcctaaaggtgcacggccttctcgttcatcagaatagtccccgcctcaccaaagggtaccgcaacaaaattcgagcttttagacaccttctggaagcccacaaggtccatgagaaagacattaaaagactgacgggccacatcaaatacgccgagtctgttgatcggcataagaactga

SEQ ID NO: 14094 - RNA, 960 nt, synthetic construct
  source 1..960: mol_type = other RNA
atgattgctgcacccctattggttagttacaattctctggaggactacctctcctgtctgagtagcgaaatgcgcgaggaacacgaacagcagataagatggttggtggaccaaaagctgcctcctgtcgtctcaagccgttgcctcagcgtgctcttcgggtacagtgcaaagtttgtcaatgcgatggccctgaacaactacaactattaccgcgagttcactataagaaaaggcaacaaacgacggaaaatccaggcccccagggtagccattaaaggcattcaaaagtggttcggacaccacttgagcgaggttctgccagtggaggattatgtctacgggtttatcccaggaaggagcgctgttgatgcagccgcacagcattgcggcgcttcttgggtgtattcagtcgatatcgagaacttctttccgagcacaacagacgatgtagtgattaaagcattaatggagatcggatacagtgagaaaggcgctagacttataacccggctctgctgttatggcgatcgcctgggacaaggtgccccatcctctcccgttctctccaacctggtgatgaaacctatcgacattcagcttaagaatatcgccgagaatctaggggtgaagctcactcgctatgctgatgacatcgtattttcaggccagggaaaatcccctgtcgaattaagggacagggtcctggatgtgtttaaagacacctgttgggatctggccgaaaacaaggaatatttctcgaattcagacttagggcagcgacttaaggtgcatggcttgctggtgaatggtgagaagccacggctgacgaagggttaccggaatagggtgcgggcctatagacacctgctggagaacaatcgtgttaagcccgaagacaagcgaagacttattgggcatatcaagttcgcggaatccgtggaatcttggaaggagtga

SEQ ID NO: 14095 - RNA, 960 nt, synthetic construct
  source 1..960: mol_type = other RNA
atgaagccaccgccctttttcgtgtctttcaggactgctgccgattatcgggcggctctgggcgatggtgttgcggaattgtactggcccgatattggccatcttggcgagcgtagactgccccccgtagtgtccgtacgagccttggcatgcctttttggcgtgtcttccaaatttgtgggagccctcagaagaaatccagagcggtattatcggtctttcgttatacgcacagggaggaagaagcgccagatccacagcccgaaggttgggctcaaagtctttcagaaatggttcgggacccacctcgcagcagcactcgagttcgatccttgggtattcggcttcgttcctgggaggagtgcgccaatggccgctcgtgtgcacgctagagctcgatggatttacagcgtcgatctagccgactttttcccatcagtgtctcgcactagggtggtgggagctctgcaaggactgggctaccctggccatggtgccgagttagccgccagtctctgttgctacggcgaaggccttgcacaaggctcccctgcaagccctgtgctgtccaatctggtctttagggaacaggaccagcagctgcacgagctggcgagggaatttggggcacggttgacgcggtatgccgacgacattgtcttcagcggtcaggcagccgtacctgctggacttcccgaccgggttaaagctgtggtgaccgccggagggtgggacttaaacgacgccaaggaagagctggccgaatcacccatccgtctgaaggtgcacggactcgtggtccatggtgaccgcccacgcttgacaaaggggtaccggaacagaatccgagctctaaggcacctgagcgccgtcggtaaagtgagatcggaagatgctgcccgcgtcgcaggacatttacgatacgccgacagtatcgatagactgtcagaggaggagtga

SEQ ID NO: 14096 - RNA, 969 nt, synthetic construct
  source 1..969: mol_type = other RNA
atgaacactccacccttgctggtcgtgttcccgggcctggaatcccttggcgctgccttggctagggatacgcaccgcatctactggagcgacgtagaaagactggttgagaggggcttacctcccgcggtgagtgtgagggtggtggcatgcctgttcggattttctgcgcgtctcgtcggtgcaatccagcggagcccagagcggtattacaggatattcaagattccaaaagggaaatcatcgaggcagatagaagcccctagggtcgctctcaaggtaatccagaagtggttcggatcccatttggctgccgcctgccctcttgacgactgcgtgtatggatttgtgccgggcagatcagcacccttagccgctaaacagcactgtggcgccagttgggtttacagcctcgatatccgggatttttttccctcagtaagctcaggaatggtgagcgaagcactgcgcctgaaagggtaccctgatcacgcagcctctctcatggccaagctatgttgttatgagggacggctggcacaggggagtccagcttctcctgctctgagtaacctggtttttgccccagtcgaccaactgcttgccgaaattgcacgggcgaatgcttgcacatacactagatacgctgacgatatcaccttctctggccgaacagaggtccccgcacgcttacaggaggaggtgagaaaggccctgcaagagggggggtggcagattgcgggtcataaagaacacttggcccgtgctcctcgacggctcaaagtccacggcctgctggttaacggaaggttcccccgccttaccaaggggtatagaaatagactccgcgcactggagcatcttctcggacagggccgactggacgaagccaaggagatggaagtgagaggccatctagcctatgcccgctccgtggagagcttgcaaaagtcctccgatggtggttga

SEQ ID NO: 14097 - RNA, 972 nt, synthetic construct
  source 1..972: mol_type = other RNA
atgagaacccctcctttccttctgtcattctcctccctcgaggaatacctgcgagcactgtccgattccgacagagcggaaaaggggtccgaaatcaacaacctagtggctcagcagctcccccccgtcgtttctaaaaagtgcttagccactcttttcggcttttcaaactctttcattgacacacttcacagacggaccgagcgatattatcggatatttgaaattcccaaaggcaagaagaagcgcataatccaagcccctcgtgtggcgctcaaagtgatccagaagtggtttgcccattatttggctaattcactgaacctgcacgaggctgtgtttggatttgtgaagggaaggagcgctgtgcagggagccgcactacactgtggcgcacattggatttactctgtcgatatcgaagacttcttccctactacaagcatcgacaaggtgattagttcgctgacgaacctcggttatggataccccggggctgccctcattgccaagctttgctgctacgagggtaatctcgcccaaggtagcccagcctccccagtcctgagcaatctcgtattccgcgagatcgacgaagaactgtttaccttgagtaaacagaatgggatctgttacaccagatacgccgatgatattgtattctctggcatcaattcttttcccgatcacattagggaggaggttatcagcatcatacaggccagggggtggaagctgagcatcaagaagattcatttggcaaaaaggccgtacagactgaaagtttacggcttactgatacatggggagcgtccgcggctgacaaagggctatcgcaaccggatcagggcgttcaaacatttattcgcagacggcaaaatcccagaggacgagataagtaaaattcgcggacacctgtcatatgctcacagtattgaagagtttgagatgatgccaaaagatgacttgtga

SEQ ID NO: 14098 - RNA, 960 nt, synthetic construct
  source 1..960: mol_type = other RNA
atgaacgcaccgcccttactggtatccttctcgagcaccatggagtaccgggaagcgctgagccacgaattgcgcgggctctactgggagactatcgagaagctcataagcaagaaattgccccctgtcgtgtcgattagatgcctgagtatcctgtttgggtacagcccaagattcctgggggctatgtatcaatttactgaacgctactatcgtacgttcaccattaaagctggcaaaaaaaagcgaaccataaacgcccccaaagttgcgctgaaggttattcagaaatggctgggttaccatctgggcgaatcattgtcattttgtgaccacgtgtacggatttatcaagggtaaatcagccatccagggagcttacgtgcactgtggtgccagctggatctacagcgtcgatattgagaatttcttccagactacaaacattgagaaagtgaagtccgccttaaatggcatcggcttccaggaacgaggatcagaagtgattagtaagctttgctgctacagtgggaacctggctcaaggatctccagcctcccctatcttgtccaatctcgtatttacaaacacagacaatgatctagcaagactggccaacaagaatgggctattatattctcggtacgctgacgatatagtgttctccggaaaagaagacgtccctgccgacctgtctaacgatgttaaatctattatcaccagatctggctggaaaataagcgagaaaaaggagtatctcgcaaagaggccacacaggctgaaggtctacggcctcctcgtgaacggcgattatcccaggctgacaaagggatatcggaatcggatcagggcttttaagcatcttgtggagaatgagaagattgcagatgagaataagaagcgccttcttggtcatctcgcctatgcaaagtccatcgacaacttcagtaacaaatattga

SEQ ID NO: 14099 - RNA, 969 nt, synthetic construct
  source 1..969: mol_type = other RNA
atgcagagcccaccccttctggtgtcctatccagagctcgaggattttatcaaggctcttccaaatgactatgcggccgatacaaagcaggtgctgcgccatctgcactctctgtctttaccttctgtgacctccataacatccctggccgtcttgtttggtttcagtcctaggatcctagcctccatgaccaatcaaccggagaagttctacagagtgttccggatccataagggtaaaggaaagtacagaacaattcaggctcccaaggtggccctcaaagtcattcagaaatggctgagtcatcacattagcgaagccatcacttatcccaaatacgtgcatggcttcgtgcccgggcgaagccacatcactgctgcacaggcacacgttggagcgaattgggtgtattcaatcgacatcgagaattttttccctactacctccgagagcaaggtcgaggcagcactgaggggcattgggtacagcgaatccggctctaagctcattagcaagctttgctgttatacgaagaacttgtcgcagggcagccctgcctctccagtactcagcaacctggttttcaaagacttggactctcggattgctgaactctcttcacagatcggggtgaactacaccagatacgccgacgatttagtctttagtggacaaggcgaatttccagaggctttactgcctgtcaaggcatggatatccgaggccggttggagtgtttcaaaagataaggaacacttcgctcaattgcccaagcagaggctgaaggttcacgggctccttgtacacgaatcaagtccgattctcaccaaaggataccgcaaaaaaatccgaacgtataagttcctacacgagaacaaccggatacgtgaagatgacaaaaaccgcatcctgggccatctgtcatacgccaaactggtggattcgttttccaatcagacagaggaatga

SEQ ID NO: 14100 - RNA, 978 nt, synthetic construct
  source 1..978: mol_type = other RNA
atgaaaacacccttgccactgttttttacctttgccgacgcagaacagttgcttaaggccctgagcaagcctttgagagacaggtattccgcggaattacttcgactccagcaactaggcctgcctcccctggtgtcttggtctatcctgagcgtcgccatcggcgtatcacctcagttcatcacctcaattctgaagaacaagtctaagtactatcgggtcttcccgatcagtaaagggaagggcaaaaaaaaacgcattatagaggccccaaaggtgtccctaaagattatccagtcctggtttgcctaccacatatcgctgaatgggaacattaccttgagtaagagcgcattcgcatttattcccggtaaaaacggaatatacgaggccgccagcgttcattgcggtgctaagtggatcatgtctatcgatctgagagactttttccacacgatcaccagtgaggctgttgtcttagctctgactgagattggatatagggaggatcaagctagcaagctgtcagatctgctgacactgaatcagagattgccacagggcgccccttccagcccagtgatcagcaaccttgtgttctcgaaaacagacttcaagattaatgagcttatcgcagatttaaacgtgaaatacacacgctatgcagatgacctcaccttttcctctgaagacgaatcattcgatatcaatagtctcaaggaacggatcgtacagatactggtttccgataattggattgtcgctgacgagaagctgaagatagctaaggcgccgaacaggctcaaggtgcatgggttcctagtgcacgagattaaaccccgtctcactaaagggtatcgcaacaaaatccgagcctacaaacatctccttaatactggaaaagtcgtgctggaggacctcgataagattaaaggccacattaactactctgactacatcgaccggctcaatgaatga

SEQ ID NO: 14101 - RNA, 978 nt, synthetic construct
  source 1..978: mol_type = other RNA
atgaaaacacctcttcccctgttctttactttcactgatgccgaacagctgctgaaggcattatccccaagcctcagagatcgctactccgctgagctcatccggatgcaacaactgggcctacctcccctggttagttggtctgtgctgtctgtggccatcggcgtatccccacagttcattacatcgctgatcaagaacaagatcaagtactacagggtgttcaccattcccaaaggaaagggtaaaaaacgccgggttattgaggctccaagggtgtctctgaaaattattcaggcctgggtagcgtatcatctgagcttgaatgagaacatcagcctcagtgagtctgcatttgccttcatcccgggcaggaatggtatatacgaggccgcaagcaaacactgcggcgccaagtgggtcttgtccatcgacttaagagacttttttcacacaattacgagcgtgttagtcagcgccgcgcttgtcaaaatcgggtacaaagctgatcaggccaacaagctttcagatcttctcactctgaaccagcgtctgcctcagggagctccctccagtccggtaatctccaatctcgtgtttaagtcgaccgatttgaaaatcaacgaacttatagtcggcatgaatgtcaagtacaccagatacgctgacgatctcacctttagctcagaggacgaaggagtggacattgaactactcaaggagaacgtgctacgagtcctgaattcagatggatgggttgtggcagaagaaaagctgaagataagtaagtcaccaaatcgcttgaaagttcatggcttcctggtgcacgagataaagcctaggctgaccaaggggtatcggaacaagatccgagcatataagcatttgctgcagacagggaaaattattgagggggacctggacaagataaaaggacacgtgaactattctgcctatatcgacaaactcaatgaatga

SEQ ID NO: 14102 - RNA, 978 nt, synthetic construct
  source 1..978: mol_type = other RNA
atgaagactcctttaccactgtttttcacttttacagatgcggagcaattcctcaaagctctctcaacgccactccgtgatcggtattccgctgagcttattcgcctgcagggcttaagactgccccccctggtcagttggagcatcttgtcagtagccattggcgtctccccccagttcatcacctctcttattaagaacaagtcgaagtactaccgtgtcttctcgatcagtaagggtagagggaaaaagaaacgaatcatcgaagcccctaaggtgtccattaaaattatccaatcatgggtggcgcaccacctgtctatcaaccacagcttggggatctccgaaaatgcctatgcctttataccgggaaagaatggcatatacgaggctgctagcaagcattgcggggcaaaatggatcctgagtatcgacctacgcgatttttttcacaccattacgtctgatatcgtgataagcacactagtggaaattggctatcgcgccgaccaggccgccaaactttcagaactgttgaccctgaatcagagactcccacagggtgccccaagcagtcctgtgatatctaacctggtgttccgctccacagacctcaaaatcaatgagcttatcagcaacactgggattaaatacaccaggtacgcagatgatttaaccttcagcggagatgacgaaacattcgacatcgaggaattgaaagacaacgtcgttgagctgcttctgtctgataattgggttgttgctgaggaaaagctccggattgcaaggattcctaaccggctgaaggtgcatggatttttggtccacgagaataaacccagactgaccaaaggttacaggaacaagatacgagcatataagcatctgctgaggactggcaaaattgtagagaaggacttcgacaagatcaagggacatgtgaattattccgaatacattgaccggctcaacgagtga

SEQ ID NO: 14103 - RNA, 999 nt, synthetic construct
  source 1..999: mol_type = other RNA
atgaaaacaccactgcccttgttatttagttacgaggacgaggctcagttcctccgaagcctcagctcaggtttaagaaaccggcactcagaggaagtgcgccgtctggtcgccataggactccctccagttgtgagctggagtgtgctatccgtggcaattggcgttagccctcatttcctgaacagcatcatcaagaacaaatgtaagtactatcgctcttttacgattagtaaaggaaaagggaagaagaaaaggctgatcgaggccccaaggatctcactgaagctgatacaggcttggttggcctaccacctgtctcgcaatagcgccgactacatctccgaaaattcgtacgcgttcatacccggggtgaatggtatctatgaggccgcaaaacggcattgcggctcccagtgggtgctgtcgattgacctcaaggactttttccactatgtaaactctaacaagatcatgcccgcactgctggatcttggatacaggacagaacaagcagctaagatcatcgatattgtcactctgcaggataggctaccgcagggggccccttctagtccctacatttctaatatcgcttttaaacccaccgatgagttaatcgaaagaattattaccggaagaggtgttagctataccagatacgcggacgatttgaccttctccgggtgcgatgccgagttcaacatcgacggcttcaagggcgaaattattaacgctttgaagtcccacggttggatagtagcccttgataaagtcaaaatctctaagaagccaaaccgacttaaggtccacgggtttctggtgcataatcagaagcctgtcctcacaaaaggctaccggaataagctccggacttaccgtcacctgatgcaagcaggaactattaagcctgacgatctcgacaaaataaaaggccatctgaattatggctattatatcgaccgccttaattcacaggaagtggagttttcctgttga

SEQ ID NO: 14104 - RNA, 990 nt, synthetic construct
  source 1..990: mol_type = other RNA
atgaaaaccccactgcccctgctttttagctttgagaacgaaacccagtttctctcctccctgtctttagggctgcggaatcgacacgcagaagagattaggcgtctgcttgctttggagctcccgcctctggtgagttggtcggtgctgtccgttgccatcggagtaagcccccatttcctgaacagcataatcaataacaaggtcaagtactatcgaacatttactgtgtctaaggggcgggggaagaaaaggcgcctgatagaagcaccccgggtgtccctcaagctgatccaggcctggatcgcacacagtctgtcccacatgtctagacaatatattagcgagcactcctacgcctttattcctggtgtgaatggcatatacttggctgcaaaaaagcactgttcaagtcaatgggttctatcaatcgacctcaaggacttcttccacagcataacagccgagaaaatcatcccagcccttattgagatgggctacagggctgagcaggcttctaaaattatcgatttgatcacgctgaatgagcgtttaccccagggggcgccatcaagcccttatttctccaatgtgtctttccggccaacagatgacttaatcgtgaggatgattgacggacagagtatcaaatacactaggtatgcagatgatctaaccttcagtggcgtggacctggatttcgacgtcgaaaaattccgcgatgacatcattgccgttcttcacgagcataactgggaagttgccctcgagaaagtcagaattagcaagcagccgaacagactgaaggtccatggctttctcgtacataatgataagcccgtgctgaccaaaggttatcgcaacaagattagagcttatcgctaccttatgttgtcaggcgcgattaagcctgatgacatatgcaaagtcaagggacatttgaactactcagactacatcgacagactcaatgcctctgaagaagtgtga

SEQ ID NO: 14105 - RNA, 978 nt, synthetic construct
  source 1..978: mol_type = other RNA
atgaaaacacctctgcccctcttctttagctatcccgatgccgaacagctgttaaaagctcttagccaatcgctccgggtgaaatatagctccgagttggcccgcctggaacagctcaagctgccaccccttgtgtcctggagtgtgttgagtgtggctattggggtcagccctcagtttatcaccagcctgattaagaacaagtctaaatactaccgggtcttctctatctccaagggcaaaggaaagaaaaagaggacaatcgaggctcctaaagtgggtctgaaaattattcaagcatggattgcgcatcacctatccattaacaccttcctagatatctctgattccgcgtatgcattcataccaggcaagaacggtatataccaggcagctaagaagcactgtaactcaaaatgggttctgagcattgaccttaaggacttcttccataccatcaccctggacaaggtaattctggcactcatcgatattgggtatcacgccgagcaagcctcaaaactggccgagattttgactctgaaccagaggttaccgcagggcgctccatcctcacctgtgatcagtaatctcgtctttaaaagcacggacgcctgcatcaacgagttcatagtcgaggataacatctcctatacaaggtacgccgacgacttgatctttagcggggtaaatgaggatttcgatatcgattcactgaaggacaatatcatagttctgttacagtctaagggctggatcatcgccgaagaaaaactgcacatcgcgaaagttcccaatcgcctcaaggtgcacgggtttttggtccatggcaacaagccaagactcactaaaggatacagaaataagattcgggcttacaatcaccttcttcatgccggacgaataagtgaaaaggacatcgaccgtataaagggacatgtgtcttactctgcatttattgatagtctgaatgactga

SEQ ID NO: 14106 - RNA, 984 nt, synthetic construct
  source 1..984: mol_type = other RNA
atgaagactccccttcctttgctgtttagctataatgatgcgcagcagtttctgggagctctaagccctgaggtccgcgatgtctacagccctgagattaaccgactctttgacaggggcttgccgcccgttgtgtcctggagtgtgctcagtgtcgctatcggggtttcaccgcacttcatcaactcaatcattaagaacaaggataagtactaccgtatcttcccaatcgcaaaaggcaaggggaagaaggtgcggattatagaatccccaagagtgggactgaagatcattcagtcgtggctggcccaccatcttgcaacaaacgataatattcccgtctcagactcagcatatgccttcatacctggaaaaaacggtatctacgaagccgccttcaggcactgcaatgccaaatgggtgctctctatagatttaagggacttctttcactctattgatttcgaccgcgtgatcaatggcctgagaaataccggctacacttttgaacaatctggaaagatcgccgcgatagtcacatacaagaatagactgccacaaggtgcacctagctcccccgtacttagcaatattgtatttaaagacacggatgacaagatcaacgacattatcgccgacaaaaagattatctatactcggtatgctgacgatttgacattctcttccgatgacctctccatcgatgtggagaacctgaaacagaatattataaacctgctagagaacgagaattggacaattgctaccgagaaacttaaaatcagtaagattcccaatcgactgaaggttcacggcttcctcgtgcatgatgttaagccacgcttgaccaaagggtaccggaataaactgaggacctatgaacatctgctcagaaatgggaaaatcatagaaagcgacttaaaccgtattcggggtcacgtgaactatggcaaacatatcgacaagctgaacgacgagaactga

SEQ ID NO: 14107 - RNA, 984 nt, synthetic construct
  source 1..984: mol_type = other RNA
atgaaaactccactccccctgcacttttcatacgacagtttagaccagttcctggcaatcctttccccaggccttaggcagcgccatgccgaagagctgagacgactggatgatttgaaacttcctccggtagtgagttggtcggtcctcagcacagccattggtatctctccgcacttcatcaactctttgatcaggaataagaacaaatactacagggtcttcacaatcgcaaaaggaaaggggaagggaaaaagggtcattgaggccccaaaagtgagcataaaattgatccaagcttggctggcgttccatctctccaataacgacaacctgggcctgtgcgatgcggtgcatgggtttatccccggacaacacggaatctatgaagcagcgaagaagcactgtgggtgcgactgggtgctgtccattgatctgaaagacttcttccactcaatctcacaccgccgggtggtaaacgcttttgagaatctgggctatacggtggcacaggctgagaagatcgcagacattaccacctataatgcccacctccctcagggagctccaagcagtcccgttattagcaatctggtgtttaacgacaccgataatgctataattcgcttcctagatgggaagggtatctgttatactagatacgccgatgatttaaccttttccggttcagatatttcttatgacgtcgagaagttgaagactgagatgctgcagcttatctccaacgacgggtggatcgttgccaatgaaaaaacacacattgccatagctcccaatagattaaaggttcatggctttctcgtgcatgccgtgacacctcggctgaccaagggatatagaaataagatacgtgcctacacccatctcctgaactctggcaaagttgaccctgaagatctcgacgtcattcggggccacgtgaactacggccgatacattagcaagctaaacaatggtaactga

SEQ ID NO: 14108 - RNA, 966 nt, synthetic construct
  source 1..966: mol_type = other RNA
atgcgtaccccgcctcccccactcctcgtaagctttaagtccactcaaaatcttttggatgcactgccaagcgccattagtgagaagtacaagaccgaaattaatgagctactggataagatgctgccacccgtcgtcagcgtcgccgttgtcagcatcatttttggggtgagctcaaacttcattgccagtatactcaggaatcccataaaacagtatcgggtgtttacgatcaagaaaggcaagaagaagcggcgaatcgagtcccccaaaataggtttaaaattactgcaatcctggatcggagcaaatttgtcaaacaaaaagcttctgagcgattctgtgtacggcttcgttcccaaaagaaatggcgtgtttgaagctgctcagaaacattgtctggctaaatgggtttattctatcgatcttcgggactttttccctaacatctcaagcagaaggattaagaatgagctggaaaagttggggtattcgaagcacgccatcgagctgatctcaacaatctgcacctacgaagaccgacttccgcaggggagtccagcatctccagtgctgtccaatctcgtgttccgggagactgacaaaaacttagaggagcttgcgaagatgctggatattagatacacacgctatgctgacgatctagttttcagtggcctcggagtgattcctgagaacttgcagaacaagatcaagaaaattctgatcgacgacgattgggtgctggccgaggaaaaagaacacttgtctaagcttcctaaccgcctcaaagtccatggcctgctggtgcacggggacaaacctcgcctcacaaagggatacagaaataggataagggcgtataaacatctactcgaactggagaagattaaggaagtagacctgtactcttgcaagggtcacgtgtcctacgccaactccctggacaagttcaccgataaatga

SEQ ID NO: 14109 - RNA, 963 nt, synthetic construct
  source 1..963: mol_type = other RNA
atgaaagccttatcaccacccctattcgttaatttttccagtttagacgaagcgtttcaagctttttcttatcccgaaaacattcaggactggagagcactgactcagaggaacctccctcctgtgatctcaactcaattcctcagcctcctgttcggcgtcagtcccaattttattagttcgataacgcgcaaacccaacaaaaactaccggacatttattatcaagaagggcaagaaggaacgtgtgattaattcaccaaagatcggtcttaagctgttccagacatggattggacatcacctctcccgggcagtactgctggaggaaaatgtatgcggcttcattcctggcaagaatggaatcttggaggccgcttctcagcattccgcagccgggtggttgtattccatcgacttgcgggatttcttcagtaagattaattccgagcgcgtgaaaagcgctctgctggacctgggttaccccgaggattccgccaaacttataacctctctgtgtaccctgaacggatgcctaccgcaaggaagcccagcgagcccagtccttagcaatttagtgttcaagagcacagaccaaatcttcatagatctggcatcaaagctgaacattagatacaccagatacgcagatgatctcgtcttttctgggaacaacaaccagcccgagaacctccctcagatcatcaaggaaatcctgaacaatgagaattgggagatcgcccctgaaaaagaagagaatttgaaagccccgtatcgacttaaagttcatggtctggtggtgaacgggctgactccacgactcacaaaagggtacaggaataggatccgcgcctacaaacacttgaagaataccaacaagatcaaggacaacaaagagaaaatacagggccaccttgcttatgccgatcaggttgacaagttttttgctcagaagatttcttga

SEQ ID NO: 14110 - RNA, 963 nt, synthetic construct
  source 1..963: mol_type = other RNA
atgaagacgagcccacccccccttttggtgagctttaagtccgctaagaacctcatcgatgctctgcctccttctgtgagcgagaagtacgaggatgagataaagtatttgaccgaaaagaacctaccccctgtggtttctgtggccgtggtcagtataatcttcggagtgagtagcaatttcgtagcctctattctcaggagaaaggagtctcagtaccgcaactttactatcaagaaaggaacaaagcggcgaaagattgaggcgccaaaagttggcctgaagatcttccagtcgtggatcggtcacaatcttagctccgcactgatattcccgaaatgtgtgttcggttttatcccagacatgaatggggtctttgaggccgctgatgtgcattgtgaaagtaaatgggtttactctcttgacctgagggacttctttacctcaatatcacgcgagaaagttaaatcagaactcattaacctgggctacagtgcccatagtgccgaattgatcactattttatgcacttatcaggggaggcttccccaaggttcccccgcatccccagtcctgtctaatatcgtcttccagaagaccgactcccggctcctgaaaaaatccgaagagctaggaattaagtacacccgctatgctgatgatctggtcttctcaggcatcaaccctatgccggcagcattacctgaactgattaaagaagtactgctggacgagggctggacaattgcggaggaaaaagagcacatcagctgcttaccaaatagactgaaagtgcatggccttctcgtacacggggagaagccccggctgacaaagggataccgaaatcgtattagagcctataaacacctgctcaacagcggcaaggtgaaggacgctgacttggatatggtgaatgggcacatctcctatgccgagaatctcgaaaggtttaacaactga

SEQ ID NO: 14111 - RNA, 1080 nt, synthetic construct
  source 1..1080: mol_type = other RNA
atgcaccgccgcgctccagctaagaggcagaggctcctccggatccgatgcctgagtgcaggtggtaataatgagagccaagattcctttgcctgcatgggcacccccccaccaccgattttagtctcttttaggtcttttgacgatctgctcgaggctctgcctgtggacggacgtgaggaatataggcaggaactgcagcaactgtacgataaggtccttccccctgttatatcaattagtatcctgtccgttctgtttggactttctgcctccttcatcgcatccatgctgagacgcccccacaaacattacagacacttcgtcataaagaaaggccgaaagagacgggagatctatgcccccaaggttggattgaaactcttccagagatggattgggcatcacctagctgaagctctcaattaccctgactgtgtgctcggctttgtgccccacaaatcaggcgtgttctccgctgctaacactcactgttccgcccggtgggtgtactcactggatttgaaggacttctttagccaggtcaccggggaacggctaagcgcacctctcatcggcttggggtacagtcagaagagcacctcaattattcttaaaatctgcctgttcaacggattcctgccgcaaggatcgcccgcaagcccagtacttagtaacttagcttttgaacctacagaccgcgagctgagcaaccttgcaaagcagcatggtgtgcgctacactcgttatgccgacgaccttgttttcagcggcgaagccctgccgcctgagggatttgaggcccaggtgaaggagatattggcggtgaacaattgggagatcgccaaggagaaagagcattttgccgcactcccagcaagactgaaagtgcacggtttactggtacatggcgcccgacctcgtctgacaaaggggtacaggaacaaaattcgggcgtatcggcatctattgaatacgggcagggtgaaaccaggggacctcgcgagagtaaaggggcacgtctcttattctgattgtctggatcacttcgtggaaaatggcgccttcgaacccaagtga

SEQ ID NO: 14112 - RNA, 903 nt, synthetic construct
  source 1..903: mol_type = other RNA
atgaatcatggtgataccgtgaaccagataaatgagatcgaaagattactggccatcggcctgccgccggtgattagcctctcctccttagccacaatgctgggggttagtgtcaacataatccagtacattgtacgccacccaagcaaactgtatgacgcatttgagctcaaaaaagggcgtaaagtccggcagatttcagctccacgagtcgccctcaaggtaatccagtcctggtttagtgttcatcttgcgaaggtcattccctatccaaatagcgtggtgggcttcagacccggtgtgcctggcgttttcgaaggcgcttcgagacattgccaggcatcttgggtcctgaacctggacatcaaggacttctttgacagcatcaatagggaacggctgaagaggcctctgctggagcttgggtacactgagaagtctgccgatttggtgctggatctttgcacattaagtgatcagttgccccaaggagccccttcctctccacccctcagtaacctcgcatttatgcgcaccgacaaacaactcgaagaggtttgttcacggttcaaggtgaaatatacccgctacgccgacgacctcatcttctctggggaaggtgagtttcctgagggcttcgacacagagataaaagatgtcctggcaggaaacgattgggaaatggctgagtcaaaggaacagctagtgttcgcacccaagaggttgaaggtgctgggacttattgtcaacgatgccgtgcctaaactgactaaagggtacaggaataaggtgcgagcttacaagcacgtgctgtccacgaagggaagcgaggctgataatttcgccgtactacaaggccacattgcgtatcacgactcattggttaagtttaacagcgactga

SEQ ID NO: 14113 - RNA, 1182 nt, synthetic construct
  source 1..1182: mol_type = other RNA
atgttgaatgcttgtctgtgctggcagggaaggaagaatggcaagttctcttttggggggagcgcctctgcccgagcttgcattacccccattagtgaggactacgtgcagaaagaagcttgcagaaaggccggagcgccctcaaatcacccccccttcggtcggctacatcagaggcgactgttcagtctggcctttgccgttaaagccctaccacctcctctttttgtttcctttgcaagcctgtcagaagccctcgaagctatgcccgtggtgtacagagacggcatccgcgccgtgatgcaacctttggtggaccagggtctgcctccagtccttagcagtggggtggttgccaccttattcggtgtgtccactacttttattagagctatcgccaactctcctgcacggtattacagagaattcacaattcgcaaaggcaagaaactccgcaaaatctcggctccgaagatcgctctgaagctgatccaaagctggatcggaacccacctgtcacactccgtcgtcctctcaaactgtgtgctcggatttgtgccaggccacaacggtgtcatagaggccgcagcgcgccattgttctgcgaagtgggtatactcactggatctgcgggacttcttccccagcatcgactccaatagggtgatccagagcctgttgaaattgggctaccccgaatcggcatccattctgataacacagttgtgcaccctgggagggagccttccacaaggctcccctgccagtccggtcttttctaaccttgtgttcatccagacggatgtcgagcttaatgcgatggcagaggagttcggcgtaagatacactcggtatgctgacgatctggtgtttagcggagagggggagcttcctgctgatctgcagacaagggtcagggattgtctcgataagcatgcatggcacatagccccagaaaaagagaaggtggttaaactcccccaccgtttaaaggttcacgggctactcgttcacggctccgagccacgcctcaccaaagggtatcgtaaccggattagggcatatcgacatttagtactggctggcaaggtaacagccgaggaccaagccaagatagcaggacatattagctatgctcagcaggtggaatctgcctccggctctcagatggcaccaagttga

SEQ ID NO: 14114 - RNA, 921 nt, synthetic construct
  source 1..921: mol_type = other RNA
atggacgaggctctggaagctatgccggaacggtttagggaaggtatccaacaggtcatgcagccccttgtagaacgggggctccctcctgccttatcagtgggtgtggtggccaccctgttcggcttaagtatcccttttattagggccatcagcttgaatcccgggaagtattacagggaattcaccattcgaaagggcaaaaaggaccggcgaatctctgctcccaaggtggcactcaaactgctgcagtcttggataggaacacacctgtcccactccgtcaagctagatgactgcgtctttggttttgtgccaggaaggaacggcgtgattgaggctgccagaagacatagcgaggcccgctgggtgtactcactagacttgagagacttctttccaagcgttaaaatcgatcgcgtcgagtctgcgcttgttgagctgggctattccataaactcagcctcgttcattgccacgctctgtacactgaatcaggcacttccacaggggagccctgccagtccagtgctcagcaacctggtgttcgccaataccgataaggcactggtccagatagctactgaagagggggtacgctacacacggtacgctgatgacctggtattttctggacagggaatcgtcccccccctgttgcaggatagagtttgtgcctgccttgtagaccacggctgggagatcgcgccagaaaaggaatccctcgtcgagctgccgaaacgcttgaaggttcatgggcttctcgtgcatggcgtgacccccagattgactaagggatatcgtaaccgtattcgggcttacaggcacctgttcgcggcagagaagattcagcctgcagacctggataaagtgaaaggccacctcagttatgcattacaagttgagaaagtgcctcaatga

SEQ ID NO: 14115 - RNA, 963 nt, synthetic construct
  source 1..963: mol_type = other RNA
atgaaagcccctcctcttctggtttcattttccgccgtggaggacttcgtagcgagcctgcctgacgcggttagggaggcacacgaaccggaaatcttaaaactccacagcgcaggtcttcccgctgtcatttcagttcgtgctatctctacccttttcaatatttccgctgagttcgtcaatgcgataagccgaactcctcagagacactatcgtaagtttcagatccggaagggcaagaagacccgggatattctggctccccgcgtggccttgaaggtgatccagagatggattgccacgcacctggcagccagtattcgactgccatcctgcgtcttcggatttgtccccggcaaatcagtaattgatgctgccagtgttcattgtgacgccacatgggtatattctctggatctgcgcgatttctttccaagcataacagcacggcaggtctacgacgcaatccgctccctcggatacagtgaagatgccgcctccctggttatgcaactctgcacactgaacgggtctttgccacaagggtcccccgcctcaccagtgttgtcgaacctcgtgttcagggacaccgacgtcttactgagttcactggcagccgccaggtctgtgaggtacagcaggtatgctgacgatctcgtgtttagcgggttggctcccgcaccagccgatttgcagaccacagtgaaagccgtgctgctggacgctggctggaagctagcaatcgagaaggaacatcttgcggcgctacctaaccgactcaaggtgcacggcctgctcgtgcatggtagttccccgagattaactaaggggtaccggaaaaaaatcagagcctatcgccaccttacccgggtcggcaaggtgaaacccgctgacgcaagcagaatagccggacatctggcttacgcttcttctatcgagaaatttactaagagcaaagagtga

SEQ ID NO: 14116 - RNA, 960 nt, synthetic construct
  source 1..960: mol_type = other RNA
atgaatacgcccccgctgcccttgctcgtaactttcagcagcctgccagacctgcttttggccctgcaacttgaggaagaagatcacgaacgcaaaactcagatagaggctctgcacaggaagtcactgcccccggtaacaagtacccttgcactctcaaccatgtttggcatatccctgaactttatccatgcgcttgcccggcatccagaaaagaattatcgcaagttcaagattcgaaaaggtaaaaagaaccgggagatctcttcacctaggatagccttaaagctcattcagcgttggttcgcccagcacgcaagctctgcgctggtcttcccagagtacgtgtgcggctttgtccccggaattaatggggtgacagaagctgcaaaaagacattgcaatgcaaaatgggttttcagcgttgacctgagggattttttcggacaggtgtccagggcccggatccataacaagctcgttgctttggggtacccagagtctggggctgatctgatttgtcaactgtgcctactggacgacaaactccctcagggctcgcctgcaagtcctttcctgagcaacttagctttccaagaaaccgacgagaaattgaatctcattgcctccaagtttaaatgtagatttagccgatatgccgacgatatcgtcttctcaggcaagaatgagtttgatcccattatcgagaaggaggtgaaggaactcttagaacaggagagatgggtgctagctgaagacaagacagagatctcccagctacctcacagactgaaggtccacggactcctggtgcacggcgacaaaccacgcttgaccaagggttacagaaacaggatccgtgcctataaacaccttctgtctaatgagcgcatccgggcggacgatatcaacaaggtgaaaagtcatatttcctacgccaacattatcgatagtatatga

SEQ ID NO: 14117 - RNA, 1110 nt, synthetic construct
  source 1..1110: mol_type = other RNA
atgcgcatcgcactggagtgtgagggccgtggacagaagggcgcctgtaggactacagccgatccttcaaacagacccccgtttgggcgccgccacaatgagtcccatcatagctttgccctcccagtgaacacaccacccctgctcgtgtgttttccatcactggataccgcaagtaacgcgttgagtgagagaacaagacaggcttacggggaagaattccgtgggcttatcgagaggaggctgccacccgccgtaagcattcgcatagttgctactttgttcggtttctctccttcatttgtgggtgctatggtgcggaggccgggaagatactacagggtgttcgagattcggtctggcacgaagattcggaaaatccaggccccccgtgttgccctgaaagtcatccagcaatggataggaggtcatttggctgtggccattccttatagatcttctaccttcgggtttgttcctggccggagccacatagatgccgcaggacagcactgcggtgcggaatggagctacagcattgacataaaggacttctttcaatccacctcagaagaggccgtacgaagggccctgatggaactcggctactctgaacatgcctcccacctcgtgtcctccctttgctgcgtcggcggttatctggcacagggggcacctagcagccctgctctgagcaaccttgttttcctcaattatgacattcagttcgaacagtacgcggccgagcatggcctaacgtatacaaggtatgccgacgatatcgtattttccggcagaggcgagatccccgcgagtcttcccgagctggccaagagaaccattgagtccggcggatggcaaatcgctccagaaaaagaaaagacccagcggcggccataccgactgaaagtgcacgggttgctagtggaggggatcagtccccggttaactaagggataccgccggcgaatccgcgctctgagacacctcatggagcacgggcgagtcgcagcagatcagctggctaaggtcgcaggacacttaaattatgccgaacaagtcgcttcatgggctaggaaaagtgaacgctcttcggaggtggacgagtga

SEQ ID NO: 14118 - RNA, 987 nt, synthetic construct
  source 1..987: mol_type = other RNA
atgaatacacctcccctattagtaacattccctagtcttgacttctttgtctcagccttggcagaagatacgcgatcgctgtatgaagccgagatacgcggcctggttgagctcggtttgcctcccgtcgtgtccttgcgaaccatcgccgtgttatttggcttttccccatcttttgtcggcacgctggcaaagcgaccagcaaggtactatagggtatttgaaatccggaccggaaagaaggttagatttatacaagcgcctaaggtggctcttaagctcattcaaaggtggattggcgggaatctagccagcacatttaactacttggactccacattcggtttcgtgccgggacgttcccatattgacgcggccgcaagacactgtgagagtaactgggcctacagtgtggacatcaaagacttcttccggactactagcgctgccagagtccgtactgcactccttaagctcgggtattctggtcgggccgctgatctgacagtcgccctgacctgctacgaggggttcttagcgcagggagctcccacatcacccgtgttgtctaacatcgtttttcgcgagtatgatcagctcctcgaagagctggcttgcgaactgaacctcactttcacccggtacgcagacgatatagtattctcagggaccggggccccaattgctgagctgaaggatcgggtgagaagcatcatcgaaagcggagggtggaaaatttccgagaaaaaagagaagctgttccagaagccctacaggcttaaagtgcacggcctccttgttgatggcaccgtcccacgcctaaccaagggatatagacgcaggatcagggccctgaaacacctgctgagtcagggcaaggtgcctccgaaacagctgcgcaaagtgcagggccatctgaattacgctcagcaggtggatagctggctggcctcacaagctgcaactgacggagacgaatctagctga

SEQ ID NO: 14119 - RNA, 1101 nt, synthetic construct
  source 1..1101: mol_type = other RNA
atgcgaatcgctttaatttgtgaggatcacggacagaaaggcgcctgtcggacagccgcagctccttcagatagacctcctttcggtcgcagactaaatgaatccaacctcagcttcgcattaccggtcaatactcctcccctgctggtgaacttccccagtctcgacttcctcctgaaggctctcgcagaagaaacgagggagattcatgccgacgagatcagattccttatcgaacgccagttgccaccagcggtcagtacaagggtgatcgcaacactctttggcttttcccctttgtttctgagtgcaatcgctagacgtccggataggtattaccgccaatttgagatccgcagcggcgctaagctgaggcagatccaatcgccaaaagtggcccttaagcttatccagcggtggattgggggaaatctggcaacatctctgacctatcccgactgcgtttacgggttcgtcccaggcagatcacatatagaggctgccgccaaacactgcggcgctgactgggtatacagtgcagacgttaaggacttcttccagtccacctcctttgacgccgtgcagcgtgcgcttaccgaggttgggtatcagcctaaagctgcccaattggtggccacctactcttgcttcaagggctttctggcccaaggtgcaccgagctctcccgtactgtctaacctggtttttctgccttacgatagacagctattagagtatgccgtccagtgtgatattacgtacactcggtatgccgatgacgtggtgctttcagggaggggtcagcccccagaagatctgaaggcgtttattcatcagactatagaagcgggaggttgggtgctcagcgagcgcaaagaaaagctgtccgtgaagccacaccgattgaaagtgcacggactgctggtcgatggggactctccccggctcaccaaagggtatcggcataggatacgagctttgacccacctcctggagaagggaagcgtatcacccgagactatgagcaaagtgctaggccacattaactacgccaagctggtcgccgagaagggacgggacgaaggacagggcggcgattga

SEQ ID NO: 14120 - RNA, 987 nt, synthetic construct
  source 1..987: mol_type = other RNA
atgaatacacccccacgactcatcttattttcatctctggacaagtacttgcaggctctgggcgatggcttcgatgaggctcacgtcgacgccattcggtgcctggatagcaaaggttatccacccgtagtcagtatccgggcattatccgtgctgttcggttaccgatcacagtttgtcggcgccatgcttaacagaccccagcattattataggcgcttccagatcaggagtggtaaaaaacagcgtagaatagacgcccctcgcgtcggactgaagatcatccagaagtggtttggccactatctggctagggccattaccatgccggacgtggtagtagggttcgttcccggccgctctatactgcacggagcagcaatgcactgccgggccaaatgggtttttagtacggacattaaagatttcttccagtccacccctaccgcgattgtcaagaacgcgctcgtggatattgggtataccgaacatggcgccgagatcgctagcggactgtcatctttgaatggggttctcgcgcaaggatcccctgcctctccagtgttatcaaacctggcctttctgaaggtggacaggcaactgcaagaatactgtcatgagagagggcttgtctacactagatacgcagatgacattgtgatctccggcgctggtaagccgagccctaacataagctccgacgttcgcggaatgatcgagacaggcaattggcagttgtccgaagagaagactactttgcttagcctccccaacaggctcaaggtgtacgggctacttgtggaccaggcccgcccaagactgacaaaagggtaccggcgacggctccgtgcaattcggcatctagtggatagtggcaagatcgatgctcagaatgatccaaaggcatatgaaagagcctgtggacacctggctttcgcccaatctgtggaggattttagcgacagggtgcagaaagactcgacatga

SEQ ID NO: 14121 - RNA, 963 nt, synthetic construct
  source 1..963: mol_type = other RNA
atgaatgcccctcccctcctagtctcgttcgactcactgcaccggctgtttctggcctgcggcgttgaggataattcaagcgcagccagttccctctcagcactggtggagattgggtttccacctatcgtgtcaaaggctacccttggggtactctttggttacagtcctcggttcataggagctatgtgtaaaaaccccgaccggtactaccgaactttctatctgccaaaaggaaatggcaagttcagaaggattgacgccccaagggtggctctgaaagttattcagaaatgggccggctttcacctggcaaacaatctgaagctgtctccctctgtggtgggtttcatcccgaagatctctgctattgatggggctgctcgccattgtagccaggactgggtcttttctaccgacatagagaacttcttccaaacaactgcccagagtcgcgtgacgcagtccttgatcaaattcggctttcccgcggaaggtgctgagttattttccaagctttcctgcttgaacgggaacctagcacaaggcgccccttgcagccctgtgttatccaatatctgtttcagcgaatttgatgtcctgatcgagaactattcccttgacaatgagctcgtgtacacaaggtacgccgacgatatcgttatttcaggtagggggaatccgccacccgatctcgaaaacaagatcctcgaaattgtaaccgcagccggatggtccatatctagtagcaagaccagattcagtcgtcgccccaaccgccttaaagtctatggcttgctggtttctggcgacgtccctcggctgacaaaagggtaccgtaatcgaattagagcgttgaggcacctggaaaactccggaaagctttctccagaatcggaggatgtggccctcggacatttaagctatgcaaagagcgtggagagatttggcctgggaagctga

SEQ ID NO: 14122 - RNA, 975 nt, synthetic construct
  source 1..975: mol_type = other RNA
atgaatattcctccgctgctttttagctttacaacccttgatcagcttattagtagtctggacgaggaaacgcgacattcaaaagaaaacgagatcgcttcactcttcaagaataaactgcctcccttggtgtccatccaggtcttatctactctcacaggcttttccatcccgttcatatatagcatgaccaataaaccagagaagtactaccggacattcatcatcagcaccggaaagaagaaacgtataatacactcccctcgggttagcatcaaaatcatccagaagtggctggctcaccacatctcctcttctgtgaacttcaacgagtgtgtttacgggtttgtgaaaaagaagtcacacattcttgccgcgagtaagcattgcggttcagattgggtctacagcgtggacatcaaagacttctttcccagtactacgattgaaaaggtgcgcctgggtctgattgatattggctattctgagaaagctgcagatctgatttcgaagatctccagcttcgaatcctgtttggcccaagggtcgccactaagcccctgcctgagtaatatcgtcttcaaaaacgtggacaataatttgtgcgagattgcaaagaactacgagctcacctataccagatacgccgacgacattgttttctcaggcacaggaaacaaaccatcccagctgagttctgcaataaaagatgagatcgaatctgctggctggaagctcgcccctgggaaggaattttattcagaccggaaagaccatctgaaggtccatgggctcttagtaaacagcaatcgacctaagctcggaaagaggtatagaaacagaattagggcctatgagcacctattgaggaatgacaagatatccccagccgacaagcccaaaatcatgggacacgtatcttaccgcgatagcgtggatactctgggcaagaaagaagatactacccccgcgtga

SEQ ID NO: 14123 - RNA, 1134 nt, synthetic construct
  source 1..1134: mol_type = other RNA
atgaggggcgggaacggggacaggttaagaacagccgtctgctgtgctcgcgtgtgcataacccttacatgcgaagacccaagcaccgagggaaggctgcccaatggcggacgaagctttgagtctcccgcagttcgacaagccgctagcaccaaagccacatccttcgcgctgcctgtgaataccccgcctccccttctgtattttggcagtgtggacgagctgatcgccgcattgtcccccgtgactagagagagatacgaatatcagattcgcactatctgcgacttaaatctgcctccagctgtttcaatccatgtgattgctacattgtttggatacagtcccagctttgtagtggctttgctcaagcgccccgagcgttactaccggatattcacaatccgtagcgggaaaaaaagaagagaaatcgtcgcccccaaggtgtctgtcaagattatccaacggtggattggaggcaacatagaacggcatatcgaatggctcccttgtgtattcgggttcgtgtccgggaggtcttccatcgatgccgccagcattcactgtggcgccgactgggtctactctatcgacctgagagatttttttccttcaaccacgagggcgactgtacaggcagcgctgactgacattggctacgagccacattgtgctgaattgatcgcacggctcagttgctatggaggacggcttgctcagggtgctccatcttcgcctgttctctcaaacctcgcgttcatgcgcttcgatcagagactcatggagctgagcaacgccttcgatgtcaaatatactcgctatgccgatgacatggttttctcgggcaacggaacgttcccagctgcccttaagggggagatagaggccgtgtttcgagatagtgactggaagtttgccggcgacaaagaatacttcgccgagaaaccatccagactgaaggtgcacggactgctggtggatggtggggttccgcggttaaccaggggttacaggaataagattcgcgcatttcgtcacctaatgtcaaccggccgagtccgcgaaaaggatgtctctaagatttccggtcacatcgcatatgcaaatctagtgctgaggaaagcaggccggtga

SEQ ID NO: 14124 - RNA, 1089 nt, synthetic construct
  source 1..1089: mol_type = other RNA
atgtgcatcacgctcatctgtgaggatcgaacaatcgaggggagacttaccaatggtggacgctcctttgagtcaccagctgtgcgtcaagcagcagccactaaggctactagtttcgcccttccagtcgatacaccactgcccctcctgtttttcgagtccatagacgaactggttggcgccttgtctcctttgaccagggagcggtacgaacctgaaatacgaaggctctttgatgccaggttgcctcctgccgctagcatccatgttgtggcaaccctgtttggctactcgccctcatttgtggtcgccctgctgaaaaggccggagagatattaccgtacgttctatatcaaaagtggaaagaaagtccgcttaattaacgcccccaaagtttcaattaaaattatccagcggtggataggtggcaatatcgcgcgcaatgtccagtggctgccctgcgtgtttgggttcgtgccggggaaaagcagcgtggacgcagcgagagtgcattgcgaagccgattgggtgtacagcgtagacattaaggacttcttcccctccacacgctccgaatctgtgcaagttgctctcattaaactaggttataaacctcacgcagccgagctaatcgctcgcctttgttgtcacggcgggcgtttagcccagggagctccatcaagtcctactctttctaatctggtcttccagcccttcgacgaacagctgcaacggctcgcggatactctgaacgtgaagtacacaaggtacgcggacgacatggtgttttctggtgaaaacgccttcccagaaaaactcaagaacggcgtatccgaaattttcttaaagagcgattgggtatttgcacaggagaaggagtattttgcaaagcggcccaccagactgaaggtgcacgggcttctcgtcgacggacgggttccacgcttgacccgaggatatcagaataagattcgggcttacaggcacatgctggaggctggcaaggtggctaagacagatatcgagagaatcagaggccatgtcgcctatgccgacctgatagagaagaagactaacctgaccaaatga

SEQ ID NO: 14125 - RNA, 978 nt, synthetic construct
  source 1..978: mol_type = other RNA
atgaggttgccccatagtctcttgtccaacccgttctttcagttttctagactgtctgatctccttgcagttctgggaaacgaggtcggcgagctggagatcgaagaaattgagcacctctgctcaattggcctaccgcctgtcacgagcgagaatgttatatgcgccgtctttggattcaatcccgggttcgtgtggagcctcctgaacaaaaagcacaaatactatcgccgtttcgaaattcctaaagggcagggcgtgagggtgatatatgctccacggctgggcctcaaggtgatccagaagtggctgtcattaaggctgtcagaattttgggtccctgatgactccgtctacgggttcgtggtgggcagatcacacgtggacgcagcagccaggcattgtggagctcggtgggcttttagctgtgatatcgaaaacttcttccctagcacaagccaggcgtccgtagagagagctctgattggcatcggatacaaggagaaatctgccaagctcatcgccgaagtttgctgttaccaaggtgccttagcccaagggtcccccgctagtccagtgctgagtaatatttgcgccgctggtctggataaaaagatgcttgccgtccgagacaaatatggctgcgtctatacccgctacgcagacgacatggtgtttagtggcgagggggagatgcccagagagcttgaagcggatgttttgtcctgtttcgatggtgaagagtgggaagtggccgaagggaagacttactcggcagtttatccaggacggatcaaggtgcatgggctgcttgtaggtggcggagtaccccgcctgaccaagggatacagaaatcgattgcgcgcataccgtcacctgctagagcgggacgccgtagtgaagaacgctagcgttgtgatgggccaccttgcctatgaggactttgtgaggcggaaagcgttaccagagtctgaatga

SEQ ID NO: 14126 - RNA, 969 nt, synthetic construct
  source 1..969: mol_type = other RNA
atgagattgccccaatcactgatttcatctccactgttccagtaccatcgagtcagtgatctcctagctgcactcgacggtgagatcgacgatgaggaagttagcgaaatacagcggttgagtaacctggggctgccccctatcacctccgccaactgtttagccgctatttttggcgtgaatccaaagtttatctggagcctctgtaacaggcgctccagacattaccgacacttctccattcctaaagggtccgggatgcgtgacattcacgctcccagagtggggctgaagctgattcagaaatggttatcagtccggctcagccaattctggggcgagcgcgagggagtgtatgggttcgtaactggccgctctcatgtagatgctgccgcccagcattgtggcagtgattgggtccttagctgcgatattgagaactttttcccgagcaccacagaactgttcgtgatacagtcgttggaggcgatcggatacaggcactcgagcgccgcgcttatagctagcctgacatgttatcagggtggacttgcacagggatctcctttgtcccccatcctttccaacatttgcttcaatttcctggacatcaaattcttggtcctcagggactcaataagtggagtgtacacgagatacgcagacgacatcgtgttttctgggcggggcggttttcctgaaggcctgctggaacagattaggaattgctttaaaggcactccgtggtgcttagcagataataagaattacaaggccatccgcccatgcaggctgaaagttcacggccttctggtggatggggacaagccacgtctaaccaagggttatagaaacaaaatccgggcctattcttacctcgtggacaataagaagattaccaagcacgagtctatcatcctgggacacctcacttatgccgagtttgttacaatccatcaacagggctga

SEQ ID NO: 14127 - RNA, 1032 nt, synthetic construct
  source 1..1032: mol_type = other RNA
atgaggaagcaattagaagcactattgtctatgagacttcccccgtactttttcagcaacccatatgtggttttccccactcttagtgactttatcaagagcttggaaggcgagattaccgacaccgagctgcaggaagttaatcgactggccgccctcaacctgccccctgtagtgtcggggagtgtggttgccgccatctttggagttaatccaggcatcgtgtgggcgataatcaacaaacctcacaggtactacaggaccttcaatattccgaaaggaaacgggcagcgggagattcacgcccctagagtggtgcttaagatattccagaagtggctatctgtacgtcttgcagatgcttggcgcccagcggactgtgtctacgggtttgtggcgggacgcacatatatcgacgctgctatcaaacataagaacgccaagtgggtgttcagttgcgatattcaagaattcttccccagcacacctagtatctatgtcaaagaatgtctccagagactcggttacaatcacgaccaggccgccctggtgtcctcactgtgctgtttcagaggaggtttggcccagggatccccagcttcacccgtgttgtctaacatatgcgccgatgaccttgataagcagttactgcgcgtggccgagaaatatggctgcaattacacgcgttatgcggacgatgtcacgtttagcggatctgcagaggtccccagcgggctcactgacgatgtcgctggcgtgtttcatgcaagcccatgggagctggccccagggaagacaaaactgtccgtctcccctgctcgactcaaggttcatggcctgctggtgcacacaggcactcctaagctcaccaaagggtaccggaataagttaagggcttatcggcatctggcagcacacggtaaactgaccaaaaacctctcaaaggtcaatggccacctgtcctacgcagctgacgtggatcgccgggtagctgccgataatattgaggtagagaacctgtttggcccctga

SEQ ID NO: 14128 - RNA, 972 nt, synthetic construct
  source 1..972: mol_type = other RNA
atgcggctacccctccacctgcaaagttcaagatactttacattcggcaccctgcaggagttcataaaggcgtcaggcacctctacggacgctgaaattgctgaatatgaacgactggaggctctgggcctgccgcctatcagctccaggcattctctggccctgatgctgggggtaaacccagcccttatttggagcttcgaggcacggcctcaccggttttatcgaacttttcacattgctaagggcagatctactaggcgcatagacgcccctagggtcggattgaaaatcgtgcagaaatggttgtccgctcaattacaggcggcctactctccacccgagcatgtttacggatttgtgcccaaccgcagccatgtgcaggctgcctccattcactgcggagccgaatggattctgagcgctgacatcgctgattttttccccagtaccccatttgcgctggtggaggccaatctgaaacgccttgggttcaatgagtatgccgccagaacaatcgcttccttgagctgtctcgatggggcacttgcacagggggcccctacttctccggtgttatcgaatatatgctttgacgagatggacaaggccctactggcactcgcaaccaaacatcaggcccgcctcagcaggtacgccgatgacatcgtcttctcaggttccggcgaggtgtctgaaaccttgatctccgaaatccgagacttattcgtacagagtccatgggagttgtccgaaagaaagtttgtcctctcgcgtcggcccaaccgcctgaaggtccatggcctactggtggaggataagaggcctaagctcacaaagggatatagaaataaactcagagcgttcaggcacctgcttgcaaacggtcgggttcgtagcgcaaaggatgttgagattatggccggtcaccttgcatactcagatttcgtggagaaaagtttcgaaacatga

SEQ ID NO: 14129 - RNA, 1116 nt, synthetic construct
  source 1..1116: mol_type = other RNA
atgcagcatgctcattgcgccaagaccaacgacagacggatgcccagcttcggccgatgcagctttgaaacacagcccaagcgaaggcacctcgatgagtcacaactgtgttacatgcgcctccctcatcaactacttgagagccctttcttcctgttttctcgcgtcgaagaacttgtcgaggctatcggtctggagacaggcgatgacgaggccatacagctgagagcgctgtccgaacggggattgccaccggtgacatcggttcactgcctcgccacgatgctgggggtgaaccctgggctggtgtggagtttgataaacaggccacaccgttactacagaacattcgagattccgaagggcaggggtactaggcgcatcactgccccaagagtcgcactgaaagtcatccagaagtggctgggatatcatctggccagagctgcctctacccccccacacgtctacggctttgtgcccggcaggagccatatcgaagccgctcacgtgcacaggggcgctgaatgggccctgtcagtggacatcgctaatttcttccagaccacccccagttccttggtgattaatacattagagcacctgggctatggagttggtgccccactgctggcctcactcacttgttacttaggctttttggcacagggggcgccttccagtccggttctctccaacctttgtttcgcggcaacggacgaggtgctcgtgcgcttgagcgagcgttacggttgcaaaatcactcgatatgcagacgacgttgtgttttctgggcaaggtggcatgcctggaggactcagaagcgagctgcgggggatttttgcagctaccccttggaaactctcccctgagaaggaaagtgtacagcccatcaaaggccggattaaaatacatgggttactggtcgatgggccacatgtgcggcttaccaagggctataggaataagctccgcgcatacgaacacattttgcttactagaggaggggaagccaccgatcggcatgtactgtctggacacgtacagtatggacaccacgtggaagccattctagagcgtctagctctttctcgcgcaaatgagtcacccgattga

SEQ ID NO: 14130 - RNA, 1128 nt, synthetic construct
  source 1..1128: mol_type = other RNA
atgagattgccgcagcacctactggcatcccccctgttcgtgttcaagaatgcggaagagcttatcggggccatgggcgatcgatccacaccggaagccatcggcgacatcaggacactctctgcccaggggctgccaccagttgtgtcagaggaggctttggcagcgatggtgggaatcaactctggcctggtatggagttttctgaaccgtacctggaaacactaccggacgtttgagattcctaagggcaatggcgtacggcagatcaacgcgcctcgtgtggccctcaagattgtacaaaagtggttgagtgttaatctggccaaattctatgaagcccccgaacatgtcttcggttttgttgccgggcggagccatattgatgcagctatgaggcacattggagccaaatgggccttcagcgccgatatttctgactttttcccttcaacacccgaggccatggtggcagaagccctccagaccatcggatactccgaccagagcagtcgcatcatcgctagactcggctgtttgggagggcgccttgcacaaggtgcacccacatcacctctgttcagtaacctgtgctttcgccagatggatagcgcagtcctggagctgtcgcataagtatgaatgccgcctgaccaggtatgctgacgaccttgttttttccgggcagggagacttccccaatactatacgggacgacttgactgcactgtttgctaacggcccgtggcacctggctcctcagaaaatgttagtgcagccactgaaggggagaatcaaggtgcacggtctattagtgaatgattctggcgtgaggctgacccgaggataccgcaaccagatcagagcttacgcccacctcctcgccactaggggggatcaagccatggaggcgccaaaattaattggccatgtcgaacacgctagacatgtgcagagggtgaccgggagcccctcaggtatatctaagaatgagggtgtcgaacgtgagcgcatcataattcctccaggaattattctcccagaccgacaacctagcgctgatgatcggcggcccgaggctcagaatgagtccttcgtcggctggcttaaaagaatacttaacttttga

SEQ ID NO: 14131 - RNA, 978 nt, synthetic construct
  source 1..978: mol_type = other RNA
atgagacttccgctgccactccttaactcgcagtatttccagttcagcagtttcgccgagttaagaactgcccttggcgactcagtgtcttctgaggagctccaagaggccgcaaggatcgtattgggcgggctgccccccatcacatctaggttgacgctggccgctatgttgggtgttaatcccgggcttatttggtcctttgagaacaggccccagcgctattaccgcagtttcagcatcccaaaaggaaggaccacacgacagattgacgccccaaaggtcgcactcaaactcatccagaagtggctgtccgtccagctggcaaggacttttgaacctgctgaccacgtgtacggctttgttggcggacggagtcatgtgcaagcggcggcacaacatgttggcgctcagtgggtgtttagcttagacattcaggatttcttcccatcaacccccattcgactcgtggtcgagagccttaaaagtctcggatttggaagcgatggggcatccctgctatctcgtctggcatgcctgcgaggtgctttggcccagggagctccatcatcgccgatactgtccaacatctgtttccaacagatggacggtcagctcgcccaaatcgcccagaatgtgggcgccagactgacacggtacgcggacgatgtggtattttcagggataggcgagatgcctcctacactagaaaatgatgtccgcgctatattcaccgacagcccttggactctggccgaacataagatccgcattgcccaggtgcctgacaggctcaaggtccacggccttctggtgcacggagcccagatccgtctgaccaaggggtatagaaacagactgcgcgcatatcggcacttgctgcacgaaggtaaaattcgggatgatgacctggctaaggtgtgcggccatttaagctacgctgcgtccgttgagcgggaatccgatgggacctcttga

SEQ ID NO: 14132 - RNA, 975 nt, synthetic construct
  source 1..975: mol_type = other RNA
atgaggttgcccccatcactgctgaatagtcagtatttcctgttcagcaacttcgccgagctgcgtaaagctctgggagattctgcatccagcgaagagctcgaagaggctgcaagacttgtgctcgcaggcctccctccgataacctcgaggttgaccctagcagccatgtttggtgtcaatccgggattgatctggtcttttgagaacaggccaagacgccattaccgaagtttttccatccctaaagggcgaaccactcggcagattgacgccccaaaggtcgcgctgaagttaatccagaaatggctttcagttcagctggctcgtacttttcagcccgcagaccacgtgtacgggttcataagtggacgtagccacgtgcaagctgccgccagacatgtcggtgcccagtgggtgttctccgtggacatccaggactttttcccttctacgccagttgatctcgtggctacagcattagaagcgctagggttcgggagagacggcgccgttttgcttagcagactggcatgtctgaggggtgggctagctcaaggcgcgcctacatcccccgtactcagcaatatttgctttcagcacattgatgggcacctggtacaaattgcccataatgccggggctcgcctttcccggtacgctgatgatatcgtgttctcaggaattggcgacatccccccaatgttggagaacgacgtgcggacactgtttgatggatcaccttggactctggcggagcaaaagatccggaccgtccgagcccccgataggctcaaagtgcacggactgttagtccacggtgcccaggttagactcacaaagggctatcgcaacaggcttcgcgcatatcggcatctgctgggcgaaggcaagattcaggaagccgacctcgccaagattcgcggccatctgaactacgctgcctctatcgagcgggatggcgacgagatatga

SEQ ID NO: 14133 - RNA, 942 nt, synthetic construct
  source 1..942: mol_type = other RNA
atgtacacaagcctcggcgagctctcacgtgccttaggtgatgccgcacgccctgaggaactggcagaaattgaaaggctcgtactccttgacctgccacccgtgagttctcgaatacaattagcaaccattttcggagtcaatcctggccttatctggtcctttgaaaatagaacccgcaaacactataggagcttctttattcccaaggggcagactactcggagaatagacgccccaaaggttgcactgaaggtgattcagaaatggctgtcagtccacttgtctcacggctttaagccagcagatcatgtgtacggcttcgtgtcagcccgatctcatattcaggctgctacccttcatgtggatgcccagtgggtgttctccgtggatatccaagacttctttccgacaacccccatccagctcgtgtcggacagcctggaggctattggattcgggagagatggggccatgttagtagcccgtctatcttgcttggccgggttccttgctcagggagcacctacaagtcctgtgctgagcaacatctgttttcgcctgatcgatgaagcattgatcgcgatagccgctcggtactccatacggctgaccaggtacgctgacgacatcgtcttttccggcactgaggagtatcccgcgcagctggaaactgatgtgagggccctgttttccgttggtccatggacattggcggagcataaagttcgcgtcaacaaactaccggagaggctgaaggtacacgggctgcttgtgcacggacccaagattcggctgacgaaaggctaccgaaacaagctgagagcttatcggcacctcatgacgcatgagaaggttgccgaagcggacatcgctaaaatcaaaggtcacctcaattatgccgctagcgtcgataagttcagagacgccagtgaggactga

SEQ ID NO: 14134 - RNA, 975 nt, synthetic construct
  source 1..975: mol_type = other RNA
atgaggctcccacaaccgttattggattcccagtactttctcttcagcagtttcgccgagctgtcgaaggcacttggagaagccgctcacccgggtgaactcgcagaagcggaaaggctggtactgcgtgggttgcctcccgtcacttcaagaatggccctggccacaatgttcggcattaaccctggactgatctggagctttgagaatcggcccagacagcattatcgctcattctctattccaaaaggcagaactaccagacagatcgatgcgcctcgggtcgctttaaagctcgtacagaaatggttgagcgtgcatctgagccgggcctttcagccagccgagcatgtctatgggttcgtctccaatcgtagccatgttcaggcagccgcccgtcatgtaggtgcaaggtgggtgttctccgtggatattcaggactttttcccctcaacacccgttgatctggtggcggaaagtcttcagaccatcggtttcgggcacgaaggagcccgcctgctatctcggctggcatgcctaaggggcgccttagcccaaggcgctcccagttctccagtcctgtctaatatttgttttcagcacgttgacgagcagctcatccttatagcttcccggtacggggtgcgcctgacacgatatgccgacgatatagtgatcagcggtacggacgagttgccacctaccctagagaacgacgttcgggctctgttttcacagggaccctggagactcgctgaccaaaaaactcaaatagcacaactgcctgacaggcttaaggtgcacggcctgctggtgcacggcgagaaaatcagattgacaaagggctatcgaaaccgacttcgcgcctacaggcacctgatcagtcgcggaggcattcaggacgcagatctcgctaaagtgaagggacacctcaactacgctacctccgtggacaaggaggggggggatgcatga

SEQ ID NO: 14135 - RNA, 912 nt, synthetic construct
  source 1..912: mol_type = other RNA
atggatgaattactgaaagcatctgcaggtgccgtgccagaggctgagatgaacgaagccagaagactggtcaatctggggctccctccagttacctcacgcatggctctcgccacgatgtttggtatttccccaggcctgatttggtcctttgaatctcgcaccaggaaacactaccgcaccttttttatacctaaaggaagcgggaagcgtcgaatcgatgcgccccgcatagccctcaagatcatccagaagtggttgagtgtgcacttgcagaagtgctatcagccccctgaacacgtgtatggattcgtgtctgctaaaagtcatgttgcagctgctgcccgtcattgtggggcaagttgggtgttctcagtcgacctaaaagatttctttcagagtactcctgaggtggtcgtcatcaactccctggagcgaatgggattcgctgtgaacagcgcgactctgctggccaagctatcctgtctcaatggaaccttggcacaaggcagcccgagctctcccgtattatccaacatttgcttcgagcatgttgatgagcagctgctcaagattagcaagatgtacaatgtgcggctgtcaaggtatgcagacgacatcacattctcaggcacaggcgtgtttcccgccgcccttccagaggaagttctcggggtcttcgaagagggtccgtggaggttagccgaacagaagactgacctggcgatgcttcccaacagacttaaagtacatgggttgctggtgcatggcaaccacgtccggctcacaaagggatacaggaatagactgagagccttccggcacctgctgaagaatcacaaagtatcggatatggaccttgctcgggtgcaaggccaccttgagtacagcgaatttgttgagaggttctga

SEQ ID NO: 14136 - RNA, 966 nt, synthetic construct
  source 1..966: mol_type = other RNA
atgcgcctccctcatccactcttaaactctcaatttttccagtacgcatcactttctgaactcttgaaagcaacagagcgggctctctccgaatcggaacgcgagcttatgctgcaattgtcagggaaaggcctgcctccgatcagtagcagggcggcactggcagccatgttggggataaatgaaggcctgatttggtcctttgaggcaagacccggccgacattaccgtaccttctatattcccaagggaaaagatgtgaggcgcatcgacgctcctcgggtagccctgaagatcgtgcaaaagtggataggttttcagctagccaaggcgtatttgcccccagagcacgtttgtgggttcgtggagggcagatcccatattgacgcagctcgtattcactgccgcgctacatgggtgttcggagtcgacatccagaactttttccctaccactccaattgatgtggtggcaagggccctcctggatatcggataccacgagctgggagccgttcttatctctaggctgtgttgcttcgaaaacgcgttagcgcaaggggctcctagttctcccatactgtccaacatgtgctttgctagctacgatcagcgactgaaggctatcgccgacaggtatggagcaagactgactagatacgccgacgatatcgtgttcagcgggcaggatgactttcccgtcgcattaaaagaggaggtacttggtatcttcgccagcgggccgtgggccttgagtaatcagaagattaagctggccgtgtggccacagcggctaaaagtccatggcctgctggtccacggcgaccagcttcgactcacgaagggttaccgcaatcggctccgggcctatgagcacctcctagctgctggcaaaattagggccgaatcaatcagcgtcgtgagaggacacctgggctataaggaccaggttgccaaaagagcctga

SEQ ID NO: 14137 - RNA, 966 nt, synthetic construct
  source 1..966: mol_type = other RNA
atgaggcttccgcagcccctcctggacagccagttctttcagttctcctctctcgctgaactgctgaaggccacaggagagttggtcccaccctcagagcaggtgcaaatgcggcgaatggtggatagaggccttccacctatcacatccagggccgccttgagtgcaatgcttggcatcaatcccggtcttatgcatgcctttataacatggccccaacgctactatcgtacttttgaaatcccaaagggacgtcggggcgtgagaaggatagatgctccgagggtcgggctgaaaatcatccaaaaatgggttgccgagcgactccaaaactgttacgagcgccctgaacacgtttatggattcgtgtccggcctgagtcatgtacacgctgctgcacagcactgcgaggcaacctggacttttggcgtggacatcaaggacttctttcagaccacccctattaacgtggtcactaagtgtctcctacagattggattcgacgaaaatggtgccgctgtagttgctagtctctgctgcctgaacggagtgttggctcagggcgccccatcatcacctgtgttgtctaatatctgtttcctgcacgtagatcagcggctcgcagaactggcggccgagtttggagttaggctgacgcgctatgccgatgatattgtctttagcggcatgggtgagtttcccgagcgtctgcagacagaattattcgccattttcagctctgggccttggcgactgagcgagcggaaaacccgcctggacaaactgccaaacaggcttaaagtgcacgggttactcgtccacggggaaagagcaagactaacgaaggggtacagaaatcggctgcgcgcgtatgaccatttagagagaaccaagggggaagacgtggaggatgcggacgtcattcggggtcatctgtcctacggcaagttcgtggagtcgttgtga

SEQ ID NO: 14138 - RNA, 963 nt, synthetic construct
  source 1..963: mol_type = other RNA
atgcgtcttccccagcccctgatcgaaagcaagttttttcagtttgagcgcctcgccgatttagagcgcgcgattggcgagcatggaagcgccctggaactcgcagaaattcgcaggctaactaatctgggcctgccgcctatcgcatcctcgagcaccctcgctactatgcttggagtcaacagggggctgatttggagtctggtgaacagaccccggcggtactacaggcgattctcaatacccaaagggaaagaagagcgcataattcatgctccaagagtggccctgaagattccacagaagtggataggagtgcagctctctaactatttcagggctccagctcatgtgttcggcttcgttcctcaccggtcccacgttgacgccgccagagtgcatttgggcgccaaatgggtcctgtctctggacatcgagaatttctttccgtccacccctcaagagcttgtagagcaggcactggtcaatatcggtttcggagaagcaggcgctaatctaattgcttcactggcctgtttcaacgggtttttggcgcagggatctccttgctcccctacactgtccaactattgcttttcaccctgggatgagtctcttgcgttattggctgctcgagaaggcgtgcgcattagtcgttacgccgacgatatcgtgttaagcggtcacggtacaccacttgacgggctgcaggaacaaatcgccgccacactggccaatagtccatggcgactgtcacagaggaagatcagcttgagtgtggcacccgcacggctcaaagtccacgggttgctggtaagcggagacagagtgcgtctgaccaagggctaccggaacaagctaaggaccttcgagcacatcctccaaacgagagaaaatctcgatgcgaagttcgagagaaaagtccgggggcacctcgcatatggcaaatttgttgaggcctga

SEQ ID NO: 14139 - RNA, 981 nt, synthetic construct
  source 1..981: mol_type = other RNA
atgcggttgcctcacctattcctcgacagactctgcttcggcttgtcaggtcctgaagagctgttacgagtgctggggcccttagcatcacctggagaagatgagtgtataagaagactctgtgcgctggatctgccgcctgtgtccagtcccagggctttggctgccatgctgggcgtcagtgagggacttgtctggagcatgctccaccggcagcatcgccactatcgccatttttccatcccaaagggaaggggtagccgggacataacggctccccgagtagccctcaaggtgattcaaaagtggctggcggtgagactccaggcgaaatactacaggcctggccatgtgttcggcttcgtgcccgggctttcgcacatcgacgctgctcgtcagcatctcggagccaggtgggtgtgtagctttgacattgagaacttcttcccgacaactccagagggtctggtcgcagcccgtttagtagatctcgggtttccagagtctggcgctgggattgtggctcgactggcctgcttctcaggtgtattggcccagggagccccaactagccccgttctgtccaatatcgcattgtgcgacatcgatcaacgcctcagtctattggctgagcggtacagtctgagactgacccgatacgccgatgacattgtttttagcggccttgaggcagtgcccgaccagcttgcacgcgaagtgtatgaactattcgccgctagctcctggaggctgtctgaagcaaaaaccgagagagtcgaaatcccttcacgccttaaggtccacgggctgcttgttcacggcgaggaagttagactgacaaaggcatatcggaataggatccgtgcctatcgctacctgatggagaggaacggaattcagcaggcggatctgccaaaggtgaaaggccatctgtcttttgccgaatctgtccggaaagccgggggagcctcctttggctga

SEQ ID NO: 14140 - RNA, 981 nt, synthetic construct
  source 1..981: mol_type = other RNA
atgcggctcccccaaccattgctggacagcccatattttcagttctccactgtgaatgagctttgtaaggccgctggtgaccctgacagcgcggaagtgatggagatcaggcgccttgacgcactgaacctgcctcctgtttcctcccggcagatactcggactgatgttcggactcaacagtggactgatttggtcttttcagtctcgcacccataggtattacaggacattcaatatccctaaaggcaatcggcagagaagaatcgatgcaccgtgtgttggcctcaaggctattcagaaatggctggccacacagctgcagggcgcctataaggtaccggaccacgtctttggttttgttgctggccgctcacatatcgacgctgcgtctgtccatgcccaggccgtctgggtgctgagtgtggacataagggatttctttcaaaccacgcccaagtctctagtcaaaacccgacttctggaattgggattcctcgaaaaaggggcagagttaattgcttcactgtgctgcctgagagacaacttagcccaaggcgcacccacctcaccactactgagcaatgtgtgctttattcacgtggatcaacagttgagctacctggcggataaatacaacctccgtttgagcaggtatgccgacgatattgtgttcagtggtaagggacagtgtccagatacccttcgggacgagcttgagtcccttttcatcgggagcacctgggtgttggctcccgagaagactgagctcgtctcgctgcccaaacgcctgaaggtgcacgggttactggtacacggcgaaaatatcagactcacgaaggggtatcgtaacaagatacgaacttacaaacacctattggcaacaaaaggggccgagctgacaaattcagaaaaaatcaagggccatatttcctacgaaaagtacgttgatctcgtggtagatgcccagagaaacacttga

SEQ ID NO: 14141 - RNA, 945 nt, synthetic construct
  source 1..945: mol_type = other RNA
cggcgaaccttttataggcgatcaacaaaggaaaagctttgttatatgcgactaccccagctacttcaggaaagtcagtttttcttgttttctggcgttgaagagctgctgtcggcacttggctctgtcatcgacccggcggagaagcaggaggtactgagactggcagacctggggctccccccaatttccagtaaagatgccctcgccactatgctgggaatcaacccgggactgttatggtcttttgaaaatcgcccacagaaacattatcgcgtgtttaccatcccaaaaggcgccggccgtgagcgtacaatagtcgcccccaaggtggcattaaaggtgctgcaaaaatggctgtcaatccagctccaaaggaattacgtgcctcctaaccacgtgtttggattcattcctggccgcagccacattcaagctgcccagaaacacctgtgtgcaaggtggacctattccgtagatatcgaaaattttttcccaaccacatcccgcgatgtcgtgtgcgaggtgttcttgcagttggggtactctcccgagagcagccagatgctggctggtttctgctgctacaagggcttcctcgcccaaggggcccctactagtcccgtcgtgagtaaccttgcgttccggaacatcgatgagaggttggttcagctggcagaacggtttggggttaggctcagccgctacgccgatgacatagtgtttagcggtattcacgatttccctgacgagttacggattgacgtagacagaattttcggagattccccatggagactgagccccgacaagactgagttcgaccagttgcctcggaggcttaaggtgcatggtctgctcgtccatggggaaagagtgagactaacgaaaggatacagaaataagctccgggcttatgctgctgtttcactgtacacatcctga

SEQ ID NO: 14142 - RNA, 972 nt, synthetic construct
  source 1..972: mol_type = other RNA
atgaggctgccaccactgcttctggaatctcagttcttcttgtttagctcactggaagaattgctagcagccttaggggacagcgtcgccgagctggaaaaggaggaggtggcacgacttgcggctctgggcttaccacctatctcgagtcgggacgctctcgcgaccatgctggggatcaacccgggcctcgtgtggtcctttgaacacaggtccgccaagcattaccgcaggtttacgattcccaaaggcgctggacaggagcgggtaatcatcgcccccagggttgccttgaagattgtgcagaagtgggtaagcgtgcaactccaacgcgcttatgccgcacctcaacacgtgttcggatttgtgccagggcgctctcatatcgacgcggccaagcagcatagactggctgagtggacttactctgtagacatagcagatttcttcccgtcaactcctctcagaacagtgactgccgtgtttaatcggctcggatatggggatgaggtcgccagcatgcttgcctccctgtcttgctaccagggcttcctggcacagggtgctcccacaagccccgtcatatccaatttggccctgcacgaggtggacagacgtctgattgacatctcacggtcatttgatgtgagagttagtcggtatgcagacgatattgttttttccggccagaacgggttccctgaagaactcgtcgatgaggtgaacgagattttcatcgacaccccctggaccataagtcaaggaaaaacagagttgaataggctccctcgcagactgaaggttcatggccttttagtgcacggtgctcaggccaggctaaccaaaggctaccgaaataaactccgtgcttatgctcacctgattaaaaacggtctgatccaggaaggacataagcttcgcgtcaaaggacacctacgatacggtgagcaggtcaaggaggccgcagattga

SEQ ID NO: 14143 - RNA, 972 nt, synthetic construct
  source 1..972: mol_type = other RNA
atgcgactgcctctgttccttcaggactctcagttctttttattcagcagtgtggaggaactggtggctgccttgggagattccgttgcagtggtggacaaggaggaggtgaagcggctagcagagctcgggttgcctcctgtctgcacccgggaagtcctcgccacaatgctcggcattaatcccggcctcctgtggtcatttgagtaccgcccggataagcattaccgcatatttagaataccaaaaggcgcccgcggcgaaagagaaattgttgcaccacgggtcgctttaaaaatcctgcagaaatggctatctgtgctcatgcagcgtcactacgctgcgcccgatcatgtattcggattcgtgagtggtagatcgcacctggaagctgcgaaagttcacagaatggctcactggaccttctcagtggatatcgctaacttctttccctcaacgccagcctatgtggtcgccgaggcgtttgaatccattggatttggtgccgagtccgccgaaatgctcgctagactcacctgttatcgggggttcttggctcagggagcacctaccagccccgtgatgtctaatatcgccctgagagccgtcgacgagaagttgtccgacatctctcgaaggttcggggcaaggctgagccggtatgccgatgacattgtgttcagcggtgtagaggagtttccagagggtctgcgagccgaagtggcagacttaatgacagatactccttgggaactgagtgcagagaaaactgaatttaaccaactgccggggcgtctgaaggtacatggggtgcttgtccacggaccccaaatcaggttgacaaagggctatcgcaacaagctgagggcttacgcccacctgagcaaacggggccgtatccgccaggacgatcttcttagggttgccggccatatcaggtacgggattcaggttgaggaggtcgcggactga

SEQ ID NO: 14144 - RNA, 996 nt, synthetic construct
  source 1..996: mol_type = other RNA
atgcggttaccacacagcttgttagagtctcagttcttcgcccttacctcagctaaagaactggtaatcgccatgggggactcactgagcgaggaggagtcggatgaactacaccgcctcgcagggctcggattgccacctgtttccagtgccctggcactcagcaccatgatgggtattaatcccggactgctctggtctatgctgagtagacctactcgccattaccgcagattcacgattcccaaggggaggtcagagcgcgtgatcttcgctcctagggtggcattgaaaatcatacaaaagtggctgagcattcactttgagaaacgttttacaccactgccacacgtttatggcttcgtgcgagggaagtcccatatccaggccgccaaaatccatactacagcacagtgggtgtactccacggacatcgagggcttttttccctcaacccctatcggcttagtggttgaggctctcatgtccctggggtacaatgctgactctgcagaaatgttggcgaagctctgctgcatcaacggccatcttgctcaagggtccccggcctccccggtaatcagtaacatcgtcctcagacacatagatgcgggtctgcagcggattgccggagactttggttgtcgactgagccgctatgctgatgacatagtgttcagtggcgctcagacccctccagctgatcttggcgacgttgtcccagaactgtttttggacacaccctggcgtcttgctcccgaaaaaacccacatttctactgcccctcgaagactgaaggtgcatgccctcctggtgcacggagccgaagtcaggctgacaaagggatacaggaatcggctgcgggccttccggcaccttataaaaaacggaagagtgagggaggcagacctaaagaggattcagggccacctacattatgccgatcatgtggcggcagaatctgtcgtcaacggcgatggtagcgccattccctga

SEQ ID NO: 14145 - RNA, 1047 nt, synthetic construct
  source 1..1047: mol_type = other RNA
atgtctctgacgcggggcccttccaatcgggaatccagcagtagacacctcacaaaggactcattcgcgaaaatgcgcctgccccatcatcttgtcgagtcgttgctctttcagtatgaaacggtcgacgacttagtgctgagcctgggatcagaggtaacccctgctgaagttctggacattaggagactcgtcgctttgggccttccccctgtcatcagccgagatgtgctggcaaccataatcggcgtgaatcccggtctgatttggagtatggagagacgacctagaaagtattaccgctacttccctatcaaaaagggggtgggtgaacggcacatattcgctccacgggtggccctgaagatcatccagaagtggcttagttatcagtttgctaggacatacctcgccccaccacatgtttttggcttcgttgcgggaaggagccatctgcaggccgcaaatgcacactgtggggctcgctgggtgcatagcgtggatattcgtgatttctttcctagtatcaccgccaatgtgctatcttcaaaattggtcgaactcgggtacaacgacctgtctagcgacttcattaccaaattttgctgccttaacggtcaactggcacagggagccccaacctcaccgactttatccaacctcgtgttcagggccatggacaaccgcctggtcgagatcgcagaaaggttcggggcccggctctctaggtacgctgatgacattgtgttctccggaactcagcaatttccggaagatctgccagcatgtgtagaggagatatttgtaggccaaccatggcagctggctcccgagaagactgagacagccatattaccccatcgcctgaaagtccacggactattggttcacggccacaaaatccgtctaacaaagggttaccgaaaccggattagagcctatgagcacttgcaggccaatgggaggatcattgatgaggacgcgagaagagttggaggccaccttatgtatgcccgccaggtggaatcctttatcgtgcccgattga

SEQ ID NO: 14146 - RNA, 975 nt, synthetic construct
  source 1..975: mol_type = other RNA
atgcggctgccccatcctttagtcgagtcgctgctcttccagtacgaggcagtggacgacttgatccttagcctggggtccgatgtgacaccagatgagactgcagatattcgtcggttagtagctctggggctgccccccgtgatctcaagagacgtgctcgcgaccataattggcgtgaatcccgggttgatttggtcaatggagcgaagaccacacaagtactacaggtactttagcatcaagaaaggtattggtgagcggcgaatcagtgccccacgcgtggctttgaagataattcagaagtggctatcttgtcaattcagcaaagtctacgtcgcaccccagcatgtttttggattcattgcaggtcggtcccatctccaggccgcccatgtccactgctcagcaaactgggtgtactctgtcgacataaggaacttttttcctagcatcaccgcgaacgttctctccggcaccctgatggatctcggatattccgcacctagtgctgacctgatcgttaaactttgttgcctcaacgggcaactcgcccagggtgctccgactagtcctcccctaagcaacctggtatttaggggcatggactccggactgctggagatcgcccagagattcggcgcccgtctgtctcgctatgctgacgacattgttttttctggcacggaacaattcccgcagaatcttccagctacagtggccgagatcttcgccggccaaccatggcatctggcgcctgaaaagacagaaatcgccatccttccaaatcgcctgaaagtgcacggccttctggtacacggagatcagattagattgaccaagggctataggaatagaatccgagcttatgaacacttacaggccaacgggaggattttggaaggagatgcagctcgggtgggagggcacctgatgtatgcccgccaggtgaaaaatttcatagcccctgattga

SEQ ID NO: 14147 - RNA, 963 nt, synthetic construct
  source 1..963: mol_type = other RNA
atgaaactgccccgccactttgtggagtccacgttcttcatgttcgaatcagctgccgagcttgtgactgcgttggggcctagagtgggcctgggagacgtagctgaaatccacagacttgcccagctggggttgcctcctatcattagtcgtgatgcattagccgttatgatcggcgtcaatcctggccttatctggtccttcgagaaaaggccaggcaggtactaccgacactttcagattccgaaaggctctggcgttcgtaacatcgctgctccgaaggttgccctgaaggctatccagaagtggctgtccatccactttgaaaagtgctttatgccccatacccatgtctacggcttcgtgcccgggcgctctcatctccaagctgcaagcgtacactgtggtgcaaaatgggtgttttccgtcgacatacgcaacttcttcccctctacttccgcccacctcgtgaagcgcgcactgaccactctggggtactcggccgagtcaagcgacttcctcaccaaatttctgtgcttggcgggcggactagctcagggatcaccagcaagccccgtgctgagcaatatggcctttatcgaagtggacgccttactggccgcaatggccgcgaactatggagccagactcagcagatatgcggatgatatagtattcagcggtgtgaatgagtttcctcccgacctacctgtccaaattgctcaactcttcgcccggctcccatggaatattgccccagagaagaccgaaacagcaattgccccacagaggatgaaagttcacgggctgctggtgcatggggaccagattcggttgacaaagggataccggaacaggataagagcttatcagcatcttatgacatcaggaaagatccgagatgatgattggaggcggattaagggtcacttaatgtatgcacggcaggtcagttctagttga

SEQ ID NO: 14148 - RNA, 969 nt, synthetic construct
  source 1..969: mol_type = other RNA
atgaggttgcctcagactctgctgaactcaatcttctttaccttcgccctagagcaagagtttgtgtccgcttttggaaccagcctccaggcaattgaacgttctgaaatcgagagacttgcagccctgcagctccccccaatcacttctgaggatgccctggccctgatgattggagtgaatccagggatgatctggagcttggtgaacaggaattacaagtattatgacagcttcgtgatcaaaaagggggccaaagaaagaaggatctcagctccccgcgtctcaatgaagctaatccaaaagtggatctccctccatcttgaaaacgcttacgaccctcctgaccacgtttatggttttgtcgccggccgaagccatttggatgccgctagtaagcactgtgaggctcagtggatccacagtttcgacattaggaatttttttcagaacaccccatcgaatgtagtggagaacagtctgcttgagatcggctacaaagagccatctacggatattatcgtccccttgtgcacactcgcagggttcctggcacaaggagcgccaacctcccctgttctgtccaatatggcgttcaaaaaagtggacgcgcagttagccgaggtagcagccgctgaaggcctgaacttaacacgctatgctgatgacattgttttctcaggcataaaagcaccgaatagcgcactgattgagattataaagcgcatactggctcagacaccttggtctttagccgaggaaaaatcccattttagcgaagctcccaatagacggaaggtgcacggtcttctggtgcacggcaacaagccccggctcactaagggataccggaaccgaataagaggcttcgaacatgccatgcataaggggaagatcaagccggaggatctcattcggattaagggtcacctgaattacgccgcctacgtcgaaaaaaaattcatatga

SEQ ID NO: 14149 - RNA, 972 nt, synthetic construct
  source 1..972: mol_type = other RNA
atgaggctcccgcaacacctctcctcctccccattcttctcatttagcgagaaggacgacttctttaaggctatcaagaccgtggttgacgatgacgagttggagaggattcatttactgatcgcacgcggcttaatacccattactagcaaagaggtgcttgcgaccatgttgggcgttaatcccggcatcatttggtccatggttaaccgacctcaccgctactatcggtccttcagtattcccaaggggaaagaaaaaagggaaatcctggccccaaaagtcagcctcaaagtcattcagaaatggatctccgttcagcttcagaataatgtgacatttctcgaccatgtgtttggcttcatccctgggctcagccacattgacgccgcctcgcagcatacagaggcatcttggatctacagtatagatctcgaaaagtttttcccttctactccacagagttgggtcgaggcctcgcttggaatactggggtacgatataaaatctgcctctctggtgggagatctgtgctgttacggaggtgccttggctcaaggggcaccgagtagcccagtactctcaaacatttccatgtctggggtggacggatcactatctgctctggctgcggaactgggcgtccgtgtcacacgatatgccgatgacattaccttttccagtatttacgagttccccgaggctctacccgcaagactgagcgcgctgttcaaagacacgccttggagcatcagctctaagaagacacacttggctaagtcacctggccgccttaaagtgcacggattaatcgtaaatgatggtcaggtgaagctgaccaagggctatagaaacaagctgcgggcctacaagcacgtgatcgaaaaaaacaagtgcagagataaggatactgctaggctgtcaggtcatctgagatatgcagcccagatcgagcggcataacggtgaatga

SEQ ID NO: 14150 - RNA, 969 nt, synthetic construct
  source 1..969: mol_type = other RNA
atgcgactgccacaccaattaaccgggtctaggtttttctcgtttagcgacgaaggagagttcctgaaatcggtgtctgcggtagtggacgaggaggaattcgtgcgtattggtagtctggtgcaggccggccttatgcccatcacctcaaaggaggtactggcgactatgctaggggtcaaccctggcatcatttggtccctcgagaataaaccagaacgatactatcgccgctttaagatacctaagggtaagggcgaaagagaaatcgtggcccctaaggtgggtttaaaggtgatccagaagtggttttctgtgcagctgcaggattgtgcccgcatcgacgatcatgttttcggttttgttcccggcaggagccatattgatgccgcctctgtgcacacaaacgcaaactgggtctactctatcgacttgaccaacttcttcccaagcacaccgattaattgggtcgctagcagtctgattaatatcggctacgatgctgatagtgcagaccgaatttccaaactgtgctgctatcgtggagctctggctcaaggatcccccgcctcacccgtgctgtcaaatattagcatgagagggatagatgccgctcttggcgcattggcggccgagatggatgtcagggtcaccagatacgcagatgacataaccttcagtgccgctggagagttcccccaggttctcccggaaagactcgagtcccttttttcacagactccttggaaaatcagccaggagaagacttattttagcgaggcaccagtacggttgaaagttcacggactcgttgtgaacggcaatacagtgaaactgacgaaagggtacaggaacaagctgagggcctatcggcacgtgttgcagacaaatcgctgtagacaggaagacctagcacggctctccgggcatgtccggtacgcttcccaagtctcctctcgggacgactga

SEQ ID NO: 14151 - RNA, 978 nt, synthetic construct
  source 1..978: mol_type = other RNA
atgcgcctaccccacaatctcgtggaatcacagtttttcattttcagcgaaagagaggattttttgaaagcagtggattcagtggtcgaccacgaagagcttcagagaatcaataagctcatcgagggagggggaatgcctattacctcaaaggaggtgttggcgactatgtttggcgtgaaccccggcatagtatggtctttcatcaataaaccagaccggcattacagaaagttcagcattcctaaagggaagggaaagaggagtatactggccccgaaagtggggttaaaagttattcagaaatggatctcctaccaactccagggcaaagcacggtttcctgatcatgtgttcggattcgtgcctggaaggagccatatagatgccgccgtaaggcatacatccgctaggtgggtttacagcattgacttggaggacttctttccttctaccccacgatctctgatcgcgagttccctttgtagttttggttatgacttcaagagttcagagctgatttcgaagctgtcttgctatgacggcggtctggcacagggtgctccaagctcccccgttctcagcaacattgccatgtttgaagtcgataccgctctggccgagctggctgaagagcttgggatacgcatcacccgttatgccgatgacatcacgttttcctccgagggcgtgtatccctcctctctgccagaacggcttagcactatcttctatagtacaccctggaagatctctaaaaagaagacatacttctccgtcgccccgaagagaatgaaggtgcacggtttgatcgtcaattgcggcgaggtcaaactgactaaaggctaccggaacaagttacgtgcttatcgccacgtactccagtcggggctatgcaagaaagaagatgcatgtcgcctggaagggcacctgaactactactcacaagttattaagcaccgagacagcagcacatga

SEQ ID NO: 14152 - RNA, 918 nt, synthetic construct
  source 1..918: mol_type = other RNA
atgggtaaaaagctaaaacggggcgaagccgaggagatccaaaggcttgctgccctgggcctgccacccatcacttcccgttggtgcctcggaaccatgctgggggtgaatgcaggcatcttccgctctatggaactgcggccccacaggtattaccgaaacttcagactggccagtggcaataaggtgagaaatataagggcccctaaggccggactcaaggtggttcagaggtggatagctcataacctggcaaatgcctacgtggccccggaccacgtctatggctttgtctctggacgctctcatatagacgccgctatgcagcacgttaacgcgagctgggtggtgagcgtcgacatctccgacttctttccttcaacacctgtcagtgttgtgcggtccaggttgctgtctattgggtaccaggaagtggccgccaacctgattacctctcttgttacatacgaggagagcctacctcaaggtgctcccacttcaccagtattgtccaacatttgctttggcccatcggatcttaaaatggcagcaatcgctgagcactacgatgcaagaattactcggtatgccgatgacatagtcttcagtggtgaaaccggcatcccgcatgctgacatcctcgtaagcgttagggatcattttgaacggacatgttgggatattaatgagcgaaaggtacgaatttcacaggcgcccaatagacgtaaggtgcacgggctcttagtgcacggtggaagcgtccgcctcacgaaaggatacagaaatagaatccgcgcgtataaacacctgctgaacacccgcagtgatattccacaggaggactaccattcaatcatggggcacgtgagctatgcagatcatttagctgagttggtggggaagtccgactccaactga

SEQ ID NO: 14153 - RNA, 969 nt, synthetic construct
  source 1..969: mol_type = other RNA
atgcgcctgccacacaatctcctcgaaaatgtagggttgttgacagacggcccaaaggagcttatcgcgagcctgggtgagggatgcggtgtggaagaggcggatgagattgtgcgcctgttctcactgggactgcctccggttacgtctctgaaagctctggcagtcatgaccggctacaacccaggattcatctggtccttagtcgaccgacccgaaaaatattatcgagttttcgacatccccaagggccgacagctgagaagaattgaggcaccccgagtggctctgaagctcatacaaaagtggttttctctacactttgagcgtcagtggaaacctcatgatgctgtgcatggctttgtgagggggagatcccacctcagcgccgcaaggaagcacgtgaccgccgaatgggtggtcagtgtagacattgagaattttttcccctccactctcaaaaccgatgtccgggccgccctggttcgtcttggctatcgctcagaagagtcgcttgcaaccatagaacggctctgttgccgctatgagcgcctaacacaaggcgcaccatcatcccctgtggtcgccaacattgctcttgacttgctagaccagaaaatagctgccatcgcagatcaccatggagtgatcttcacacgttacgcggatgacattgttttgtctgggcgggacagggctcctgcaaacatcctggaagaactgactgccatcttcgaggggactagctggcgccttagcgcccagaagcagagcgtgtctcacctcccggacaggttaaaggtacatggactcctggtccatggcgagcacgtgaggctgacaaaagggtacaggaacagattaagggcctttcggcacctgagtgatcggggcgccattcgggaagctgatcaaagacggattagaggacatttgaattacagtcagcagatcgagagaggtgggtga

SEQ ID NO: 14154 - RNA, 966 nt, synthetic construct
  source 1..966: mol_type = other RNA
atgggactcccccatcacgccgtgtactcccagatgctgtgcgctggttctgagcaggatctcctgttaggcatgggcgctttctgctccagtgcggaggcggaagaaattagtcgcctgactgctttgggactcccgccggtcacttctctagaagcacttgccgtcatgacggggtttaaccccggtttcttgtggtctttacagaacaggccagaccggcagtatagggttttctcaattcctaaggggaagacatttcgtcagatcgaggccccaagggtgggcttgaaatttattcagaaatggctcagtatccacttcgagcataagtggagcgcacaccctgcagttcacgggttcgtgaagggccggtcacatattaccgccgctcgagtacacctgaacgctcagtgggtgatcagcgtggacctggagaattttttcccatccacaaaagtggatactgtggagaaggcactcagaaagctcggctacaaaaccgacgccagcatctctatcttgagtagcctgctgtgttttaagttaaggctgtctcaaggggcgcctacatcccccgtgatctcaaatatcgctctgtccgatatagacgataagatcagccttatagcacagaattgtggagctaggtataccagatacgccgatgatattgtactgagcgggacactgtccccacccgagaacctgctgctagccattaagaacgtctttgaaaagacctgctggagacttgccgaacgtaaaacgtcaactgttcagctccctcaacgcttgaaggtgcatggccttctggtccacggtgaaaaaatcagacttaccaaaggatatcggaataagatccgggcattcaaccatctgttcgagaaagacgccgtgaaagccgaggacgcccaacgaattcgcggacacgttaattactcgcgccaaatagaaagagtctga

SEQ ID NO: 14155 - RNA, 969 nt, synthetic construct
  source 1..969: mol_type = other RNA
atgagacttagccacaagtacattgaaaaaatcgctctggtggccggatcagccgaggacctcatcacagccttgggaaactcgtgctctcccgaagaaaaggctgagattcaacgcttagtggacgccggccttcctccagtaacttcctctgacgccctctcagtgatgaccgggttcaatccaggctttatttggagccttgtgtcccgacctgagaagcagtatcgggtgtttaagattccaaagggcagagaagaacggcagattgaagctccccgggtcgcgctcaagctgatacagaaatggttttcagtccacttcgagaacaagtgggttgcacattccagcgtgcatggctttgtgcggggtcgcagccacatctctgcagcaaagtcccacctgggagccgagtgggtggctagtgtagatataaggaacttcttcccgagtaccaccgcgtccgaagttgataatgcgctccgcgatctcgggtatggcgacgagagtatcaagctattgaaacgcctgtgttgcttcgggggcagattatcccaaggggcccctacatcacctatcctgagtaacatcgcactccataggatcgacttggatgcctctaatgtggccattgagctgggagccgtatatacacgatatgcagacgacatcgtcttcagcggaaaaggtctgccccccccagatgtgctggagaaactggagaagctctttaccggaacgtgttggcagttatctgaaaggaagcgccacattgctcagttgccggggcgtctgaaagttcatggccttctggtccatggcgacaaagtcagactgactaaaggttaccgaaatcgggttagggcatacaaacacctagtgagcaaggggaggatcaacctggatgacagaaaccgtatcggcggtcacataaattacgctaagcagatagatgaggcttctgattga

SEQ ID NO: 14156 - RNA, 978 nt, synthetic construct
  source 1..978: mol_type = other RNA
atgagactcccccataatttaatcgaacgactgaccctggtagcgggcagtccagacgaactatgctccgcgctaggtgatgccgcaggtggagaagaagtcgccgagataggaagactgagtgccgcagggctgccacctatcacctctctcaacgcactttcagtgatgactggctataatccaggctttgtgtgggctttggctaacaggaccgctcgctactatagagtttttgagataccgaaaggccgaggcactcgtcaaatcgaggccccgcgagtcgctcttaaactgatacagaaatggctgtgtcaccatttcagcgccaaatggcagcccctggatgctgttcacggtttcgtcccaggaaggtcgcaccttacggccgcaagcgtgcacttacgcgcggaatggatcctcagtatcgacctggaaaatttctttccctccacacctattgaccagatcaggggatcacttagaaaactggggtatcaggatggggacgggctggagttgattgcaaacctcctctcttttaggggacgcctgtcacagggagcccccacaagcccagtgattagcaatattgcattgagcgacatcgatgggatcttgtccgacattgcccggaatttcagaattagattcactcggtacgccgacgacattaccttctctggcattagtggtgtacaactgcctgacgagctgctcgcatctgtccgggagcagtttgtggggacaccttggcgcatctccgagaggaagattcatatcgccaagtcccccgctcggcttaaggttcacggactgctggtgcatggcgatgagctacggttgacaaagggctatagaaaccgcctcagggcctaccggcatctgatgcagctcggcaggatagatgcttcagatttaggcaaggtgaccgggcacatgaactacgctagccaaatcgagcgtctgaagtcttga

SEQ ID NO: 14157 - RNA, 972 nt, synthetic construct
  source 1..972: mol_type = other RNA
atgaggctgcctcatcacaacctagaaagtgtctgtttcctgttcgagcacttttcggagcttataaaagccatgggcgataaatgccccccggaggaagcaatcgagatcgagcggctgttcaatctgggactccccccggtgacctccgagaatgcacttgccaccatgctgggctataacccaggctttatttggtctttattaaacaggacgagccggtactaccgtcagttcgatatccccaaaggtgccggcactcgcaagatcgatgccccaaagatcgccctgaaggcgatccaaaaatggctctcatatcacttccagaagaagtggatccccaatgaacatatttttggctttctgcctggaaagtcccacatggacgcagcgagcaaacacctcagcagtaaatgggtgtatagcatagatatccagaattacttcccttctatcagtacagtgcgcgttagagacgcattggagaacctggggtattctaccgagccatcattgaaaattattcccactctctgttgcctgcggggatcattagtacaggggtcaccagcttcccctgtcttgagcaacattgtgctcaaaaacctggatgaagaattggccaatttcgctcgagaaaaaaactggaagtttacaagatacgctgacgacattgtattttccggcattgacgacatcaacgagagcgattttatacctatcaagcttttcgtcaaccaggacgggtggatgatctctgataagaagacttacctcgcacgtcatccaaataggctgaaggttcacggtcttctggtgcatggtgacaccatacgactgacaaaagggtatagaaacagaataagggcttttcgccacctcttgaatgctgacaagattaaggaacaagacctagccgttattcggggacatcttaattactccgcccaggtggatgatttccagctgtga

SEQ ID NO: 14158 - RNA, 960 nt, synthetic construct
  source 1..960: mol_type = other RNA
atgcgattgccacagccccaattagaatcgataggcttcctgtttgaggccccatccgagctgattcaggccatgggtaacgaatgttcccctgacgaggcagacgaaatccgacggctatacggcctggggttaccccctgtgaccagccaggagtccttaagcgtaattttcggctataacccagggttcatttggagccttcttaataggactccgagacactatagacattttgaaatccctaagggcgccggacatcgtcagatcgaggctcccagggtcgcccttaaggccatccaaaaatggctgtctcaccacctccagagggcgtggactccgaacgagaatgtttttggatttgtgcctggacggtcccacatcgatgcagcagcgaagcatctgtcaagcgaatgggtgttctctgtcgaccttgaaaattttttccctagcgtgtctatccgtcgcgtgaaggaggcactcagaacagtcgggtaccaaacggataaatcagtggagatcttgagtactctctgctgcctggataaccatctggtgcagggatcacccaccagtccagtgttgagcaatatagtactaaagaacgttgatcagcagttcgcctctattgctgctgagaaaaagattgtttttacacgctatgctgacgacatagtgttctctggcagtggtgatatcccacaccagaccctgacacagatcaagtcggtcgtctccgacgatggatggaccctctccgaacggaaagaacggctcagcgagacacccaatcgcttgaaagtacatggcctcctcgtgcacgggcgcaaactgaggctgaccaagggttataggaatagaattagagcttaccggcacctgctgaagaacgagaaaataaaggaggaggacctgagtaagattaaagggcacctgaactacgcctcacaagttgaatga

SEQ ID NO: 14159 - RNA, 972 nt, synthetic construct
  source 1..972: mol_type = other RNA
atgcggttcccccatcctgacttttccgaactgtgcctcttcgcacaaaccccagatatcctgattaaagccctgggggatttcagtgacgacgaggaaaggcagctcatcttagagtattgtgctcaagacctccctcccgtgacatcagtgatcagccttgcagtaatgaccggctttaatccaggcttcatttggagtatagtttctagaccacacaagcattacagatcattcccaattctcaaaggaaaaaacgcccctccccgcataattaatgcacccaaggtggggctgaaagctatccagagctggctttctatccactgggtgcgcaaatttgaccaccaccctaactcatttgggttcatccctggacggagccacgctcatgcagctaggtgtcatgtaggcgccgagtgggtgttcagcgtggatattaaggatttcttcccgtccattcaggaggaccgtgtcttgaaggccctgcagtgcctggggtacaaggctggtgacggcactaccctgctgacccgcatgctgtgcctggatggtgccctctcccagggatccccagcatctcccgttatctctaacatgatactccgaggtctggatgagcggctgttggcccttagcctcgaactgggcatcgtctttactaggtatgctgacgatattgtctttagtggtaagggccagccgcccaaagcgctactagagaaggttgtgaatgaagttaacggggacggatggacgatcgccgaagacaagctgtacacatcgattcttcctgcgcggttaaaagtgcacggccttctcgtccacggggcgagtgtacgtctgacaaagggatataggaatcgaataagagcctacagacacttgttggccgagggcaaaatcagcaaggatgatttatcatctgtgctgggacatgtctcctatgccgactttgtggagaagttgtga

SEQ ID NO: 14160 - RNA, 1014 nt, synthetic construct
  source 1..1014: mol_type = other RNA
atgcgactgccacacccaaggacggagcagctcggatttctcgctgaaacccccaaggaggtgtgcaaactcattggcgccagctgtggggaagacgagcagaagttgatccagcaatactacgaactaggcctgccgccggtcacctctgtcaatgctatctccgtgatgtttggatacaacccctcttttacatggtcgcttctgaaaaattcacacaagttctacagggtgtttgagattccaaaaggacctaagaaaaggaatattagtgcccctaaagtttccctgaaggtaatccagaagtggctggcgacacatttctacaataaatgggaacgacctgactatgtttttgggttcgtgcgcggtaagtcccatattggcgccgcccaggagcatatcggtgctaattgggtgataagtgtggacatagaggattttttcccaagcattcggtggactagagtgtatgatgccattaccgatctgggatatcaggacgacttcagcaagcaggccttaactcttctttcatgctattacgggagccttgcacaaggagcgcctacttcccccatactgtcgaacataataatgggccccctggacaagaagattttcgaactcgcacgccacaacagcgctacttatacccgctacgctgatgacatcgtgatctctggtaaggacggcgagcctaacagtctcctggaacaggtctgtacgctgatcgagtctgatggctggaaaatcagcgttcagaagaaaaagatccaaaagtcccccaatcggttgaagatccacggcctattagtgaatgataaaaacgtccggttgacaaaggggtaccgtaaccagattagagcctacaaacatatcttgaacaacaactccatcgatgacgaatcaaaaaataaactcagagggcacattgcatatgccgatcacgtagcaacctattctgagcaactgcctccacccagtacaccatcaagcaagctgcccgtctga

SEQ ID NO: 14161 - RNA, 981 nt, synthetic construct
  source 1..981: mol_type = other RNA
atgcggttcccccaccccgacctggagaaaatatgctttattgcagaagacccggataccctaattaaacttctgggcgaacactgcacagcagatgaggccgcactaattcagcagtgttgtgctagtaggctccctccgatctcctccccagacgccatcgctactatgttcggctataaccccggctttgtatggtttatgcttaccaagaccaaccgcctgtaccgcacattctttataccaaaaggcaaaggtgagcggcagatcaccgctccccgagtgtctttaaagcttatccagagatggttgaatttccattggtctgcggcttgggtggctcctgattgcgtccatggttttgtttcaggaaggagccatgttactgcagccactgagcactgcaatgcgaagtggattgtgagcgccgatatcgaggactttttcccttcagtgaaaaccgcccgtgttagacaagcactcgctgaactgggttacgctaacatggattcattggccctcctcggaaaactggtgtgtctcaacggagctctcacgcaaggcgcccctacaagtccattactgagcaatatcgtgctgggccagctggaccggaacctgaccacattagctgaagaactcaacctggtattcactcgctatgccgacgatatcgtgttctccggaaagggggagatgcctgaggggattgacaagaagataaaggccatcattgagcaggacggatggacggtcgccgaaaagaagttcgaggtcgccaaggccccctctaggttgaaagtgcatgggcttcttgtccatgggggtaaggtgcgtctgacaaaggggtatcgaaatagattgagagcatttaggcacgttctgagcaatgggaaagcctccgaaaaagatgtgccaaaactgtcgggccacgtcgcatacgcggacttcattgacctgcagcaccggaagccagattga

SEQ ID NO: 14162 - RNA, 990 nt, synthetic construct
  source 1..990: mol_type = other RNA
atgaagccaccacatccatcttcgttttccgtgggcttcctaaccgagagcagcgacgaactcattaggatcataggtaatagggtcacggaggaggaatctcagctgatacggcaatactttgatctgaagctgcctcctatcacttctgtcccagccctcagtggtatgttcggacttaacgaggggttcatctggagcgtgatcaaccgggcgacaaagcattatcgacgctttgaaattcctaaaggcaggaccacccgaactatctttgcgccgaaggtgggcctgaagatgattcagaagtggctcagtattcatttccaagaatgttggtccagcccccgctccgtgttcgggtttgttcctggaagatcacaccttgccgccgctgcacagcatctggggtcagaatgggtgatgagcatcgatattaagaacttctttcccagtacttccacacagaaggtggaagcagcattggggagacttggctataatgacgagttcagccgcatggccatcaccaaactaacatgcctgcggggtggactcgcacaaggagcacccagtagccccatcttgagcaatatagtactgcacgatctggaccagcggttatctcagtacaccgaggccaacgacctcgtctatacaagatatgccgacgatatcgtgatttccggcaacgactcaccacccaatgatattattgatgatgttcgctcaatggttaaagatgatggatgggagatcgctgagtctaaaacgtccttggataggattcctaatagactgaaggtccacggcctgctggtacacgggaaacagatcaggttgaccaagggctaccgtaataaaatcagagcctaccagcatttacttgctaacaacaaaataactgacgaggacttttcaaagatttccggtcacatccgttacgctagttctgtggaaaaattcgacacacacccggacaattacgactga

SEQ ID NO: 14163 - RNA, 1479 nt, synthetic construct
  source 1..1479: mol_type = other RNA
atgaagatcaattttaatgaggacatcctgctgtgggcaattggggtgcttcagcccgctagcgctagcgatgcgctgaaattcatatcctacatctatccagaaatcaaaccactcccactggtcaaggaaatagatcaggttctcagccggtaccgggacctcggtatcgtggtacgcgtgcacggcaagtctaggctgtactcactgacatacgccggaaatgctaagctgtcactgaaattgcggcgccatagggataaagcccgtctctttcttctcaaagacacaaggaagtgtaatatggtgctgtccggggaagaaaagaaagagtcagttggagccagcccaacgtctgacgggtcctctactttgcaggatttcgcccgccctatcaagagtgctgcagccccgcgatatcctagacacaacggtcggttttattggtcaagaatctctaagcaattgaatttccaggtgggattgaacttttcgtcacccgacattttcttgaagtactatagcttccctagcttaaaagcgatccacaacattagtccggaccctgctgagggaaacgacctctccgtgactgattttgctttatcagtgggtgtgtcgccccggctgatcacaagtctgctccacgcaacccataaatattacaggcagttcaacatcggcaagcgaggcgggggcaagaggactatttctgccccacgcacctttcttaaggtgatacagtactggattctcgattaccttctttacacccttaagagtcatcccatttgccactcttatcagcgtggtaaatccattatcaccaatgcctctcctcatatcaatagcgaatatgtggctaacattgacattagcgacttcttcggctccattaatcaaaccatgatcattgatctcctgcgcaaaaacgggttcggcgagcagctatccaaaacaatagcaagacttacctccctgaataatgggttacctcagggagcgcccacctcgccaatactgagtaatgcctatctgtacagctttgatgaaacggcagcacagattgcccagaacacagggctgcacatcactagatacgcagatgatatcgcaatctcaggcaaaaagaaggactccattatcaacgttataactctgttcaagcaggaactgtctgccaaaggtctggagctaaacgctaagaaaacccgggtagccagtcgcggcggacaacaacgtgtagccggagtcgtcgtcaacgacaaggctctacccccgagaaaactaagaagaagggtcagggccatgttccatcaagccgacaattatcccgaggagcacgttgagaaatacaatacactgcgagggtatctgagttattttaacagctttccagcgctcaagggaggccccgagttagagagctacaaggaaatcttgaagtccttgtctaacaacgtgcagcctggcgcttga

SEQ ID NO: 14164 - RNA, 1482 nt, synthetic construct
  source 1..1482: mol_type = other RNA
atgcgggttacactgaacgaaaatatactgctgtgggctgcagcagtgctgcagcctgcatctgctgccgatgtccgctcgtttattgctagcatctacccggagatcagtctgcttcctaatattggcgagattgaaaacatcttctctacctggagggaggaaggttatctccagagggttcatggcaaatcccgcctgtattctgctacctacaagaccaatctaaagctgtctgtgaaattgcgacgttcaagggacaagagcaggctgtttctattaaaatcaactcgcgcagccaacgtgaacgttagcggcgtacgggagcaagactccgtgggagattcaccaagtacagaggggtccattatactccaggagggagcctggccaatcaaaccagctgctgcccctagagttccaaggaccacagggcgtttttactggcccagaatttctaagcagcttagtatagaagtcggccctagtttttcgtctccggataccttcttcaattactacagctttcccagcataaaaaccatccacgaggcctcacataaacccgcctctgagaaggacttgtccatcacagacatctctctggcgattgggatctctcccagactgatcacctcctttatccacgctcctgaaaatcactatagacagttcaagatcggaaaaaggggcggaggtgaacgggtgataaatagtcctaggacttttttgaaggtagttcagtattggatcctcgactacctcctgcatagccttccatgtcaccccaactgccactcctatcaaaagggcaagtccattctgagtaactctctgccgcacgtgggtcagaaataccttgccaacattgatatttcgaattactttcccagcataaatgagaaaatggtgttcagcttactacgcgacaacaatttcggtgagcaactgagtaaagcagtcgctcggattgtcactttggaaaatggcctcccacagggagcccctacttcacctatcattagcaatgcctttctttgcaatttcgacgagataatgacccagcgagcactcagctttaacttggtgtatacacggtacgccgatgatatgacgatcagcggagagaataaggagaacattatctcactgatcaagaacctctcagccaatctcaaagacatggggctgtcaattaacgaaaaaaagactcgcatcgcgtcccaaggagggcagcagaaggtcacagggattgtggtgaatgaagtctcccagcccccccgaacgtatagaagaaacatccgcagtatgttccatcacgcagaaagaaaccccgagttattcgcggataacattaaggtgctgaaaggctacatcagctaccttcagtccttcccaaacatgcagggcaaaaaggagattttccggtataagaacgtatgtaagactatcgaaaagaatttcgtgcaacagtcccattga

SEQ ID NO: 14165 - RNA, 1452 nt, synthetic construct
  source 1..1452: mol_type = other RNA
atgtctgcccggttcaactggcgaatcatactgtgggcgctgggagttgtgcaaccagcgactgccaaagagatacgtgagctgctgttgaaagtgtttcccgacgccggacgcatcccttctcaggatgaatttaaggtctacctcaacctctgggagaaagagcgactggttggtgtcgtgaataggaaatccgcacattattcactgacttctcgcggaaattatcgcatggggtccgacttaagatacaacagggacaaagttcggttatttctgatgaaggaagccagacggaacagaatttaccttagcggagaacagataaaggaactcgtgggggactcccctacagtaatcggcagcagggagatctacaagaggcaccggccgataattgctgcactaccctgctttggaagaaattattggccaatgctgttaggtcagctgctcgctgatcctcttaaaaacggcagccctgataaccatctcgccctgtattctttcccatcgttcgaatcccttatttcaagctacgacagattcagcagaattaaaaagccctcccttcatctgctggctctggcgataggcatcagcccccggttgattagttacatcatctataaacgccccgagcactacagacagtttgaaattgggaaaaggggcggcggaacaaggaatatctgcagtccacgagtctttctcaaaacgattcagtattggatcttggattacctgttgttcgcacttaaaatccacccctcttgcaatagttatcaaaaggggaaatccattatcaccaatgcatcagaccacgtaggaaagaactatgtggccaatatcgatataaaggacttcttcaacagcatttccgagcgtagtatttcaaagttcctgtgtaatcaggggtacgatgccggtttctctgagctgattagtaaactggtgaccctgaacgatgggctcccccaaggcgcaccaacttcccctcacatcagtaacgccttcatgtaccagtttgacgaaaagatctttaagttctgcgagaagttgaagatggtctactcccgctatgctgatgacatgaccatttcaggcagtaacaagaaagacatcataagggggatcgggttcgctaagcagtacttagactctatgggtctttcgctgaatgagtctaaaaccagaattgccagcaaaggcggccagcagaaagtcaccggaatcgtggtgaatagccacatcagcccaccgcgcatgttccgacgtaagattcgggctatgtttcataatgcctataagaaccctaaggagtacagggataagcagggccaactcaagggttacctctgttatctatgtgcatttccgggcgtgttgactgccaaggataaggagatttacgttcggacaatcaaccgcctatcatcctttgctgaatga

SEQ ID NO: 14166 - RNA, 1329 nt, synthetic construct
  source 1..1329: mol_type = other RNA
atggaacccatcatctctcgttggctcgaagagagatgcatcgtaagagtgcacggtaaaagccgcctgtatagtatcagtcacgtgggtaatgacaagctgtccattcggctccgacgccaccgagataaggcaagaatctttctgcttaagtctgcacacgatgcttcatttcaggtgagcggggaagcccatcaggagcttgcaggggacagcccggctgttaacagctctgggaatacgcaggagggcacctggcccatctctagtgccagcgatcctcgggtgccaagagtcccggttcgaacttattggcctagggtcgtgcggcagctggactttaaggtgggatctgtccccaggtccccagatacacacctcacctattacagcttcccttcggttcagtccatccacgacgcctcagaacggtgtgcaccgccaaatgacctgagcatctcagacctgggcattgctttaggggtcagtcctcggcttctgactagtttcattcataaaccaagtcgccattatcgacaatttgaaattggaaaaaggggtgggggaaaccgtgttatttcttcacctaagttgtttctgaaggtaatccagtactggctgcatgactactttttgtaccgactccagattcacgattcctgccactcctaccagaagggtaagtccattctctctaatgctgagcctcacgtgggcaaacatttcgtggctaacattgatattgaaaactttttcgggtccataacaaaggacatggtatcccagttgctgaggaataatcgttttggcgagcatctgagcaattcagtggccaggctagtgaccttcaatgacgcgttaccacaaggcgcccccacctctcccacaataagtaacgccttcttatatgatttcgatgagactatggcagcctggagcataattgagggcctcacatacacgcggtacgcggacgatatgactatatcgggaaatgatagagagcagatactcgacgctatcaggctggccgagcgcctgttgaacgaaatcggactgaggcttaacagcaagaaaaccagaattgccagcaagggcggacagcagaaggtgaccggcgtcgtggttaacgagaaaccacaaccaccccgggatcttcggcgcagaatcagggctatgttccatcaagcgaaaatgtcacccgacgaattcagacaaaaactccccatgctgcgcggctatctatcctacctaagctcatatcctgccctgcgcaactctgaggagctgaactcctacatcaacgtcttgaagaaaatctcccagtga

SEQ ID NO: 14167 - RNA, 1509 nt, synthetic construct
  source 1..1509: mol_type = other RNA
atgtccatccagttcaacgatcagctacttctatggggactgggagttctgcaacctgccgcccctcaggaagtattgagctttctcaaactggtctatcccacagtcgaacagtggccagacgaactgtatcttaacgaccgttttttccactgggaagagcttggctacatagtggtgctgaacaagaaatattcgatgtacagtcttacggccctggctaatatgaggatggacgtgaaactgagacggcagcgtgataaagcgagaatctccctcctgcgcgcggcatatgatgccaatgtgagtaggccgggcgtgatggaccaggacttggatggggcttcccccagttccgagatctccagcacactacaagaggggtcccgacccgtgggaagcggatctaagcctagtagaacagagccaacccggctccgcaccagaacgtattggtcccgggtcagtgagcagctctctgtgcaagtggggctggacttccactcccccggtatcccatcgtttcagtaccgatactgttcttttcccacactcaaggctgttcatcaggcaagcttgggagagagctcagaaaatgatatgagcataagcgagctgggccttgctatcggcgtgtctcccaggttactgacaagttttctccataagcctgagaatcattatcgacacttctctttgcctaaaaagggtggcggggaacgagatatcgcagccccacgcttcttcctgaagactattcagtactggattaagtcttacgtcctttgccatctgaaggttcataacacctgtcacgcatacacctcaggtaaaagcattaatacaaatgccaagccgcacgtggggaaggcttacgtagccaacgtagacatcgagaattttttcggcaatattactaaggaacacgtctttagaatcctggaaaaaaacggcgtgggccgcaaactcgcgactgcagtctcagggatagtgaccctgaatagggtcgtgccacaaggggcccctacttcccccgttatcagtaacgccgtgctgtacgaatttgataaagctatgagcaagatctccgttgataagggactcgactatagcaggtatgcagatgacataaccttctcaggcgagtcgcgctctgacattgaatacatcgtgtctaaatgccgagagttgctgtctgccgaaggattcaacctgaaggacaaaaaatcacgggttgcctcaaaatacgcgtctcagcgcgttaccggtttagtggtcaacgagaaagtgcagcctccgcgggagtaccggagaaagttacgcgccattttcaacaatgctttaattaacccacaggagtacgtcgatcgtctcgacgagctgtatggttactttggctatctcagcagcttcgatggagccaggaacgcaaggcaaattaggaaggacagaattgctatctatcgggtatccagattggctcggataaagaagtcaaaggatgagtga

SEQ ID NO: 14168 - RNA, 909 nt, synthetic construct
  source 1..909: mol_type = other RNA
atgtccctcagtcagttggccctcgctatcggaatttccccacggttgctgaccagctttacccacaggccggagaatcattacagattcttcgacatctcaaagaagggcggcgggaaacggcagatagctagtcctaggttctttcttaagaccgtgcaatactggatcaagagctatatactatgccatctgaaaattcacgactcatgtcacgcatacttggtgaataaatccatcattacgaacgctgaaaagcatgcaaggaaggagtttgttgccaacatcgatatagaagacttctttggctcaatcaaaactgatcatgtcttccagttactgaagaagaacgggattggtgaaaagctgagcaaggcggtggcacacctcgtgaccctggatggaaagctgcctcaaggagcccctacaagccccacaatttccaatgcttttctgtatgagtttgacaattctctctctaagatctcgaatgaggctgggctggaatacagcagatacgccgacgatataacaatttcaggaagtagtcgctctgcaatcgagagcgtcattttcggctgccgcaatcacctctggtctaacggtctgaaattgaacgagaacaagactcgtatcgccacatcacatagttctcagagggtcactggccttgtggttaacgaaaaaatccagccacccagagagttccagcggcgcattcgcgccatctttcacatcgtaaataaaaaccccgagagctacatcgagcggatatccgaactaagggggtattataattacctgctgtccttcgatgcaattaaaaactctagacacttacagcgatatcgaatggtgatcaacaaacttaaagccgcggcccgtaataacagctcctcgcttatttga

SEQ ID NO: 14169 - RNA, 1500 nt, synthetic construct
  source 1..1500: mol_type = other RNA
atgagcgtcaaattcaacaacaggttactgctgtggggtttgggcgccgtgcaacctgccactccctctgaggtgattggatttctcaaattggtgtatccagatgttaccgcatggccagataggaacttcctcaggataatctttaatgagtggcttgatcgcaactatgtgattgagctgaataaaaagtacgagatcttcagcttgaccagtgccggcaaccatgctttaggatataagctgagagtgcaccgtgataaagcaagggtgacgcttcttagagctgtatatgacgccaatctcgccagcctgggcgatgtggcccaggattcagacggcgactccccctcatcggaggctagctcagcgttgcaagaagggagtcgcccagtcaattctgggtccgagccatcaagaaccgagagtacccgactcagagcacgcatctattggcctcgcgtatctgaacagctgctgtccgtgggcttagatagacatacttcgaatattccgagctatcgatacaggtattgtagctttcctacactgcgggcaatcaagcaggcctccaatgacaattccgatacacaggatctgacaatcagccagctgggtctgtgcattggggtgagtcccaggctcctcacaagtttcgtacataaaccggagaaccactaccgaactttccgtattgggaagaaggggggtggtagtcgggagatcagctctcctcggttctttcttaagtctatccagtactggataaagagctacatactttcccagtttaacgcacacaacgcgtgccactcttatcggatcggaaaaagcatcattacaaacgcgaacgagcacgcccgaaaatcatacgtggggaacgtggatatcgaggacttctttggctccgtggacaagaagatggtcttcgaatgcttacgcaagcacgggtacggctccgaactatctcgctccattgccggcctggtcacgtttaacaattcacttccccaaggagctcccaccagccccgaaataagtaatgcaattctctttgacttcgacgaacgcctgttcgccgctgcttcggacgttggagttacctacacaaggtacgccgacgacatcactctgagtgggggttctaagcaggttgtggctcagctgattagagagtgtgaggagggcctaaaagcacatggaatgagattgaatagcaagaagactaggattgcctcaattcggagctcccaagtcgtgaccggcctggttgttaatgaaaaagtccagccatctcgagcgtatcgtaagcggatacgggccatcttccatcaggctggaatcaacccttcacagtacgtgggcaggctgaaacaattgcagggctattacagctacctctccgcttttgattctctaaaggactccaagcagctgcgggaatacagagaagtaatcagaaaactcggaatctcttcaaaagaaaaggtcgacgggtga

SEQ ID NO: 14170 - RNA, 1455 nt, synthetic construct
  source 1..1455: mol_type = other RNA
atgaagaagaacgaactgcagatccttctctggagcattggcatcctgcagccagcaagtccgacactagtcagacattttctacaggaaatgctccccaaggcttttaacaatactacgacccagaaaatcaaagagaagttcagttggctccagaaaaatgggttccttgcctatgcactggacggcgtggactacatctactctctcacacgagaaggtgagttagccttggggccaggtatcaggaaaagccgcgataagatccgtttgtttctcctgagggacagtgccagctatattcaggattcaccatcgtcacccgaaaggggcttggagcttaccggcgatagccccgtggtcgaaaccagatatgtgctgcaaggccggaggcctattgctccagctgctggacctggtgtgagaagatactggccttccactttcaagcagctgaaaggatttgcgggaccgaagccccggagcgaattttatccatttgacctctactccttcgcaagtatcgatgagttgaacgcagccgtaggaactgaatgcgaccgtaattctttatccctcattcacctagctctgtccatcggcgtgtcatcgaaacttctgttcgccataagcaataactccaggcgatactatcgctccttcgagataagaaaggcttctggaggtatgagaactatccacgccccacgaatttttctgaagacgatacagcggtggatagttgactacttcctttttcaacttccctgtcaccctgggtgccattcttttcagcgtggtaaaagtattatcagcaatgcagccatacatgtcgggaagaaatacgtggggaacatagacattgccgattatttcaaaagtatcaagtctgagcacttggttcacaaactgtccaaattcttcgggattggcctgtctcgcgctattagcctcatctgcacacatgatgatttcctgcctcaaggcgctcctagctctcccattctgagtaacttctacctgttcgactttgacaaggagatctcactcctgtgtgagcaaaacgaactttcctactcacggtacgcagatgacatcacaatctcgggcaaggaaaagaacagcatttacaacgccattaattacagcaagtacctgttgaagaagcacaacctgaccctgaattatcagaagacccgcgtgtcttcacggggcggacagcaaaacgtgaccggggttgtcgtcaatcagaaaatcaatcccccgagatctttacgccggaatattagggcgttatttcacaacgcccagaaaaaccctatgcagtatacagacaagatcgagatgatgcgcggatatctctcatatctgaatatgtatgagtcccagaagaacatcatcaataaatccaggtacgagcatattattgatgcaatagccgcggtaaaagagtga

SEQ ID NO: 14171 - RNA, 1443 nt, synthetic construct
  source 1..1443: mol_type = other RNA
atgtcaaacaaggtccacccgtactattacctgtgggcccttggaatcatacagcccgcaacacccacgcaggtccaacacgttctggagaagacatttgttgaaagtggggtgaagttcaatctgaacgagatagtgcagtgttttgagaattgcctgaaaggaaagattgtcttaaaagcctccgagtggaatgactccctgtttagtctggggcccaatgcctatatgttgctccctaataggctccgctttaacaaggatagaacaagactctttctgcttaaaaaggccaggatagcttcaagacgtgcctctggccacctggatttggacgcggacggggcttcaccatcagacaagcgcagtttcaagatacaggtgcctcgtcccatcaaacctctcggtctggcacccgcccagttctactggtccggtgcgtatcggcaattgaccagcaccgctggaccgaattcgacattaccagaagtgaggctcccttttttgagcttcgagtcaatcaacctcattaagtccatcaatgaatctacaaagacaactcctttctccattaccggattggccctgtgcattgggatcagcccaagccttctagtgagcaccatacgcaacattgaaaaacagtaccagacattcgaaatcgagaagcactcagggggcactaggacgattaccgctccaagagtttttctaaaaacgatccaacactggttggccgattaccttttcagcaccttacccgtgcatgacgtatgtcatgcttatcggtccaagcgatctattatttcgaacgccgagaagcatacaaatcagaagttcgtcgccaagatcgatatcagcaacttttttggcaccatcacatccgagatgcttattaagaaactgagcccattctgtagtgttgaggaggctaccgttttttctcgaattgtgacgctgaacggttccataccccagggtgcacctaccagcccttgcctgtcaaacttcatcctgttcgacgcagatgggatcatcgctaaagagtgccaaaaagtcggagtgaattacactaggtattctgatgacctgaccttcagtggagaaaaccggggccagctattagaaatcatctctttcaccgagaacgtgctgaaagagtacggctttgaacttaacccgagcaagactcatattatgacttctggcatgctgcaaaacgtcactggcgtcactgtgaatgagaaagtacagccccctagaaaggtgcggaagaaaattcgcgcaatgtttcaccaggcggagcagtccccagagaacttcaaagatcagctggaaaatctcgccggctatgtaagttacctgaatgcatacccagaactcaaagactctcagactctccggcattataaggaagtgctggtgaaattgtccaccctctga

SEQ ID NO: 14172 - RNA, 1380 nt, synthetic construct
  source 1..1380: mol_type = other RNA
atgaagaccgagcttagcacacaaatttatgcgtgggcattgggaattatgcagccagcctccgcaacgatcgttaaacatttcatgcagatggctctgcccgactcttgccaggacctggagacaaaagatgtgaaggtgcagttcgctaaaatgctgaagctgggtctgatctcacagagctcagaaaagattgattacgtgtattctctgacatggcttggcaacctctctatgaacaacaaattacgtgtccatagggataaagctaggctttttcttctgaaggacgctgcacaagccgcccacaaagaacggttttcggagggcagaggtctggagttaaccggcgatagtccggtgatggacctttcctcagacaagcagtcacgcagacccatcggacaggttgtagacagtgctgacctagcatactggagcagcacctttaagcagctcaagcatagcgccggccctctacctagatcctccttttccacgagctttggcttgtactcttttgcttcgtgcaacgagttacagttggcgtgccacaacatctgtcccaatactttcgacctggatataagctctattagtctgtgtataggcatttctccaagtctgttagtgtctatgtccaacaagcccgaggatcactacagaacctatgaaatcgggaaaaagaacggggggacacggatcatccattcaccacgcatttttcttaagacagtgcagtattggatcaaggactatatcctgcattcgctcaatattcacgatagttgtcacgcttaccagaagaataaatccatacagaccaacgccagtatgcacctaaacaaaaaattcctggcgaatgtcgacattaagaatttcttcgggtctatctcccaagaaaaattgcagaacacactggccactcgttactccaagaagatgagccaatgcatctctaggctgtgtactatcaataatttgctgccacaaggagcacctacttccccggtgctctcaaatttctacctgagcgaatttgatgccaaagtcgagactttctgtcaccatctgcagctggattacacccgatatgcagacgatctcacgatttcaggtaactacaaggacaatgtgctcaaggccatagatttcgccaaagacaccctcaatctctacgaactgaagttgaacgatagcaagacccgcgttgccagcaaacacggacagcagaaggtaacaggggttgtcgtcaatgagaaaatgcagccccctcggaagtttaggaaaaaaatccgagctaccttctatcaagcaaagaagatactcgccatcattcctactcggaaaaagagttgcgaggacattctcgtgatctga

SEQ ID NO: 14173 - RNA, 1476 nt, synthetic construct
  source 1..1476: mol_type = other RNA
atgacacagattcttaatgccccgagcatcattatggcgttaggggtcctacagcctgccactaccttcgaggtggtcggattcctgaagaccatgctgcctcacgccggcactctgccacaaccggatgaggttttggagttttttaaggaacgcgaggccgctggacatgtactgagagtagcccgaggcgatggtgggaccagtctgtacgcactgacgctggcagggcatagatacctgaacgtgagacagagacaggttcgggacaaactcaggttttacctgctccgtgatgctcgtcaagcccgccgacgaagttccgacggtgaggctagccgtcttgtgggagcttctcccacgttggacacctcctcacccataaaagggtctgtggcgaacaaatacggtcaccatgtgcccccaggaagaacctactggcccaggatatcaaggcagttcggagtctcgaccggcctgagcgcttcatccagcgacaccttccctgagtggctatccttccgggatcagcgccagtgcgaactggctacaaactttggcgaggggcagtttgaactggactttgagggcctggcagcatgtctgggcgttagtcctaagatcatctctcagattgcatccagcccaaataggcattatcggtcgttcgaaatcgccaagaagtctgggggttccaggacaatttcttctccccgagtgttcctgaaggtgattcagtggttcctgctcgactttatcctgactagcctgccagtacatcacgcagtgcactctttcagcttcggaagatctgtggtaaccaatgcccagacccatgagggacaggcctttgtcggctcattggacatcgaagactattttggcagtgtgactacgtccgcaatctttgagcttctagtcggctcagggttccgaaatcacgaggcccggctcatagcacgcttgagcacaaaggatgggggtcttcctcaaggagcccccactagcgccgtcttgtctaatgctgtgctgtatcccttcgatgagcaaattaataaagagtgcgcccgggccggtttaacatatacaaggtacgccgatgatatcacaatttcaggcgcggacaggagagaacttctgagggtcatggccctggcggagggccttttggctaagcacaatctccacgtcaacaaagaaaaaacccgcgtggtgagccagggcagtcaacagcgggttactggagtcgttgtgaaccaaacagctaagcctagtcggtatttcaggagattggtgcgcgccaaatttcacaacgcagctctcagtgaagaccacaacaaggttaaagtggaacagctatccgggtatctttcatacttacagatgtttccatccctcaagggctccaagctcttcgaaactctcgctcatgacttaagccgcgcacggcagaaagatccgccaatgctcatctga

SEQ ID NO: 14174 - RNA, 1125 nt, synthetic construct
  source 1..1125: mol_type = other RNA
atggtgggagacgcgcctacgctcgagagtagctcatccattaaaggctgcgccgcaaataactttggtcactcagttccccgcgtgcggacttactggccgagaatctcccggcagtttgatcggtccaccggactctccgcaccatctagcgacaccttccctgaatggttatcttttcgaaataggaggcagtgcgagctggctgtgggaatagaacgcgggcagtttaagttggattacgaaggtcttgcggccagcctgggcgtgtctgtgaagattgtttcgcaagtgagccgccggccagctagacactatcgatcattcagcatccagaagaagtccgggggtgaaaggaaaatttcatcccctcgcgtgtttctgaaggtgatgcagtggttccttgatgacttcatactggatggcttaccagttcattctagtgtccattctttcgtgaccggcaaatctgtggccactaatggaaaactacacgtatgccagagttacgtgggttcaatcgatatcgagaattactttgggagtataaccaaggcaatggtccagaggctgttgctggagaacgggttcctcgacgacgaggtcagtctaatttcagccttgactaccctgaacgacacactgcctcagggagcccccacttccgctacattaagcaatgctattctgtatggcttcgactgtgatatggcaatgtcttgtgaagaggccgggcttgtctatagcagatacgcggacgatatcacaatctcaggctcttcgagagaggctgtagaacgcgccctctccagagccaaacggcaactcgctaacaggagcttcaggacaaaccccagcaaaacacggatcgtgagcgatcgtgccagacaagtcgttacgggggtggtagtgaatgctgtagcccagccatcccgcacctatcgtagaaacgttagggcaaagttccacaacgcagctaaacagaaaactcccgcaggagtcgaaattagggccctggcgggccatctcgcctacttgaagatgtttagttcccttaccggcagtcgacaaatcgcagccctggagcgtgacctgcgaaaggtccgggctaagaagcaggagtga

SEQ ID NO: 14175 - RNA, 1467 nt, synthetic construct
  source 1..1467: mol_type = other RNA
atgaaaaaagttttaaacgcaaaaatggccttgctggcgctgggggtactgcaacccgcatctgctagggaagtgcgtgccttcctcaagttcgttttccctgagtccgggacactcccagacgtcgaagagtttgagcaatttctgagagaacaggagtcagtgaaccgcgtggtggaagtcgagcgtcggacaatggcctattattctctgaccctcctagggagtctgtacttaccaccagacattagaaagaagcgcgataaatttcgagcttatcttctgagggacgcccgcaggggtcggtttatcgagtcgagggagcttgggactgagctggcgggagttagccccgctagtgatacctccaccatcgtgaagggccgagccgcaaataatctgggtcggagttcatttggaagacggtttgcaaacggccaggcatactggccgcgaattcaggggcagtttattacgcgaaccggacctactaggagatccagagacacttttcctaatttgctttccttccaggatctcgatcaggctaagagggccaacggaaatgtgttctgcttcgactacagcggaataggcctgtgtctcggcctgtccccgcaacttgtgtggaatatctctcgtcgccagagctctcattacagggcctttcctgtagccaagaaggggggcggtacgcgcctcattgaatctccccgtgtcttcctcaaagtgatccagtggttcctaaacgactttgtcctgcacagactgcccgtccacgatgcggtacacagtttcagatttggacggagcattgccacaaacgcagagtgccataaacggtccatgtttgtgggcaacgtagacatcgagaatttcttcggtactattaccgaaggggctatcatctccctgctgacaaggaataacttcgcccctttggaagctatggcaattgctaaattatgccctaattggggcgccttgccacagggcgctccaactagtcctatcattagcaacgcactgctgtatgatgtggacaagaagatgtcggccgtgtgtgaggcgagaggcttggcttacacaaggtacgccgacgacatatctatttctgggccacggagacgcgacatcgctgatgcaatcagaatattcgaggccgccataagcgatttcggattgaagatcaaccaggagaaaacacggatcgcccaccggtcagggcaacagagggttaccggagtcgtggtgaatgaattcgctcagccctcccgcgcttttcgcaaacttgtcagggccaagttccatgccgcatcagtgagccccgataagggcgttcgaatgatccccgaactcggaggtatacttggctacctaaagatcttcccgtcaatgcaacagcgacgcgagattgccagctatggcgcgatcattaaatttctcaagagccagcggaccgaatga

SEQ ID NO: 14176 - RNA, 1644 nt, synthetic construct
  source 1..1644: mol_type = other RNA
atgcgcactgaagaacctactgtctggccattcccgtctgtgaagagacgcaccctgctgagggccctgttgtacggtgccgcctcaggtgcagcccttggtaccttgggattgagccccagagccggagagctcgcctctgaagagatcgtgctcaccatgctcggcatcctacagcccgcttctgcggaagaggtgttctgcatattagagctgttgcatgacgcagctgccgctgagggcatggctctcgacctggaacggcctagagctggcgagatttctgaagcagttgaggccctccagcgtcagggcgcaatcttgccagtgcaggccaacccggttcgccggtattccatgactgcagctggtaatcggagactgagccctagactgcgcgctactagagacaccacccgtctgttcctgttgcacggccccagggccaggatcatggagatgagcagggaaggaagagagggggagtctggcggagcatctcctccatcaaatttgcgtagtctaatagactcactagggaggcccttaggcagcacagaggatgatggcaaccaacctccaacccgcgcatggcctgtggctagacatcggctgtggtctaggcactgtcgcacttcaccactggctctttccagggacacttcgctccgctttctgtccttcgattcgctcgaacagctgaggctggctggagggaccagcggaatggtgtcccgactgcgattgtcacctcaaggcatcgccctcagtttaggcgtgtccctgcagtttcttcgatggctccgagacacacgctacgataggcattaccggtccttcgctatcccgaagagaggggggggcaaacggtggatagagtccccacgtatttttttgaaggtgacccagaggtttgtgctccaccatatcctgagtggccagcccgtgcacgatacagttcacagttttgtccctgcagttcaggcgggagaacttaggaacagcattacaaacgctcggagacatctagccaaaccctacgtcgccaagattgacatcaaggatttctttgggagcttaagaggatacctggtcgatcaggccttccaggacacagcgctcctaaatgcggacgccaggcgtctgctgagctcactgtgcacgcggaggaatgctctgccacagggagcgcccacatcccctatgatatccaatcttattctgcggcgattcgatgaaaacatggcaagactgtgttctgagctggaccttgtatatacgcgctacgccgatgacattacaattagcggggccgtacgcgaagatgtcgagctggccgcctggtttgccagaaaagggctcaccggagagcccctgactctgccagtgaacgaagacaagagtcgtatccttagcgcaggtcaacagcagcgcgttacgggcgtgatcgtcaatgagcggggtcttcctccccgacggatgagacgcagagtacgggccatgttccaccaagccgcattagacccagcacggcttagggaagagcgagcgaggctcggggggtatctggcttatttccgggcatttcccgattatccgagtggcgagttagctcgatacgcccgcgtcctcgctcaaaaatga

SEQ ID NO: 14177 - RNA, 1500 nt, synthetic construct
  source 1..1500: mol_type = other RNA
atgtcgctggctaccattcagatcggctgtaatttcccacctgagttgaatctcgataaagataaaaccactgtggtgtattggatcgcagctatcctacagccttcggataagtctacgattctgacgttcctcaaaagcatccaggatcatatttgggaaaacatctctcaggacgatataacccacagcttaaattatctctgcaagcagcagtatctcctaaagctcagcattggattgacagattacttcagtatcaatccagctaaacacatcaaacttagcatcaatgagcgacttaacaaagacaggatacgcttctttttactgaattgcggcaaggccgacaagtttcaaacagtaaggagaaactgtaaaatcaaggtcgacggagtgccaccctcttttgaagaacgacttccgatccagttgagagtcgagatccgcggtcggaggagtcaacccattatcagctcctgggttagtttgttagagtccaccctgttcacagtcagcccatccaccacacagttatcccccactcacaagtctctgtcatatcccaactacaacttcattgaccacattgacgcggatttgagcccccacatgacggttagacatatcctagctgcagatctgggtatcagtgtgcaactgatctctcggattcttgcaaacaagacccagtattacagaagttttgagatcattcggaagaatggaaataagcgcctgatcgaggcccctaggacttacctgaaggtgctgatgcgatacattaaccatcatctgctgacagggctggcgatacacgattccgtgcactcctatcgccagggcaaatcttttctgaccaatgctcagatacacgtagctaagcagtacgttttcaatctcgacatagagaactatttcggctgcattaacaaaagacaagtgagggaactcttttccataaatgactttacagcctcagccgccactctgctctcagaactgtgcactttcaacgaccgcttgccccagggtgcccctactagtccaattatctccaatgcgattctgttcaaaatcgaccagtccatgcatcgttactgtgaaaaaaacaacctctgttatactcggtactctgacgatattacactgagcggcaactcaagacagagcattgtcaaggccaagtctcgactaatcgcaatgatacatggggcagggttcaagatcaacgacaagaagacccggctgatgccttatcataagcaacagttggtgacaggagtggtagttaataaagaggcaaccccggcccggaatgaacttagacggataagggccaaatttcaccaggctgcctgctcatcacagctgccttacgctacccgttcacaacttctggggtatattagttacctcagccactttgagaaatacaggaacagcgagctccttcataagtactcccgcattatcgaaaacgtctcttttgtggcctga

SEQ ID NO: 14178 - RNA, 1458 nt, synthetic construct
  source 1..1458: mol_type = other RNA
atgacagtgacactaaatagggggttcatcctgtgggcagtcggggtccttcagccagtggcttcaggagagctcttgtattacatggaacacgttttcgagaatgcgggagcgcttccctctgagaatgatcttcactcatatctcgttgaagccgccaatgtgggccaattaatccggattatgcgggagcctgatctcttcagtctgactatacaggggaacagttatttgtccagatcacagcgcatgagcagggaccgtgaaaggatattcctcctggctgacgcttggaacgggcggaagttgacctcccgggaggagcaaactaccgagtctgggggtgtgagtccacctctgctgcagcgcactaccctggaaggtacgggcgccaatgaatgcggcccgtctgttccacgcggtcgaacacactggcccagatacagtaaacagctgactaaaaccaccgggtccagctcatcatcccgtgacacctttatcaatttcctaagcttcaacgacgctacgcaggtgaaccttgcaagaagagcttctggccgcgccattcagcctgatgccgtaaacttggccctcatgatcggactaacgccacgactgattagccagattattgtgaggcccgatagacactacaggtcctttcccatcaaaaagcgtacaggcggtgcgcgcgaaatccatgcccctagagtcttccttaagaccatccagcggttcattgtcgactatatttttcatgtgctccctcaacatgacgcggtgcacagttttcggaacgatagatccatcctgtccaatgcacagtgtcacgtaggcaaacagtgggtggccgggatagatgtggaaaacttctttggaagcataaccgagcgccatatcaattctcatctgagctctatcgggcttgacgcaccctcagctaggactctggctaagctggccactttgaatggagtgctccctcagggagctccgaccagtccaatattatcgaacagcgtgctgtacaactttgatgagttgatgtcggccgaggcagagaagcaatctttagtctacacccgatatgccgacgatatcacaatttccggatcctctatcgattgtatccgcagcctgatcgcatgcgctacactcttactgaatgacatgtacggtttggtgattaacgacaaaaagaccagagtactgagccggaggagccggcaggtggttacaggagttgtcgtaaatgacgttgctctccccccacgcgacctgagacgtcgaatgagggccgcctcatataatgcaactaaagtggagggcgtcaacgtggaagccctgaacatgcttaggggctacctcggctactttcaagagtttcccgacctggtcgataataaggaatttacagatttccggaagaacctgggcaacattagggcacgattctga

SEQ ID NO: 14179 - RNA, 1470 nt, synthetic construct
  source 1..1470: mol_type = other RNA
atggacagtttcatcggacatcagaccacactgtgggctatcggcgtcctacagccggtgtccgcctcagagctggtcgattattttaaggctctccttgacgacgccggcgatctgcctgatagccgcgagctccagcgtttctgccgcgatgcttctaaacgcggactcgtggtgagagtaagacggcgtcctgacctcttttccctgagcctgaagggcaatcggagactgagccgtgagcaaagactccttcgcgaccgagcgcgactgttactccttaaagagacaaagaagtcccgggtgcacgtgagccgggaagtccaagctaccgaactcgggggcgcttcaccatccgaagatgcatcttcaacaagccagggtgggagtgctaacaaaagtaggcctttagtgccaagaggattagcctgctggcccagattatcaaaggagctgctgataagacccagtcctgcctcacgagataccccccttgacctgctcagctttatgacatgggcccaggttgcaatcgcatgtggcaagacccaggaggagctgactttggattgtcattccatcggtatgatgctcggcgtcagtcctaaactgatccaacagctggcctgggatcctgagcatcactatcgcagtttcgaaattcccaagcgagccggcggtttgcggactatcgatagcccacgcgtcttcctgaaggtcattcagaggtttcttgcagactacatactggttcatctgcccatttcctccgcggtgacgtcgtaccgaattagaatgtctatccaggagaacgctcggccacacgtgggagccgaatatgtggcaaactctgacatcgaaaatttcttcgggtcaatcaaacacggtccaatcgtgaatctcttaatgcataacgggctaagggcatcttctgccaaactgattggagatctggttaccaagaaccgtagcctgcctcaaggagccccgacttctccgcccattagcaatgcgttcctttacatcttcgacgaatttatgttgtcttactgccacaccgaaaaggtgtcatacagcaggtacgccgatgacattaccatatctgggaataatcggtccgctatagaagacgccttggccatggcaaaaaccaaactactggtagagtatggcttgcgccttaatatggccaagacaagaatcgcatctaaacatgggcaacagaaagttactgggctcgtagtgaacgaaaggatttcaccaccccgcgtatatcggcgcagggtcagagctatttttcacaaggccaggctgaacaaacaggttaatgttgaggagttcaggcggttgaggggctacctcagttatttgaagtcctttgacgctctgcggcactccagtgaggtgcaggagcacgaatccactctatcgaagctgagcataaggagcacaaacgcggacacggtgtga

SEQ ID NO: 14180 - RNA, 1461 nt, synthetic construct
  source 1..1461: mol_type = other RNA
atgaagacaaagctgaataccagcaacttactgtgggtgattggggtgctccaaccagtgagcgccgaggagatcacgagttacctggccactgtatttgatgatgcgggaaccatgccaaaagggaccgatattcacaagttctgtagagagcagacagacaaaaaacacctgatcagagtcgcccgcgagcctgacctcttttccctgactcttctaggaaaccagtatctgagcgacgacctgaggaaaagtcgagatcggtcccgtatttacctgcttaaagaggcctataaggctcgcctgaagatgctcaggggggtgaaggcaactggactggacggtgctgccccttccgcagatgtacgcccaagtaagaaaggccctgaggcgaacaaattgggccccgtggtgccgtcaggccaagcttattggccacgattttctaggcaattgtcagagcagactgggagtctgcccacctccagggacacaccgcttcctttcctgtcattcgccaatagagaacagctggctgtggccataagaagcaagggcgaagcaggcagcattaatttcacctcccttggactcatgctcgggattagccccaagttgattcagcagattgcacaccatcccgaccgccactatcggagcttccagctgaaaaaagcatctggtggcatgcgtaatatcgagagcccacgggtctttctcaaggttattcagcggttttttctagactacatactgtcggatctgcccgtggatgacaacgtatattcattccgaaagaactactctatcgctcataatgctgaaagacatgtgggaaagcaattcgtcgccaatatcgatataaagaacttcttcgggtccatcacaagcgaaaaaatcctcagtctcctgcgcaaacatggcgtggagcagaggtccgccgtactaatcagcgccttggtgacaaaggaaggcattcttccccagggagcagcaacctctcctttactgtcaaattccctgctgctggaatttgactcgagaatgtcacgtctagccgaaaacgcttgcgccaattactcccgctatgctgacgacgttactttttccggcaatgaccgcgatgtcatcgctaatttgataaaaacggccgaaatcgagctgttacacgattatggactccagttaaacaaagacaagaccaggatagcaacacagcggagtcagcaaaaagttactggcctcgtcgttaacgagaaagtgtggccaagtcggaagttccgacggcagatcagagctgccttcaacaacgcgcggaagcaggaggccgtcgataagaagagacttgaaaagcttgccggttacttggggtacctcaggtcttttgacgttatgaagggttcacccgatttggtcaggtactcttctatcttagcatctctgaccgtggcgcctgattga

SEQ ID NO: 14181 - RNA, 1443 nt, synthetic construct
  source 1..1443: mol_type = other RNA
atgaagaatgcgcggatcaacgagagtctgcttctgtgggcggtgggggtgattcaaccagcctctccgggcgaggtaattgccttcatcgagcgcgtgacccagtctcagtttcccccaggtgtgttagagggggtaaccgcccagtgcagccactatgtggctcgcggtctgcttagggaagtgaataagcgcagaaattggtactcgcttacttacgaggctgaactccggataccgaaacggttgcgccggcgaagggacaggattagattattcttactgaaaggggcaagagccgcacgaatgagggctgtgggcgtccctcacacacagaagtctgttgacgtttcatcaacaagtagaaccagtgggggcgaagacattcaggaagtgccccgacccacgaagtcgtttggaaggggcgagcgcgctcaggaacgcttcccatggcccagaatcttcgaacagatatccgacgggagcggatctgctaccggtacaccaacacactcagatagttctaacgccaccaacccactcgcattctatacattttccggtcggcaccgcgctgctgctgataacccttatcctcttaacgtccgtgaacttggtttggccatcggcgttagtgcaaggctactgacttccatcggaaaatttcctaatcggcattaccgaaggttccagatacctaaggccaatggcacgaaccgagatatcgcgagcccccgtattttcctgaagactatccaatattggatcaaagactacctgctctaccgcttgcccgtacatgagacatgctatagctttatcagcggggtgagcatcgaggacaatgccgcctgccatgccggaaagaatttcgtcgcaaccatagatattcgggacttctttggatccattaccctcgagaacgtacagactgtgatgagaagagccgggcataccatatcattggccaggatcgttgcaaagctcgtgaccctagatggatctctcccacagggcgcccccacctcacctatcatcagcaacagctacctgttcgacttcgacagagctatgtccatgtggtgtgctaaacgtggctgttcctacactcggtacgccgatgatatcaccattagtggcgaaactcgctccgaggtccagcggtgtgtcgaccacgcagagtatcgactgaatcgttatgggctgaggctgaacgagggaaaaactcgcctgcaaagcaggggtgcaagacaggtcgtgacaggactggtggttaacgaattggcgcagccttcacgggagcaacgcagaatggtccgggcaatgctccaccgttaccaaacgggcattatgagggagcccacagatattgccagactgagaggctggatttcttactttcactcctttgaacatctgagggaaaagtttccacggatctga

SEQ ID NO: 14182 - RNA, 1434 nt, synthetic construct
  source 1..1434: mol_type = other RNA
atgagccatacgaggatcaatgaatctatcctcctgtgggcaattggggtgatacagcctggttcaccggccgaggccatcgagataattgaaaaagccaccaagtcaaagctgcctcctgggtccgcggagggaattactttacagtgcgagcactatgttcagagaggcttactacgccttgtccacaagaaaaagaactggtacagtctgacgcacctcggcgacgtgtctataccaaaagtactccggaggaggcgcgaccgcattcggctttttctccttaagaatacttggcagagtcgtatcgctgacgtgggtgcacccgtcatgcaaaagtctgtggacgtgtcctcaaccatgcagaactccggggagtacgtacaggaggttccccggccaactaagagttgtaacagaggggaacggggccacgagaggtttagatggccacggatatatgagcagatgaccaagggtagtggaagcgccaatggcgctcccacacccccagtgacacctaacccgctgaccttttatacattctcgggtaaacaccggggcgaaatcgagaacccatatcctatcaatgcccgagaactgagcctggccatcgggattagcgcccggctgattacatctatcgcgaaaatccccgaaaagcattacagacgcttcaagatccccaaagccaatggatcttttcgtaatatagctagtcccaaactgttcttgaaggtgatccagtactggctcaaggactacttgttgtttagacttcctattcacgaaacctgtttttccttcatcaaaaacgtcagcattgaagataatgcttcccctcatactaagatggcatatgtgggcaccattgacatagaagattacttcggatccatcaaggtgaccgccgtccaatccgtgctgaaaagagcaggattcactgcaagcgcttcaagaatcatttcgaaactcgtcacattggatgatgctctgccccaaggagctccaacaagccccattattagcaacacgttcctgtttcgattcgacgagttcatctctaggtggtgtaagactcatgaatgcacttacaccaggtatgcagacgatgtcaccatctctggcatgaacaagagctccgttcttcagtgcatagatcgagctgagatcctactgaaccgttacgggctgaaactgaattcaaagaaaaccaggattcagtctcaaagtacacgccaggttgtaacaggcttgaccgttaacgagctcgcccaaccatcccgcgaacagaggcggaaagtgcgagccatgcttcataattaccagatcggaaagctgaacgatcctaaggagattcagcgcttacgaggctggatcagctattttagatcattcgaccacctcaaagagatttttcagatgccggcgtga

SEQ ID NO: 14183 - RNA, 1458 nt, synthetic construct
  source 1..1458: mol_type = other RNA
atgagcctgccgagaataaatgagagccttctcctgtgggctgtgggcgttattcagcccacttctcccctggaaattgtgcagttcatagagtacgtgacaagggggacagtacccccaggtacactcgaagggattgagcaacagtgtcagcattatactaaacgcggattgctgcgaagtgtgtccactaggcacaactggttttcactcacgtatgcaggtgatgtaagcatccctaaggaaatgaggcggagacgcgatagaatgcgtctgtttctactgaagaaatgttggcagtcaaggatccaccatgtgggggtgccacgctcccaaaaattgattgatgttagctctatcagtcagcattccggtaaagatattcaggaggtcccccgccccacgaaatcatccaatcggggggaacgaggaagagaaaggtttcgctggcctcggatctttgagcagatcccaataggatctggttctgccattggcacacctactccgccgccacctaatacccttacattcttcacgttttctgcacagcaccggagtgaagctgcgggcaatccctatcctattaatgccaaagagttggcactgggaataggcgtgagcgccaggctgctgacaagtatcgcaaagactcccgagaagcactaccgtaagttccagattcctaaggccgacggcagccacaggaatattgctagtcctcggctttttctgaaaatccttcagtactggatcaaagactacatcctattccgtctcccaatccaccagtcctgctacagctttctccccggggtgagcattatcgacaacgccaccccccatatcgggaagaacttcgtcgccaccattgacatcgaaaacttctttgggtccatcactcagcagggcgtgcagtccctaattgtgcgggctggctataccgccgccttagctcggataatctctaagcttgcgactttggataacaccctccctcagggagctccaacctcgcccattatctctaatagttatctgttccggtttgaccaatcaatatccgcatggtgcgccagactcggatgtacatacacacgctatgctgatgacatgactatctctggaaccgacagagtgacagttaataactgcctggagagagccaccaatttactcaaccgttacggtctgaagctcaagagctccaagaccagaatacaatcacgaggcggacgacaagcagtcaccggcctggttgtaaacgagattgtccaaccacctagggaacagagacgcctgatccgatcgatgatcgataggtaccgcagggacttactggacccagcggaccttaccaaattgcggggctgggtcagttatttccagtcattccaccatctgaagaacaagtacaactacgatgagatcagcgacttggagaaggataaaatttga

SEQ ID NO: 14184 - RNA, 1560 nt, synthetic construct
  source 1..1560: mol_type = other RNA
atggcaatcgcaattaatcagaacctcctgctttgggccgtcggaaccattcagccagctaacagcgatgaggtagccggtttcatttctcacgtaacccaggactctatcccagaagacattcccttcttcttcagggaccagctgagacggctggccattgaaggcctagtggttcaggtcagccaacgggagggactgttctccctcaccgaaagagggaatgaccgtctcagctctgaactgaggcggttacgtgacaggatccgactctttttactgaagaaggccaagaacgtgcggaaagcccctttgggggaccgccaacaaatgggtggcgccagcccgtccggctcagaaaagattcttcttaaggaggtggcaagacccatccgcacaaccgctcttccccacgggaggacgaactggcctcggatcggtaagcagttcttgcatcgcaacgtcgagagaagtccaagtatcccccccacaccgaccttcccggctaatcgagtacggttttactgcaccgatgggcctttcgatggaacgactagtgaggtgaactggctggcgctggcaataggaatctcgcccaggctgattactagtttcattcacaagtctgagaagcactacaggcattttcccatcgcaaagaaaaatggcggcgttcgcaatatcgatgctccacgggtgtttctgaaaaccgtccaacactggattctggactatatactggtcgatctcaactcacacgctaaatgtttctcctacaggcgagggtttagtatagaagataatgccgcaattcacagtcagcagggattcgtgtacaatattgacatcgagaactttttcggctccatatccacgtcagccgtgaatcagactttaaccaaacagggaattcctcccaaactggctaaattgttaagctacctctgtacattcaaagggtccttgccccaaggtgctccgacttccccagttattagcaacagctacctgtatgactttgatgtgttcatcgatagaatatgttaccagcttggctgcaactatagccggtacgcagacgacatcaccatctcagggaatgaattttctaaggttggagagtgcattgccgccgccgaacaacaactccgcctgttcagactgaaaataaacacagccaagcgccgtgtgcagtcaaagaacacacgacagctggtgacaggtttggtggtgaatactgatccaaaaccacctcgcacctatagaaggcagatcagagcgtttttccatcagatcaagaatgtccctaatgttgaccccaagggccagctatgcaagatgtacggctactattcctatttgtccagctttaaagctctgtctgagaacaaggagctaatcggctataggcgacagatcctggagtttaagtcaatccatttccctatcatgcatatgcactctaaagatatggaagagctcgacctttttactcagcctgcgactataacagagacagattcgttttttgaactcccagccgagccagctcctaactga

SEQ ID NO: 14185 - RNA, 1497 nt, synthetic construct
  source 1..1497: mol_type = other RNA
atgactgtgagggtcaattctcaactgattatgctttcactgggcatcattcagcctgcgagcccttccgcggttgctaaatttttgagcatgtccttgctagagaattcagcccctattgaggagcagattctcatgcccttattcgagaagtggggggccgagggactgatagtgagggtgcatactaagctcaagctgttcagcctctcaagtaaaggcaaccatatccttacaaaagaaatgcggcacctacgagacaacactcggctgtttctgctcaaggaactgagagacggtactttggcacccctgggtgagcttggaaaagaagaacttacggacgcctccagcgtgtcactaatcgatctggtgatccaggaggaagagcgtccaatcaatcccgctgtgaccttgggcaaggcacagtctgacgggcgcgtttactggccgctactcgccaaacagctgttcgtcggttctataccacagtccccatctccacgatttagatacggctcgtttcagtcgttagatagctgccatatggctcatccctatggcgcccaggaaaatgatttcaatctcattgacttgtcgttgtgtatagggatttccccccgtcttctgtcctccttcctgtattccagcgagcaccattacaggctgtttgacatcgctaaaaaaaatgggggcacccgtacgatacgaagtccccgcgtaatgctcaaaacagtgcagtattggatacttgatcacctcttgcacaagctgcctatccacgatagttgcaagtcctacagaaaggggctgtctatcttcgacaacgctaaaagtcactgtgatcagaactacgttggcaacttcgacatcaagaatttttttccttccattaccaccactagactcactaaccacttcaggctgcatggatttccggagaatgcaagcaggctgatcgccaagttactgaccgtaaacaatgagctgcctcaaggcgctccaaccagccccgtcgtcagtaattcttacctcttcaaattcgatgaagtcgtgtctaacttctcaaagaaccttgagctgaattattctcgatatgcagacgatgtaacaatcagtggggccaagagatctgacattcacgcggttatcgccttttcaaccaacgagttggcccggtatgagttattacttaatcccaagaagaccaggattgctggtcggggcagccggcagatcgtgacaggactagttgtgaacaaggtggcccagccaccaagaacctaccgccgccaggtccgcgcaatgtttgataatgcaattaacaatcccgaagaattcagaagtcggctcagcgagctgtctggacacctgagctacctcggatcatttgaaaacctgcaaaactcccagagcatcgaacgctataaggagacactcaaaaaactgaggacacatctgtcagtgaacaacctgtacccgagtcctcaacaatga

SEQ ID NO: 14186 - RNA, 1464 nt, synthetic construct
  source 1..1464: mol_type = other RNA
atggcagtccgccttaatcctcaggctagtttgttatctctggggatagttcagcccgccagtccagccgaggttgccaatttcatcgaacagagcttattgaaggggaagagtaaggtggacctgaacgaactaaccctgctgtttgaaagatggaagacagatgggctgatccagcgtgttcacgctcgggagaacctttattcgctaagcgccactggcaatcattctctctccaaggaaatgcgccatctcagggacaaaacgcgcctgttcttgcttaaagacctccgcaacggatcaattagactgcccgaagaagcaaagagcgagctggctgacgtgtcatcggcctctttgaatgacctcgtgtctcaggaggagcagcgacccatttctgcactcaccccgctcagaagtacccacagaagggaacccgcatactggccactcttaggcaaacaacttctggtcggctcaacagtgcggtccagtggtacccgcttccgttttgggtcattcccgagcttgaaagcctgccatgccgcccacaaaaacggggcagatggtacggattttaatatctctgatctggcgctgggaataggcatttcggccagactgctctccagtttcacacacaatgctcggaaacactaccgggagtttgagatccctaagaagacagggggtgtaaggaggatctgtgcccctagaactatgctcaaggtagtgcagtattggatcctggatcacattttatacaaactccctgtacatagcgcatgctactcctttaaggaaggcgtgtcaatctatgataacgctgtggttcatctgaagagcaactacgtgggcaattttgacattaaggactactttccttccatcaccatggacatgctgaaagacttcctgattaccaacggttatggccagatcgcaagcaacataatctcccgccttactacttttgaaggatctcttccccaaggagcgccaaccagcccactgatctctaacgcgttcttgagcggtttcgatgaagaaatctccgtgtacgtcgctgagaacggcatgcagtataccagatatgcagacgacatcactatatcaggcgctgataggggcaagatactatccgccattgagttcgccacggagaagctgaaagatcttaatttcctgctgaacgagaagaaaacacggatcgctggaagggcctcccggcaagttgtgactggactggtcgtgaacgaaattgtccaacctacacgttcctaccggcgacaggtgcgagcaatgttccaccatgctagtaagtaccccgaggagtttcaggccaggacaaaacagctgggagggcacctcgcctatttgatgtcatttgagaatatccgagagactgcggctattagcgagtacaaaaggattctagtctctattaccaatccaagcccatga

SEQ ID NO: 14187 - RNA, 1500 nt, synthetic construct
  source 1..1500: mol_type = other RNA
atggaggagtctactaattataagctgcttgtttggggactgtccgtcattcagcctgccactcccaacgaagtcttaaactatttgactagcacgctcaacgacaatggcttgttgcctgatgtggaaaaaatgattcactacttcgagctgttagaccaactggggtacattcatcaagtgtctaaacgcaataacctctatagtctcaccccaagaggtaacgaacggttgacccccgcacttaaacgcctgagggacaaaattaggctcttcatgctggacaattgtcattctattagcaaacttggggtactagcatccactgatacagaaaatatggggggcgatagccctagcctacagctgaggcacaacctcaaggaagttcctcatccatcactgtcctgggcagctggcaccctgccaagttcaccccgacaagcctgggttaggatctatgagcagttgaacattgggtcgatgagctccgacgaagccagtacaccaaccacggctcggaatgccccgctgtcttttgtaggtagacttggattttccctaaactactactcctttaacaagatcgacgagccactcttcaataatgacggcgtgaccgccatagcatcctgtataggaatcagccccggcctgatcaccgctatggtgaaatctcctaagagatattatcgcaccttcaatttgcgcaaaaaaagtggcggcttccgtagcattctggctcccaggaagttcataaaaaccatacagtattggctgaaggatcatgtccttaatcgtctgaagattcactcatcatgctactcgtacagatcgggagtaagtatcaaggacaatgctatcaaccacgtgaaaaagaagtttgtcgccagtatcgacatcagtgattactttggttccataaacaagaagatggtcaaggactgcttctataagaataacatcccagatcacatcgttaataccatcagcgggatcgtgacatataacgatgtgctgccccaaggtgccccgactagccctataatttcaaacgccattctgttcgaatttgatgaggagatgacagctcacgcacttactctcgattgtatatacacacgatactcagacgacatttctattagcagcgattacaaagagaacatcgcgattttgatcaacatcgccgaagctaacctgctatccgcagggtttaccctgaatagacagaaacagaggatcgcgagcgataattccagacaggtggtgacaggcattctggtgaatgagtctatccgacccactcggtgctatcggaaaaaaattcgctctgccttcgaccatgccctgaaggagcaggatggatcccagctcacaatcaataagctgcggggatatctcaactaccttaagtctttcgagacgtacggctttaagttcaacgagaagaagtacaaagaaacactcgactttttaatcgcgttaaagcagtcatga

SEQ ID NO: 14188 - RNA, 1062 nt, synthetic construct
  source 1..1062: mol_type = other RNA
cgccaggcatgggtccgaatttatgaacaactaaacatcggcagtatgtcatcagatgaggcatctaccccaacaaccgctcggaatgcgcccctgtcctttgttggccgactcggattctccctaaactattatagcttcaacaagatcgatgagcccctgttcaataacgacggagttactgctatcgcatcctgcattggcatctcgccggggctcatcacagccatggtcaaaagtcccaagaggtactaccgcacatttaacttaagaaaaaagagcggaggtttcaggcctatcctggctccccggaaattcattaagaccattcagtattggttgaaggaccacgtgctgaacaggcttaagatccattccagctgctatagttatcggagcggggtgagcattaaagataatgctatcaaccacgtgaagaaaaaatttgtggcctcaatcgatatcagcgattacttcggcagcataaataagaagatggtgaaagactgcttctataagaacaacatacctgaccacatagtaaacactatatccggtatcgtgacgtacaacgacgtacttccacaaggggcccctacttctccaattatatctaatgccattctcttcgagtttgacgaagaaatgaccgctcatgcactgacactcgactgtatttacactagatactccgacgatattagcatctcctctgattacaaggagaatattgccatccttatcaatatcgccgaaaccaatctgctgtcggccggatttacattgaatcggcagaaacagcgcatcgcatctgataattcacgccaggtggttactgggattctggtcaacgagtcaattaggcctaccagatgttaccgtaaaaaaataagaagtgccttcgaccatgcgctgaaggagcaggatggcagtcaactgaccattaataaactccgtggttacttgaattacttgaaatcctttgagacgtatggcttcaagtttaacgaaaagaagtacaaggagacattagactttctgatcacccttaagcagtcttga

SEQ ID NO: 14189 - RNA, 1500 nt, synthetic construct
  source 1..1500: mol_type = other RNA
atggaagagagtacgaattacaagctgctgttatggggtctgtccgtgatccagcccgccacaccgaatgaagtcctcaactatctaacttctacgctgaatgacaatgggctcctgcctgaggtggagcgaatggttcactactttgaactcctggagcaacacgggtatatgcatcaagtcagtagacgcaacaatttgtattcactcactccccgcgggaacgagcgactgactccaaccctgaaaagactgagggataagatccggctctttatgctcgacaactgtcacagtatctctaaactgggcatgttggcatcaaccgacaccgaaaatatggatggagactcaccatccctccaacttagacataatagcaaggaggtgccccatccttcgcttccctgggctgctggtgcacttccgtcttctcctaggcaggcttgggtgcggatctacgaacagttaaagattggctctatgtctagcaacgaagcctccacaccaccaaaacggaaaatcagtagcttaccttccattggacggctgggattctctcttaactattacagcttcaatacactcgacgatcatttgtttaacaacgatggggtgacagctatcgccagctgtataggcatttctcctgggctgcttaccacaatgatcaaatcacctaagagatattaccgtactttcaatctgcagaaaaaatccggaggctttcgtccaatcctggcaccccgcaaattcattaagactattcagtactggatcaacgaccacgtgctgaacagactgaagattcactcttcctgctacagctaccggaagggcgtttccgtgaaggacaatgccatcaatcacgttggcaaagcctttgtagcatctatagatatttcggactatttcggttccattaataccaagatgatcaagtcatgcttctacaaaaacaatatcccagagcacgtcatcaacgctatcagcgggatagtaacatacaacgatgttttgcctcagggagcccccaccagcccgataatcagcaatgcgattctttttgaattcgatgccgagatgacttatttagccttgagacacaacagcatatatacgaggtattccgacgacattagcatttcgagtgacaaaaaagaaaacatcgatgagctgatccgcgtagctgaggccaatttgctttccgtcggatttaaactgaacgagaacaaaaggcgcgtcgtgtcaagaaacaataggcaggtggtgaccggcatattggtgaatgaaagcattaggcccactcgtacatatcgaaagaagattcgcagtgcgttcgaccatgcattgaaggagaatgataataaccagctaaccattaacaagctgaggggttacctcaactatctaaagtcctttgaatcatacggctttagtttcaacgagaagaagtacaaggatatcctggatttcctcctgaccctccaacagcggtga

SEQ ID NO: 14190 - RNA, 2154 nt, synthetic construct
  source 1..2154: mol_type = other RNA
atgcctggcaataaaggcgaacttatcaatatacggaacaaaggggatgggaatacgtttaacatcatccaaataaacggtggtaatgcgcccgatatatccaagcagctcggcttcctgggtctagacataatcgataatacgaaaaagtcactggtaagcgaattctcttcgggcaacaataacgtcttgctctgttatccaaataaggaagataagattctcgagcccataatcgagaaaatcaaagcgggactcagtaatattggagcaaatatctttgagggatcgggcaagacccagctcccagacgttcagggttatccccatattgctgagatcgatttcatcaagaatctgaagtgcgattcaatcatcattttcgtgctggacgagctgacactatctcaactcacactgttgagctactacaaaattgagagcaacatacagcatgttgacatcattgcaatacctagcgactcaattttcaactacgacaaattcctttccaacgggctgattcagtattgcgacgataataactgcaaagtgattaagctttccacactggatgatgctgaagtggaaagggtgattgccagggttaaaaataggaagatgatccaggcccgccggggcattatgctgactaaagccgacgcctatgactttaaccacaaactgtttatatgggcactgtcggtcattcaaccagcaagcccttacgaagtgatttcctatctgtctatcatactaaatgacaatggcgtgttgccggccaaggacaaaatcaacgagtactttaaagcactagctagttctgagtacattaatcaggtcagtaagaagaacaatctgtatagtatctctcttaacggtaacgaacagctcagccctgagctgaagaagctgcgcgataagctgcggatatatttgttagataagaccagggtggtatctaaagtcaaggtgttggcatcaacagaatccaaaaagatggggggagccagcccgtctagtcagcttcgcttcgtcctcaaggatgcaccacatccctcagtgccttgggcgcttggagcattacctaatcatccacgcaatacttgggtgcggatcgccgagcagattaacttcggatccatgttgtcagaggccagtaatactgaaacacacgtgaaccagacgcagcataccatctttcccctgaattatggcagctacaacagtatcgattacaacttaattggaaacacaggtccaaccattctggcttccctgatcggcgtctccccccacttaatcgccattatgagcatgaatcctgacaagtattatagaagcttcaagctgaacaaaaagtccggaggccacagagagatactggctccacgtaagttcatgaaggtaattcagtactggattaccgactatttcctctttcgactgaaaatccatgccagctgttactcttataggaaaggcgtcagtatcaaagataacgctattaaccacctgaacaacgagtttatcgcaaatattgacgtaatcgatttctttgggactatcaataaggatatggttcaaaagtgtctcattaagaacaaaatcgacatcaaactcgctaccgccatcaccgaaatcgtgacctttaaggggtttctaccccaaggcgctcctagctccccccagatctcaaatgccatcctgtttgactttgacaacaaaatctctgaagcttgctacgtgataggctgtgtgtatacaaggtacgcggatgacatcaccatatctgggtctaaccgtaacaatgttattaagatggtgaaatccgccatgcagtggttgaatgagtccggattctctgtgaatgacaagaaaactagaattagctccaaaaacagtcgccagatcgttactggaatactcgtcaatgacgttattagaccgactcgaaaataccgaaagagagtcagagccgctttcgaccacgcccttaaagacaatgatcactcaaaggagacaatttacaagcttagcgggcacctgaactacttaaaatcattccaacagtatgggtacgaggtgaacaccattcagtacgaactcatcttgaagtacttgaagcggaagaacatcctgatcaagatttga

SEQ ID NO: 14191 - RNA, 1497 nt, synthetic construct
  source 1..1497: mol_type = other RNA
atggaggtgaacacaaattttcgcctccttctatggggcgtgtcaattatccagccaagttcccctgacgaagtgctcggctacctgaaggctgtcttgaacgacgacggtctgctacctgaaattgaagtcatggaggactacttcgataagcttaagaaaatcggttatatcgaacaggtttctaaacgcaataacttattctccatcaccccccaagggaatgaaaagctgccacctcgcttgaagaaactgcgagacaaaatcagaattttcctgctcgataagtgctatatccagagcaaacttgagcgtctggcctcgactgagactgagaaaatgtccggtgatagcccattcctcaccctgagacacattttgaaagaagtcccacaccctagtctcccgtgggcgacaggaactcttcctagtagaccgagacaggcctgggttcgaatttacgaacagctgaagatcggctcgaccttcggagacgaggcgagcacatctatcacagacacctctccctcagaagtgaagaagaatattctgtctctcaacttctactcctttaataacctcgagcacaattactttaacaacaacggggtgacaatcatttcctcctgtattggggtatctcccgggttattaaccagtatgattaagtcaccagagaaatattaccggccctttgagcttaccaagaaaaacggcaaaaaaagggaaattctggcacccaggaagtttatcaaggtcactcagtactggatcgcagaccatctgttgaaccgcttgaagatacattcctcatgcttctcctacaggaaaggtgtgggcattaaggacaacgcctataatcatgtcggcatgaagtttgttgccaatattgatattacggattacttcggcacgatcaacaagaccatgattaagaaatgtctcctggacaataagatcccaataagtattgttgaggtgatatccgggcttatcacatattatggatacctgccgcagggagctcctactagccccataatcagcaatgccatcttacatgatttcgatgagtctatgtgcgaatcagccctgcacttcgactgtgtatacacccgctattctgatgatatcaccgtaagcgggaattctagggagaaagtctttcttctgacgcgggtggcagccaaactgctggagagaaggggatttagtataaacgaagagaagacacggattctgagcaccaacaatagacaggtggtgaccggcatcctagtgaatgaaagcctccggcccactcggaaatatcgtcgaaacgtgagggcagcttttgaccaagctataaaaactatggatacaagcgacgatactttgaattcactgaagggacacctgaattatttgaacagctttaagcaatacggcttcaaattcgaccacgagaagtatcagctcatcatcaatgagctgatcaagaacaaggatataaactga

SEQ ID NO: 14192 - RNA, 1461 nt, synthetic construct
  source 1..1461: mol_type = other RNA
atgttgttatgggctaactccattattcagcccgcatccccattcgagatatctcagtacctgaagatcatactggccgacgatggtgcgctgcccgatctggaatacctcaagcagtatttcaaagaattgcagaagaacgggtacgtggaggtggtaagcattaagaatgaactgtactcactgacccccgctggtgaagacaaactctcagccaaccttaaaaagttgcgggataagttacgtatcttcctgttagacaaatgcagggagtcctccaagttggagacactcgcaagcacagagacgaagaatatgggaggggagcccccatctcttcaacttcgcccctatatcaaggaagtgcctcatccatccctgagttgggccagtggcacactgccttcccgtcctaggcaggcttgggttagaattttcgaacagctgcgcattggctcaatgtcaagttctcaagcctccgcatttagcaagaatactggcctgtttactccagagaaaaagtatgtcgcagctcccctcttctattcatttaaaagcctcaacaacccgctcttcgataacaatggggtcctcacaattgcgtcctgtctggggctcacacctcgacttatatcttccatgattaaaagcccagaacgctactataggtttttcgagatgaagaaaaacaacggaggagtcagaaagattagtgccccgaggaagtttctgaaagtaacacaatactggatcaacgactatttccttaacaggctaaagatccacagttcctgcttctcttaccgcaaaggggtgagcatccgggacaatgcctaccctcatcagaattcaaagttcgtggctaacattgatatcgagaattactttggcagcataaataaaacgatgatcaaagggtgtctgctaaggaacaatatctcggaacaccttgttaatactatcgccggtttaaccactctgtttggaactctgcctcagggcgcaccgaccagcccaaatattagcaatgccattttgcacgactttgatgagataatgaccggccacgccatcgtgcgaagatgcgtctatacgcggtattcggatgacataactatctctggcaatgaaaagcacctggtcgaggagctcgtgggtctagctggaaacaaaatcaacgctattggattcgccctcaacaattctaaatatcgccttttgtcttacaacaaccgacagaccgtgacagggatcctcattaatggccatctgcggcccacccggaagtacagaagaaaagttcgggcgatctttgaccaagcactgaagagtaatgacagaaatcctctgaccctgagcaccttaatgggacacctgaactacctacagtcatttaagaaatatggctttcgtttcgaagaggagaaatacctgttcatcatccataagttgaagaactga

SEQ ID NO: 14193 - RNA, 1485 nt, synthetic construct
  source 1..1485: mol_type = other RNA
atgtcgaactctattaatttcagactcctactgtgggcaaatagcatcatccaacccgcatcgccactcgaaaccctgaattatctgaaactcctcctagccgacggcgagactctgcccgacatcgaatccatccggctctacttccgtgaactgcagaagattggttatttagaggtggtcagcatcaaaaacgagctgtattctgtgactcccgccggggaagataaattaactgccaatcttaagaagctgcgcgacaagttgaggatatttctgctagacaagtgtcatgaatccaccaagctggaaaccctcgcttcaactgacacaaagaacatgggtggagagagcccctctctgcagctcagaccatatataaaagaagtgccacacccaagcctgagttgggcaagtggtactcttccttctaggcctaggcaggcttgggttcggatctttgaacagctgaggattggatccatgtcaagcagcaaggcctcaagcttcagtaacagtattgagtttctcaatacagagaagaaacacatagcagcgccgctcttttactcctataagagcctgaacaatcctctgttcgaaaacaatgggattctgaccattgcttcatgcttgggcctgaccccgaggcttatctcctccatgattaaaaaccctgagaagtactacagattttacgagatgaacaagaaaaacggaggggttagaaagatttctgccccccggaaattcttaaaagtaacacagtactggatcaacgattactttttgaatcgcctgaagatacactcttcttgtttctcctatcggaaaggcgtgtcgattcatgacaatgcctacccgcaccaggattctaaattcatagccaacatcgatatcgagaactactttgattccattaacaagaccatgatcaaaaactgcttactgcgctgcaacatctccgagaatcttgtcaacgctatcagtggcttgacaaccctctatgggactttgcctcagggggctccaacaagcccaagtatcagtaacgctattttgcacgattttgacgaggcaatgacgaaccaagcactcgtgcgcaattgtgtctatacccgatatagcgacgacatcacaatctctggaaataagcggtacctagtcgaggagttggttggtttagcccgaaacaaaatcaacaacctggggttcacgctgaataattcaaagtacagactgcttagctataataatcgacaggcggtgaccggcatacttgtaaacggccctctccgccccacacgtgcctataggcggaaggtgcgtgccattttcgatcaagctcttaagagcaatgatagaaatcccctcactctgtcaacgttgaaaggacatttcaattacctgaaatccttcaagaagttcggcttttcttttgaggaagataaatacctgtccattcttgacaaactgtcaaagtga

SEQ ID NO: 14194 - RNA, 1488 nt, synthetic construct
  source 1..1488: mol_type = other RNA
atgtcaaacagcatcaactttagactgctcttgtgggccaccagcatcattcaacctgccgcgccgtcagaaatcctgtattatttgcgactcatcctgacagatgatggggcactgccaaatatcgatagcttaaagcagcacctaaaagagctgcacaagattggatacgtcgaactcgtgtctattaaaaacgagttgtactcgataaccccatctggagacgagaaactgagcgcaaatctaaagaagctgcgggataagctgagaatcttccttctggacaaatgtcataaaagtacaaagcttggggtattggcctccaccgatactaaaaacatggacggtgctcccccttctctccagttacgcccctatattaaggaggtgccgcacccttccctgtcatgggcttccggaaccttaccaagcagacctcgtcaagcatgggttagaatttttgagcagctccgcattggttccatgtcaagcagccaagctagtatcctgtccaaggacagtgactctctcatcccagaaaagaaaatcatcgcagctcctatcttctactcgtacaagtccctgaatagccctttgttcgaaaacaatggaattctaacagtggcgtcatgtattggtttgacccccaggcttataagctctatgatcaaaaatcccgatcgctattatcggatctttgacatgaggaagaagtccggcggggtacgcaagatcagtgctccccgcaaatttatgaaggtcactcagtactggataaacgattacttcctgaacaggctgaatatccactcctcttgcttctcttaccgaaagggaatttccatacacgacaacgcctacccacatcagaacaacaagtttattgccaacatcgacattgagaactattttggctcgatcaacaaaacgatgattaagaattgcctgcttcggaacaacatcagcgaacatatcgttaataccatagcagggctcacaacactctacggcacacttccacagggggccccaacttcccccaacatcagtaacgctattctgttcgaatttgatgagttaatgaccaatcaggccctggtgcgggactgcgtttacactagatatagcgatgacattactatctctggcgacaatcggcacctcattgaggaattagtctcactggcgaagaacaaaataaattctatgggctttacgctgaataacgcaaagtatcgtctattgagctacaataataggcaggccgtgacaggcatactgattaacggtcctctgcgaccccccagggcctatagaaggcgggtgcgtgctattttcgatcaagccatcaaatctaatgaccagaccagtcttacgattaatgccctgaaaggacatctcaattacctgcagagtttcaagaagtatggcttctccttcgaagagactaaatactcacttatcatagagaagctcaccaaaaaatga

SEQ ID NO: 14195 - RNA, 1494 nt, synthetic construct
  source 1..1494: mol_type = other RNA
atgagcaattccatcaatttcagattgctgctctgggctacctctattattcagccagctacatccgcagaaattctctactacctgaagttagtgcttgcagatgatggagccttaccggacgtggaaagcttaaagcagcacctgaaggaactgaaaaagcacggttacgtcgagatcgtgtcggttaaaaaggagctttactctctaacaccggcgggggatgagaagctgagtgcaaatctaagacaactgcgggataaactgcgaatttttctcctcgataagtgttacaagtcaaccaagtttgggctgctcgcctcaaccgacacaaaaaatactgggggtgaatcccccagcctgcaactccgtccttatatcaaagaggtgcctcatccatcactcccttgggcaagcggcacattgccttccagaccacggcaggcttgggtaagaatttttgagcagctgagaataggcagtatgagcagtagtcaagcctctacgttgtcagaggactcgaataatcataattttggcgactcctttgtcgcagcgccgaccttctatagctacaagtctctgaaccaccccgcctttgaaaataacggggtgctgaccatcgccagctgcattggtctgacaccacggctgatcagttccatgatcaaaaatcccgagcgctactatagggtatttgagatccccaaaaagagcggaggggcccgcaaaatatcagctccccggaaattcatgaaagtgactcagtattggatcaacgattaccttctgaacagactcaagatacattcatcctgtttttcttatcggaaaggtacatctatacacgacaacgcctatcagcatcggaacaacgacttcattgccaacatagatattgagaattacttcgggtccatcaataaaactatgatcaagaactgcctactgaggaacaatctttccgagcacatcgtgaacaccatcgctgggttgaccaccttgtacggaactttaccccaaggcgccccaaccagccccaatatcagcaacgccattctgtatgatttcgacgaaactatggctaaccaggcaaaggctcgcggctgtgtctatacgaggtatagtgacgacattacaatttccggaaacgaccgctactctgttgaggaactagtgggaattgccaagaacaagatcttctcactgggcttcaaaatcaacgaaagtaagtaccgattgctgtcttacaataatcgccagctggtcacgggaatcttaataaacggccctctcaggccacctaggctgtaccgaaagaaggttagggctatcttcgatcaggcgctgaagtccaacgattgccgtacttctacacttaacaccctgaagggccaccttaattatcttttgagcttcaaggtctatggcttcgagtttgacgaggaaaaataccagctcattatcgacaaactcactaaagaagtgcattga

SEQ ID NO: 14196 - RNA, 1488 nt, synthetic construct
  source 1..1488: mol_type = other RNA
atgactatctctataaattttaggctgctgttgtgggctaccagtataattcagcccgccaatgccaacgagatcctgagctacctcaaactagtgcttaaggacgacgacgctttgcccgatgaggcatccattaagaaatacctgaaggaattaagagagattggatacctggagctcaccagcgtcaaaggagaactgtattccattactccgattggcgacgagaagctgactgccaatctgagacagctgagagataaactacggattttcatgcttgataagtgctacaagtactcgaaactgatgttacttgcctccaccgacacgaagaacatggggggagattctccctccctgcagttacgtcatgacctgaaagaagtccctcatcctgggctgtcttgggcctcaggcactctgcctagccgaccacgccaagcttgggttcgaatatttgaacagctccagattggttctatgagctcttctcaggcgtccaatcttaaggacgatagccagaatcctccttccagcttcagttttacccctgccccgactttctacagctataagagtctgaacaatcccctgttcgaggagaatggggtactgaccatagcatcttgcctcggattgacgcccagactcatcagctctatgatcaaaaaccaggagaagtactatcgcgagtttgacctctctaaaaaaagtggtggcatcaggaagatcagcgcaccacgcaaatttatgaaggtgacacagtactggctgaatgactacctgcttaataggctcaaggtgcactcagcatgttttagctaccgcaaaggcgtgtcaatccatgataacgcactccaacacgtggataaaaaatttgtggccaacattgatatcgagaactatttcggaagtatcaacaagactatgatcaagtcctgcctgcttcggaataatttttccgagcacctggtgaacacaattgctggtttgaccactctatatgggacactaccacaaggcgcgccaacaagtccaaatatttcgaatgctatactctacgagttcgaccaaacaatggctaatcaggcgatggtccgcaagtgtgtatatacaaggtattccgacgatatcaccatctcaggagatagcaaaagcgccgttaaggaattaatcaacctggcacgtctcaagatctcatccctcggcttcaaccttaacgaccacaaattccggctgttatcatataacaatcggcagcttgttacaggcgtgttgatcaacggggctctgaggcccccaaggaaatatcgaagaaaggtccgggccattttcgacaaagccttgaagaccaacgataccagtctgctgaccataaatacgttgaagggccacttcaactatctctcaacctttaaagaatacgggtttaagttcgaagaagaaaagtacttgtccatcattaactatctccagaagaagtga

SEQ ID NO: 14197 - RNA, 1434 nt, synthetic construct
  source 1..1434: mol_type = other RNA
atggctaacctggtcaatttaaagacctatctgtgggccttggcaactattcagcctgcctcaccccaggaagctcacgctttcctgaaaattgtcaccaatattgagccagacatttacacagaggaggacctcaacgatgcaataaatcggtccatgaaactggagctgattgaatgtgtgtccaagaagcacaacatttatacgctgactattaagggcggagacttcctcggaaagaaactacgactcctacgcgataaaaatcggctgtttttgctgaaaaccgtgaaggatgcgtcactcaaaatcaaggatagcccggagcaaaacaaagctagtgtaagctcagctacaatgtttaggagtaccgtgaaagtagccccttggccagaaaactctctggtcagcggtccgttgccccagaaccagagagttttttggccccgtgtgtctgaacagctgagaatcggatccaatgcgggcgggtcattcctcaatctgaactactactctaagaacaagctccctaacataaacgacgacttcagcgccgtcgatcttttcagcgaactgattgggatttcgcccaggctgttatcttccttcatcaaagcccctagtaggcactataggacgtttaccctgcagaaaaagagtggccgaggtcacaggacaataaattccccacgcgttttcatcaaaactgtgcagtattggatatgtgactatttcttgtacaagctcaatcagcatgagctttgctttagctttaggaagaacctgagcatcaaagacaatgcccgaatacacctggggtcccgctacatcctgtgccttgacatcgactccttcttcgacaacatcaagacagaacatgtgcattcgtgtctgattgagaatgggttctcagaggatattagcagttttatcagccgggtggttactttagatggctgccttcctcaaggggctcccactagccctatcatctctaacagttacttgtacaactttgacaaggtgatctctgatttttgcggtcagaatggaatgacatattcaagatacgccgatgacttaaccataggcagtacggattacactcagctcaaatcctgtattcccttgatcagcaagcaactggcaaagtttgaacttaaaattaacgagcgcaagaccagaatcatatccaataataacgcccaaattgttacaggcgtgtgcatcaataacgagagactacggccatctcgtaaattcaagaaagaagtccgggccgcatttaacaatgccaagcttaacaacgataagtcttcgcttccacgcctctatggctacctcaattacctgtcctctttcgataatggagacaccccacataatatctccgagtataagagcatcattgactcaatcaaaaaggcattgtga

SEQ ID NO: 14198 - RNA, 1434 nt, synthetic construct
  source 1..1434: mol_type = other RNA
atggcaagtctggttaatctcaaaacttatctttggagccttgctactatccaacccgcctcacccgaggaagctcacgccttcttgaaacttgtgacaaaggtcgagagcgatatctacacttgtgaggatctcaacgaggcaattctaagggcaatcaagctgaacttaatagaatgcgtgagcaagaagcataacctctactctctaacggttaaaggcggagactttctgggcaaaacactgaggttgctccgtgataagaatcggttgttcctgctgaaaagcgtgcgagacgccaacttaaaaattaaagaatcccccgagcaaaacatggtcagcgcttcttccaccatcacctttcgttctactctgaaagtagctccatggcctgaaaactcactcgtgtcaggccccttaccgcagaaccagcgggtattctggccccgggtgtctgaacaactaaagatcggcagcaacagtggtgacagcttcctgaaacttaattactactctaagaaccgcctgcctgagatcaatgaaaatttttcccctgtggatctactgtctgagctcatcggaatatcaccgagattattgagctcttttattaaggcacctagtaatcactatcgcaccttcactatcgaaaagaaatccggacgagggcatcggaagattagttcccccagggtgtttatcaaaaccgttcagtattggatttacgactactttttgtacaagctgaatcagcatgagtgctgttttagcttcagaaagaacctcagtattaaggataatgccaaagtccacctgggcaagaagtacattctgtgtttggacatagactcttttttcgacaatatcaagaccgcagacgtcaacagctgcctgattagaaatggcattccatccgacattagtagtatcatctcaggaatagtgactctgaacgggtcactccctcagggtgccccaacaagcccaattatctccaatgcttatctgtatgagttcgatcagaagatgtatgaattttgcgttaggaacgggatgacatactcacgctatgctgatgatctcaccatcgggagtaccgattatacgcaactgaaatcttgcataatctttatttccgagcagcttacaaagctggagctcacaataaacgagcgcaagacccggattatttcaaataacaatgcccaggtcatcaccggtgtgtgtatcaataatgagcagctgcgcccatcgaggaaattcagaaaggaagtgcgagcggccttccacaacgcgaagcttaacaatgacaaaggctccctgccaagactgtacggataccttaactatttgagctccttcgactccggggatacacctcacaacatatctgaatacaagtcgatcattgacaggatcaaaaaagccctctga

SEQ ID NO: 14199 - RNA, 1452 nt, synthetic construct
  source 1..1452: mol_type = other RNA
atggctaatctcgtgaatctgaaaacatatctctgggccttagggacaattcagccagcctctgctaacgaagcacatcaatttatcaagctgatgaccaacgtgacctcagatgtttattccgagtccgacctggatgacgctattaaaaggagcctcagcttgggatatattgagaatgttagcaagaagaacgagctttacattttaacggcaaaggggggagaatttcttgggaagaatcttcgactgctccgggataagaaccgcctattcctgctgaaaagcatccggagtgccaccttccagtcgaaagactccccggagcaagacgtggctggtgtcagtccccctaaggtattcagaagcagtctcaaggccgctccttggccagagaattccctttcacccggtgcactgccgcaaacacagagggttttttggccacgggtgagcgagcagctgcagattggatcaatctccggcgaatctttgccctccattaagctcaatttctactcaaagaacaagctttcagatatcaacgacaatacaactgcaatcgatgccttaagtgaatctatcggcatctctccacgactactgtcctctttcattaaagctccttcaagccattaccgcactttctcgctgcagaaaaaatcatcaagtggcacccggatcataaactctcctagggccttcatcaaaactgtccagtactggctgcacgattactttctttttcgcttgaagctgcacgactgctgcttcagctttcgtcaaaaagtgtccatcaaagataacgcaaaggtacacctcaactccaattttatcttgtgtttggatatcgaatccttctttgacaatatcacgacagagaacgtctatagctgccttgtgcgaaataagattgacgaaaacattgcaagcgttatagcggggattacgacactcgataactccctgcctcagggtgcgccaacctctcctattatctctaacgcctacctgtacgactttgatcagtctatgctagagttgtgtgccaagaataaaatgacttattccaggtatgctgacgacctgacctttggcagcaatgactatatgagtctgaaggatctgatccccactatcgccgagtctctccggagttatagactccgcataaacaagaagaagaccagaatcatatcgagcaataattcacaagtcataaccggggtgagtattaacaatggcgtgctgaggccctctagaaaactacgtaaagagattagagtcgcgttctatcaggccaaaactaacaagaacgtggacgccctgcccaaattgtacggatacattaattacctcaagagcttcgaggacggagacacagattacaacttagaactgtaccagggcaccatagatgaactgaagggcatcaccaaacagagccgctga

SEQ ID NO: 14200 - RNA, 1482 nt, synthetic construct
  source 1..1482: mol_type = other RNA
atgctcggggaaaatagtatgagttccgagttgaacctgaaggcctttatatggggtctgggagtgattcagcccgccactccagaagaagtccagaattttatcctccaggttttgctgaaacagtcaaacaaagagtttgacatgcagatcaccgctcagaagttgctggacgaggactatatccgatgcgtcagcaaaaagaacaagctgtactctatcacacatgagggtgacgagtttttagggaataagctcagagctctgaaggataaagagcgattgtatctcctgaaaagtactcgcgacgtgaatttctcagggaaaggcgcgagcgagaggaatagcggtggagcctcccctttgaaacaggcctcctctagtacaaaggtgagtcctaggcccgaaataagccttagccctggcccccaaccccagattcaacgcaacctttggcctcgtgtttacttgcaacttaatattggaagcaagcctgaagcacccctcaactctataaatctgaatttctactcagcaaactccataccatccaaatttgataacttagaccatgccattctcaccacttccgagcttatcggggtcagctcttacctgcttaaagatttctgctcaaacacccaaaagtattacagatactttgagatccccaagaagtccgggaaaggggtgcgcgtgatttgtgcaccacgtgcctttttaaagaccgttcagtactggattctggactacttcctgctgagactgaagcagcacgagagttgctactcatataggaagaacaagtcaataaaggacaatgccaatgcccacattaataagaaattcatcctgtgcatggacatcgagtcttttttcgataacatttctatcaagcaggtcgtgcaatgttttactgaaaactctatatcgccgcacctcgctatcttgttcgctaaactcgtcacgcttaacggatccctgccacagggtgccccaacaagccccatcatcagcaatagtcacttatacgaattcgatgattacatctccaaatattgtgcagagaattccctctcatatagccggtatgcggacgacctgacgattggcagcgatgattatgatgctctaaagaagatggaaaaactgatcacagaggagctcggctctttcggcctaatcattaacaagggcaagaccaggatcataagcttcaattcttgtcagattgtaactggcgtggcaatcaataacggggaactaagacctacccggaaacacagaaaggaagtacgagctcttttccatcgggcggaaatcgaacggtctgtggagttactgccgaaactctatggacatctaaattacctgaaatcgtttcgcaacggcgactcaccaaaaaacatccagaagtatcagtccattattgatcggctgaagctgctgaggaacattgagggcttcggaagcgagacatga

SEQ ID NO: 14201 - RNA, 1452 nt, synthetic construct
  source 1..1452: mol_type = other RNA
atgtcttcggagcttaatctgaaaacctttatctgggctctgggagtcattcagcccgcaactcctaacgaagtgcaaaatttcattacccacatgcttctcaaacagagtaacaaggagttcgatattgagacaactgtgaaaaagttgatcaacgaatgtctgattcggtgcgtgtccaagaggaacaagctgtattccatcactcacgaaggagatgaatttctgggtaataaacttagagcactcaaagacaaggagagactctatctcttaaagtctgtacgagatgtcacctttgtcggtaagggggcctcagaaagaaacaccggcggagcatctcccttgaagcaggcgcggagttccaccaaggtttcacccagacccgagatccccctaccttccgggcctttaccacaaaatcaacgcaatttttggccgcgggtatactggcagctgaatattgggtccaaaccagaggccccactcacctccacacacctcaatttttactctgctaacagcataccgcgtaaattcgacagcatggccgacgcaatcatcaaaattagcgagctggtgggtgtgagctcctatttactcaaggacttctgtaacaacacagagaaatactatagagacttcgagatcccaaagaaatcagggaaaggcgttagggtgatctgcgcgcctcgagccttcctgaagacggtccagtattggatcctggactatttcttaatccgcctgaaggagcatgagagctgttacagctacaggaaaaacaagtccataaaagataacgccagcgtccaccttaacaggaagtttatactgtgcatggacatagagagttttttcgataacataagcgttaagcaggtggctaagtgcttcgtggagaacaaaattgagccccatctggccgccctgttcgcaaatatcgtgaccttcaatggcactttgccacaaggagctcctacatccccggttatctcaaacagtcacctgtacgaatttgacgaactgatctccaaatattgtgtcgacaacaatctgtcttactcacggtacgccgatgatcttactatagggtctgatgactacgattcattgaagaaggtggaaacactgatttctgagaaactaagctcttataccctcaagctgaataaaaagaagacacgtatcgtatcaagcaatagttgccagatcgtgacgggcgtggccattaataatggagaactccgcccttcgcgcaaacataggaaagctgttcgggctctattccataaggcggaagtggagaaaagtgttgaacttctgccaaaattgtacggccatttgaattacctcaagtcctttaacaatggcgatactcccaagaacattcagaagtatcagagcatcattgacaagctgaacaatcacaagaacattggcagtttttga

SEQ ID NO: 14202 - RNA, 1455 nt, synthetic construct
  source 1..1455: mol_type = other RNA
atgattgatgtgatgaatagcaaggtattcgtgtgggccctaggcgtcattcagcctgcaaaaccagaggaagtacttgactacctcttgaaggtgtttgccagcgagaaacagaaggatttcaaggtagaaatcggtcccacattatcaatcgtccttgaacagggattagtccactgcgtatccaagaagaataatctctactccgtgaaacatgctggtgatgatttcttaggcaataagcttagagtgcttaaagataaggagaggctgtatctgctgaaaagtatgcgggacgttaacttcttgtcaaagggagctagtgagcgaaatatgggcggagtttccccacccggacggttgaggtctagcactaaagtgtctccacgcccagaggtccccttaagtctgggaccgttgccgcagaaccagcgtaacttttggcctcgagtgtaccagcaactggggatcgggtccaaaaccgaagctcctctccagcctataaacctcaacttttattcggttaacaccctgccagaaattaaatcaaggagcgaggctatttttgctgcttccgagctgattggcgtttcttcttatctgctgcgggacttctgtaatagtaaggagaaatactacaggaagtttgaaatcgccaaaaaatcctccaacgagagcagagtgatcaatgcacccagagtgttcatcaaaaccacccaatactggatacaggactatttcttttaccgcctcaggcaacatgattcatgtttttcataccgcaaaaaagtgtctatcaagaacaacgcctcagtgcacctgaacaaaaagtttatcctctgtctggacatagagagtttcttcgataacataaccaaaatgcaggtcatcagctgtattgcgaagtctaaggtcaatgtgcatctggcggagctttttgcagacattgtgacattgaacggctgcctgccacaaggcgcacctacgtctcctattattagtaacagccacctctatgaattcgatgagaagatctttgagtattgctccagcgccggtatgtcctacagtcgatacgccgacgatctgacaatcggggccaacaaatatgattcattgaagacgctagaaaaggtcgtgaagaccgagctggagactctggggctgagcattaatagaaagaagactcggattatctcctctaatagctgccaggttattaccggtcttgcaataaataatggcgaaatccgtcccactcgcaaatatagaaaggagatacgggccctcttttacaaggccgacgacgcgatcgacatcgaactactgcccaaactgtgcgggcacctcaactacattaaaagcttcaaaaatggggacacaaagaagaacatcgaaaagtatcagctgatcatcgacaagctcaaaaagtcgaagaatattcagacattctga

SEQ ID NO: 14203 - RNA, 1440 nt, synthetic construct
  source 1..1440: mol_type = other RNA
atggaatccactataaatctgaaagcctacctgtgggccctcggagtgatccagccagctaaccccgaagaagtccatgacttcctgaaattcatgaacaacaacaccaatgacatctactcttcttccgacatcgatgacgccgttgcattcagcctggagcacaaacttatcgagatcgtgtccaaaaaaaacaatctgttcgtcctgagccttaacggctccgaatttttaggcaagaaacttaagctcctccgggacaaaaatagactactgctactgaagtcgctccgaaacgactcactggaccgggaggaatcccccgagcagaagatggatggcgttccaccaagctcaatgtttcgcctgtccctcaaggatgcccctagacctgaggagtctctcagcagtgggcctctgcctcagagccagagattcttttggcctcgcgtgagcgaacagctgcagattgggagtaacagtggcgactcatctacgcgaatacggttgaactattacagtcgtaataagataccagctaacactgagcaatccgcatatgaatgtttggcagagctgatcggcgtcagcccgcgcttactttcctcaatggccaagtctcccaaaaaacattataggactttcaccatggccaaaaagagcgggggcacaaggcttattagtgcccccagggcttttattaagaccatccagtattggattacggattattttctgtatcgtctgaaaacacacgaaagatgcttctcctataaaaagggtctatccatcaaagataacgctaggctgcatttgaataagaaatacatcttatgcctggatatcgaatcgttctttgacaacattaaccagaaggatgtgattaacctcttgataaactcaggaatagaaaacaagctctctattgctatgagttttttgctgaccctcaataatacattaccacagggagcaccctcatccccgcttatcagcaatgcccacctcttcgacttcgataagaagatcactgaaatcgctaacaatagtaatgtgacctacactcggtacgcggatgacctgacatttagctgtgaccaaaaaagcactcttgagaagattaaggtgattgttaacgagaagttaaacgagattgggctaaacattaagaatgataagacaaggatcctctctgagcacaattcacaaattattacaggtatcgccgtcaacaataataatctgcgcccctcgagaaagttccgaaagaaagtacgggtgctgttttaccaagcgaagatcaataatgatgtatctcagatcccaaccttgagggggtacttgacctacctgaaatcttttgagaatggagacacccctgagaactataagagctacgagggtaccataaattacctgcagaagatccagaaagcatga

SEQ ID NO: 14204 - RNA, 1464 nt, synthetic construct
  source 1..1464: mol_type = other RNA
atgatggcgagtccaatgaattccgcaataaacatcaaagcctatctctgggctctgggggttatacaacccgctacgcccgaggagattcacaactttctaaagttcatcaaccgctctgaagaggagatttacgacgccgataccataagcgatactataaagtattccatcgataacggtctgatagaaacagtgtctaagaagaatgagctttacgtgctgagtctggtgggcggagaatttctaggcaaaaagctgcgtctgttacgggataagaatcgcctcctcctcctgaaatccctgaggaacgactcattcaagaaagaggggtttcccgtccaggaaatggtgggcgttagccccagtgaaacccaaaggctgtcactgaaggccgcacctcgccctgaggaatccttgtcgcccggaccgctcccacagaatcagagattcttctggccacgggtttcagaacagctcaagattggtagtacatctgggaatcctagtcctagcattaggctgaactattatagtcggaacaaaatcagcaacaatagcaatgtgactactatcgactccttggccgagttaattggcatctcaccacgcctgctgtcaagcattgtgaaaagtcctgagcaacattaccgcgccttttctatgcagaaaaagtcgggaggtctgagaagcataaacgccccccgagcgtttctgaaaaccatacagtactggatcaacgactacttcctttataggttgaagattcattctaactgcatcagctaccgaaaaaaggtcagtattcgggacaatgccgccatccatctgaacaaggactacgtactctgtatggatatcgactccttttttgacaacattaagacgaatggagtatatactctgcttgtcaattccgggattgacgagtctctttccagaaccatcagcttcttgaccacattaaataataagctgccccagggagctccatcttcccctctgatttcaaatgcttacctctacgattttgacagcaaaattcacgacctctgcagcaagatgggcatctgttactctagatatagcgatgatctaacattctctggcgataataaggagaagcttgaagccctggtgccggaaattattgagcaattggactgcttcaacttgaagatcaaaaagtcgaaaacccggatccgatcccggaattcaaaccagatgattaccgggatctcaatcaataatggcattttgaggccatctagaaaattcagaaaaaagatcagggcggcattcttcaaagcacgttctaacaataacatcggcgctatctccacactgaccggatatcttaactacttaaagagctttgaagcaggggatactgaatacaacatcagcgagtatcagaaaacaatcgagcaccttaaagctctcaagaactccataaaaacttga

SEQ ID NO: 14205 - RNA, 1449 nt, synthetic construct
  source 1..1449: mol_type = other RNA
atggagaacatcattaatgtgaaagcctacctatgggctcttggcgtggtgcagcctgcctctcccactgaagtgcacgacttccttaaatatattaaccgctcagaaaaggagatatacgatgagtcgtctatcaaggaagtgattgagtatgctctcaacaatcactttatcgagaaggttagcaagaagaacaacctgtttatattgagttcatacggagcagagtttctgggaaagagactgcgattgctgcgtgataagaatcggctcctgttactcaaagcgctgcggaacgacatcctcaagaaagagggactattcgaacagaacctggacggcgacagtcccagcccaatgtttcggtccacctcaaaggtagcaccaaggccggaggaaagcctttcaccagggcctttgcctcagaatcagagattcttctggccacgcgtgtcagagcagctcaagatcggtagcttttccgagggcccatcaaattttcaccccatcaatctgaactactatagcaagaataagctggacagcgcctcaaatctgagtccggtgaacgtgctttcagaattgataggcatttcccctaggctcatctcgtccatggttaaaagccaagataaacattatcgtacgttctccatgcccaaaaaatccggcgggtacaggaagattaactctcctcgggccttcctcaaaaccgttcagtactggataggggattactttctttatcgcttggtcaatcatgaaaactgcttctcttataagaagggagtatccgtgaaagataatgcgtcggttcatctgggcaagaaatacattttgtgcatggacattgattcctatttcgattgtatcaacgtacactcagtattcaaactcttcgtcagatccggaatcgacgaaggcctgagtgacctaatgtccaaactggtcacactgaacgggacactcccccaaggatctcccgtctctccattaattagcaactcctacctctatgattttgacgtgttcatttctgacttttgttccagctacaatatcacctacagccgatatagtgatgatctgacgtttggtggagacgataagagcgacttggaagccatcattggtatagtcaagaaaagcttaagtgagttcaacctgaacattaaagacaataagaccagactgctgtctgaaaataatactcagatcgttaccggggtggctatcaacaatggtgtgcttagaccttctaggaggtttcgcaagacagtgcgggctatcttccacaacgcattagtcactgaatctgtgggcagtatcctgatgctatccgggtacctgcattatcttaaaagttttgagtctggcgagacaccccacaatataaaggcctatgaggacatcattgagaaactgaagagcaagtacgtcagcgtttga

SEQ ID NO: 14206 - RNA, 1452 nt, synthetic construct
  source 1..1452: mol_type = other RNA
atggatgagaacttcaacccccgacctttcttgtgggccatcggaatggcccaaccgaccaccctggactatgcccatgctttcctgaagaaggtgacacagtcagagtcagacctgctcactattgaagagatcaacaacttctccaagtttgcactcgacgctggactcattgaggtagtgagcaagaagaataagctgtattcgttaacgaacgagggcggcgttttcattggaaaggggcttagacttctacgagataaaaatcggctgcttttgttgaagtctttccgaagagctaaactaacacaggagtcatcaccaactggaaacctggcgggtgctgccccagtcgtgaggaatagctccgcattaaaggccgctccacgtcccgaagtgagccttgccagtgggcctctgccgcagaatcagcggaacttctggccccgcgtctctgagcaattcaacatcggactgatagtgggcgaactgagtcctagtattaacctgaatttttactctcgcaattccttccctgaagtgtccgactccatttctgccatcgatgccttaagtctctgtattggtgtcagcccacggttgattgggagcatgtgtcatgcgcagtctaaccactacaggacttttaccttgatgaaaaagagtggaggcaccagaacgatcaatagcccacgggcatttctgaaaaccgtgcagtactggatcaaggattacctcatctacaaactgcccgtgcacgatgcatgcttttcttatcgtaaagggctgtcagtaaaaaataatgcatgcgtgcacctcaacaagaagtacattctttgcgttgacattgacaactattttggcagcattaaaactgagtttatccacgctatgttgcacaaattcgatttcagtatggaactctcagaggttttatcccagcttatgactctggacggatccctcccccaaggtgccccaacttctcctgacattagtaatagctttctctacgactttgacgttaccgtgtctgattggtgctcagcccataacgtaagctattcccgctactccgatgacctgacattcggtctagattccatagatatcataggcgatctgaaagacttcgttataaacagcctgctgaggctggggctcagactgaaagaggagaagaccagagtcatgtcttgtaataatcgccagatgattacaggggtcgtgataaataatggcacacccaggcctagccggaaatttaggaaaatggtgcgcgcggccttttttaatgcacaggacttgggcgatgtcagttccatcaagaagttaaggggttaccttaactatctgtccagcttcgagggcggggacacaagcgaaaacatcgctaagtattcaaagatcatctcttcgctcgaagaaatcaagatcaaaatgaccaactga

SEQ ID NO: 14207 - RNA, 1461 nt, synthetic construct
  source 1..1461: mol_type = other RNA
atggcattgactatcaataaggacataatcgtgtgggggctttcagtcattcaaccagcatcgatttccgaactccggggcttcctgtgcgcagtgacacaggacgaaaacgtagtgcctgatggagattaccttgccgtaaccgtgaaggaactgattctgatccacaacgttttgaaagtcgccacgaagcctgctcgatattctgtcacccataaaggagggatccgcctcacaaaaaagctgcggtacttgagggaccgcatgcgactttttctccttaaggactctgcctatggaaggtttcaccttagctcagatgtcttagatcagaatctggatgacgcctcttcaagcagctctatcgggttaaaatatcaggatgcacagagatccaacagctttctcgctgccgatcagaaagcgatctggcccctagtgtccgagcaattccagattggctctacctctgcttcagatgacaaaaatacccctacttatgccgatctggactgctacagcttcgatagcgcgtatttcgaaggatccctaaagaacacatcagatctgagtgaggcaatcggagtgtctattcgcttgataacatccatatgcaagaagaaggagaagcactaccgcagttttgaaattcccaaaaaaagaggcggcaccagaccaattgatagtcctagaacattcctaaaggtcattcagaaatggatcaacgattatttcatctacgacctaaagcagagcaattactgttacagctacaagaaaggtgtgtccataaagtctcacgcgcagtgccatgagaagcagaattatgtggcttgtgttgacatcgaagacttctacggctccctgacaaaggatcacatctataacctgctgctcaaaaacaataaggctcattccatcgccaaggtggtttcagacctttgtacctttaataataagctcccacaaggcgccccgacgagcccaatactgagcaacgccttcctgtatgacctcgacaattacctggtgtcagagtgcgagggtctgaatgttacctatagccggtttgctgacgatattactattagtagcgacagtaaagagaatttgattcgactgatttccatgatcaaaaactgtttacgttccctgggcctgtctctgaaggactcgaaaactcggatcttgcataaaagtcagaaacaattggtgactgggctggtcgtgaacgagatcgctaagcccgccaggacttacagaaggcgtatccgggccatttttcacaaggcaaagctttaccccgactcattcaagggtaaagagaaagtactgcaagggtacttatcttacctctcttcgtataactgtctctccagcgacacgcagagtgactacaagcagacaatactgaacatcaagaatctcaccagttcaagcaacagggataaaaactcctga

SEQ ID NO: 14208 - RNA, 1428 nt, synthetic construct
  source 1..1428: mol_type = other RNA
atgacagtgtcgattcgcagagatatcttgacttgggccgtggcagtgatccaacctgccaccatttccgacatctataacttcctgactacagttcttaaggacaaagatgctattccgagtcgggatgctattatgatcgaagtgctggccttaatcgagttgaatgacattgctcgagtgtcccaaaagccaacaaggtattctatcacagccaaggggaacaaccggctgaataaacggctgcggcacctacgtgatagaatgcgtcttttcctcttaaaaaatgcttacaggggcagtctgaaaaagcccagtgctatatttgatgaggaaacgaacgacgtgtcttccttcatcagaaaggccgtggagattaaagatgcacagaggcctaattcttctttggtagccgaccaaactgccgtctggtctttggtgagcgagcagttttctataggtcctaatgaggtcgcggacggcgttctgctgattccaacattctactcatttgatgcgaattactttgatggagaactgaggagcatagtcgacctgtcagaggcaattggtataagtatccgcctcataaccagcattgtgaagaacaagcagaaacattataggacctttaccgtcattaaaaagagtgggggagagcgggtcattgatgcaccaaggacctttctgaaagtgatccagcgatggctgagcgattttctgctggacaaactgcccgtgcacgacttttgcttcagctacaagaagggacagagcatacgaaacaatgcgcagattcatgttggcaagaagttcgtgctcaacatcgacatcaaggatttcttcggttcaatcactaagaagatgatctgcattaccctcatcgagtcagggttcgaacataaactcgccaagattgtatccgagctctgcacttacaatgatagacttccacaaggcgctcccagctcccctatcctgtcaaactctatcctttacaagatggactgctttttaactgaacagggagcactcttcgattacaactatagccgatatgccgacgacattacgatctcaagcaatgatagattgactatggagctaggcagggagacaatctttcggtgtctgaatgaatcggggttcgacatcaacggaggtaaaacccgcgtggctgcaaccaacagccgtcagatcgtcacagggcttgtagttaacaaacgggtccagcccacaagagtttatcgccgcaaggtaagggccatgtttgactacgccaaaaagaatccggactccttcaccgacaaatattctatgctgaccggatgtttctactacctcatgtcctttggctgtattggccactccaagataaacgaatataaaaatacgctctccctattgcgcgaaatcagtaagagatga

SEQ ID NO: 14209 - RNA, 1497 nt, synthetic construct
  source 1..1497: mol_type = other RNA
atgagtgtctttatcaacactcgcctcatcaggctgggcctggggtgcattcaacccgcttctgccgaggatgtgagcaaattcctggcccagacgctcggaacagagggtgctcccatcccccctgaaagtatccaatctattttcgatgactgggcgtcccaacaggatgtagtttgtgtgcaccagcgccagcatctgtattctcttacaagaaaaggtgacaacgcactcgatctgcgagagcgacgtctacgggataaaacacgcttattccttatcaaggaactgcgggccgctactctgaagaggcctgaggctgaggaaccggaaaaggccgacgactcctccgccgtggccattgattcagcaacccagggggagaggcctaaaggggctgctgctaatccaagagctgcgccgggagttggacgggctttttggccactgctgagcaaacagctgtttgtgggatcttcaccccaggcctctggactccgtttccgatttttttcctttccctcgattcttgactgttgtaaggccgctgggggcaccagcataccagaggacggcgtgggagtgaacgagatttctttggccttgggcatttccccatcgctccttaagtccttcctcgcgaggcccgagcaccactacagagtattcgaaataccaaaagcaaatgggaagatgagacagattaatgccccacggaccatgctcaaggttttgcagtacttttttgtggattacctgctggacaggcttgctgtgcacccagctgccaccgcatactggagggggagctctgtcaggaagaatgcggagaggcatgcccgccagagatacgtcgccaacatagacgtgacaaattttttcccgagcctctcaactggcttcgtcattcgcagcttatgcgccgccggtctgaaacctgacaccgcagccttggtggctcgcctgtcatcatacaaaggcgggctacctcaaggagcccccacctctgcagcactttccaacatcgtgatgtatgggtttgacaaaaagttaagcgaagcctgcgcaagcttgggcgtgaactatactcgctatgcggatgatatgactttcagcggcctggagctgggtgcaatccaacagagtatcaaactagcaaacgaatcattagccgagatcagactcaagataaatgacgaaaagacccggatctacgggcccagtacaagacaggtcgtcacaggagtggtagtgaatgattggcctcagcctagtcgggtcgagcgaagaaggctgcgtgccgaactgcaccatgcaaagttgagtcccgccacgttcgttgccaagtaccagcagctgcaaggccgggctgcctatgttcttagctatgctggcgaagagcggcctgttggcgcactctccagaggctatgtagaagaggcattgttcgacgtgcgacggctgcatcgcctgatgtcccagaccggaggtgcgtga

SEQ ID NO: 14210 - RNA, 1488 nt, synthetic construct
  source 1..1488: mol_type = other RNA
atgtcagtgaatgtaaacacccgcctcattaggctagggctcggctgtatccagcctgcatccgccgacgacgtttctaaattcctggccctcagcctggaggtagaagaggaacctatatcccctgaggccatccagataatcctggatgagtggtccagtcagaaggatgtggtttgcgtgcacctccgccaaagactgtacagcttaacccggcagggcgacggaagacttacacctaaggagcgacacctacgagacaaaactcggctcttcttgcttaaggaactgagggctgcaactttacggcgcccagaggccgaagagccggagaaagccgatgtaagcagtgcggttttcattgacagcgccacccaagaagaaagaccgaaaggagcggccgctaaccccagggttgctcctggtgcaggaagagctttttggcccctgcttgcgaagcagctctttgtgggatccagtccatcggcgagcgggttgagattccggttttgctcctttccaacgatatccgactgctgtaaggccgctggcgacgattctattcctgccgatggcataggcattaacgagatctcattgggtctgggaatttccccgggtctgctcacgtcattcttggctcgccccgagaggtactatcgagtctttgagatcccaaaggcaaatgggaaatctcggcagattcaggcaccccgcacaatgatcaaagtcctgcagtacttcttcctggactatctgctgaattggcttgaggcacatcccaccgccacagcctatagccggggaagttcaattcgcaaaaacgcccaagtgcataccgaaaagaaatacgtcgccaacattgacgtgtctaatttctttccctctctaactatcggcatcgttgctaagtccctcgtggctgctggtttgtctagtaatacagctgtgctcgtcgcccggctgagttcttataagggcgggttacctcagggagcacctacctccgcagctctttcaaatatcgtgatgagggaatttgacgccagcgtgtcggaatcatgtaatagcttgggggtcagctataccaggtacgcggatgatatgacattttctggaatggagctggacggggtgaaacaagcaatctgctttgcaaaggagaggctgactgagatgagactcaccctgaacgatcagaaaacgcgtattttcggcccagggactaggcaagtcgtcactggggtggtggtgaacgattggccacagcccagccgagtggatcggcgtagacttcgtgcagaactgcatcaggccaagatcagcccagctaattccgtcgccaagtaccagcagctattaggccgagctgcttacatgctgtcatatgcccgcgaagagaggcccgtaggcgcaatcagtagagcctacgtggaagacgccctggccggtgttaagatgctgagacacttcacacacaacgagtga

SEQ ID NO: 14211 - RNA, 1551 nt, synthetic construct
  source 1..1551: mol_type = other RNA
atgagcgtgggagtgaaccagagcttcgtgcgactggccctcggatgcatccaacccgcctctgctgaacagatcgcagccttcatctctagtagtcttcctaccggggcgcaccctttgcatgctgagaaaattcgggaagtgctggatggctgggcgtccagcggagacatcctatgcgtccataagaggtatttactctacagtcttactagacagggggatgggaagctgtcggcacccgaacgcaaggtgagagacagaaccaggatgtttctattaaaagatcttagaagcgcctccctcagagccagcgaagtttggggaatcgagcaagccgatgactcctctgctgtatcacacggtatggcagtgcaggaggacgaaaggcctataggcgcagctgtttcaccgagaaggcgtgacgggcgagcctattggccactgctgagtaagcagttgctggtggggtcttcgtccccatcatccgacacccggtttagattcttgtcgttttcttccgtcaggagttgttcccaggcctgcgggtatgccgatatccccgaggggggcattgggctgaacgagataagcctggcccttggagtgtctccccgcatcgttggtctgctcctccgcagacccgaatcacactaccgggtatttcagattccaaaggccggaggcggcctccgggaaatacatgcaccgcgtacattcatgaaggtcactcaacactttatcctggactatctactccggcggctgaaagtccatccagccgctactgcatactccattggttgcagcatcaggcacaatgctgagatccacgtcaggcgcaggtacgttgctaacattgacgtcacaaacttcttcggctcactttctacctctgtggtttacgatcgcctgattgcggtcggcctcatgaaaaacacagccgccttcatcgcacgtatttcatcatttatgggcggcttaccccaaggagctcctacaagcgccgccctaagtaatatctgtctgtacgctgcagatgatgtcctgcaggccgaaagtacggtaaggcaggtgacttatagcaggtatgccgatgacattacgttcagcggcgacgatttgggcgcagtgcaggcttgtatggccattgccagaagagagctgagcgcgctgggactgacattgaatactgataaaacacgcgtgttcggtccatctagtcgacaggtggtgaccggagtggtcgtgaacgaacatgctcaaccggctcgaaaggagcgccgtcgactgcgagcgatgctgcaccacgcaggtaccgctcccgacgagtttgttgcccagtttgacatactccaggggaaatcctcatatatgttaagctactccacccctgagcgcggaattggcgcccttccagaaaagtacgtggaggacgctttggctgccgtacgggcagctcggaagaaaggtctgcctgccgcagatgagtcttctctctcctccgcgcctttcgacaatgagaatcggggccgcgacgcaatcagctga

SEQ ID NO: 14212 - RNA, 1473 nt, synthetic construct
  source 1..1473: mol_type = other RNA
atgaccgttagagtgtatcctcagttaatccgactggccttagcgactattcagcctgcctcggctgagactgtggtgagatttgtacagagtgccctcgactctcaggagcagttactcgatctgagcgaagtacaaaaactcatcgaaaactgggaagagttagccgatgtcgtgtgcgtgcataagaggtaccagctctactccttgaccaaaagaggagcaaacaagctgagcaaaaccgagaggcagctgagagataaaacccgtctgtttctgctcaaagaactgtgcgtgagcaagcttaagagccccgaggtccaagagactgagaaagctgacgccagtagcgccgtagttattgaacccgtgcttcaggaggacaaacgcccaatttccccagcagttccgccaaggcctgctaggagtagcggacgcggctactggccactgctgtccaaacagctcttcgtgggatcttctacattgacatccggtcctcgacttcgctttctgtccttccagagtgaaaagtcttgtgttctcgcgtgtgggacgaaagattcatccgaatttggcatcggggtcaatgagatcgcactttctctgggcatctccccagggctcttaaccagtatgcagcacaaacccgaaaagcattataggaccttcgaaatccccaaatcaaacggcaagccccggctcataactgctcctcggacaatgatgaaggttgtccagtatttcttcctggactacgtactgcgcagtcttcccgtgcatacatcagcaacagcctaccagcggggctgctctatcaggcaaaatgcgctgcagcatctgagacaacgttacgtcgccaatattgatgtttcagacttttttccctctctgactaccgcagtggtgacacagaagctagtggagggcggtctgaagattaacactgcacttctggtagccaagctatgtagctatgacgacggcctacctcagggtgcccctacttccgccgcaatttccaatatcgtgttgttcgattttgataccgctatgtcagaatacgccggcttgcacggcttgacatacaccagatacgctgacgacatttcaatcagtgggagcgagaagtctgagattgagaaagccatctcggtcgcacaaaaactgttgtcaggtatagggcttaaattgaatgattccaagacccgcatattcggacccagttccagaaaggtcgtgacgggagtggtcgtgaacgaatgggcccagccgagccggaagcaaaggcgaaatctgcgggctgctctccatcaggccagcctgcacccagaacgctatgttgacaagtatcaccagctgcaagggaaggctgcctatatgctaagcttcgcgacgccagagcacagcgtcggaggactctcatctgagttcgtgcacaacgcaatagctgagattaagaagcggatctga

SEQ ID NO: 14213 - RNA, 1521 nt, synthetic construct
  source 1..1521: mol_type = other RNA
atggcaataatgataaattctcgcatcgtccgcctggccctgggttgcatacaacccgctgacgccaacgccgtgatcgcgtttctgatgaaggcctttaagtatgacaccaacctcatcagcgagtccgcaattcaggaaatcttcgaccagtggagtaccgatggtgaagtggcgtgcgttcataagaagtctaaactctactccctgacacgcctcggcgacagtcgactgaaccgggaagaacggaggctccgcgatcgcacccggttgttcctcttaaaggagttacgaagcgcaaagttgcatctgcctgaggccggtgagccggaaaaagctgatgtgtcttccgctgtcattgtagatcagcccgtccaggaggacgagcgaccaactggagccgcacgtcctcctagggtagccagaagggctgcgagagcctgttggccactgttggctaaacaactgtttgtgggctcctctagcagggccagtggacccttctttagattcctgagttttcctacagttaaggcatgcgcacaggccaacggcttagcggagattccacaggatggcatcgatatctcagagattagtctggcaataggcatttcaccacagcttattggactgttgattcacagacccgagcggcactacaggacttttgagattccgaaggcaaatggaaaggtgagggagattcagtctcctcgtaccatgatgaaggttgttcagtacttcctattagactacctgctctacaagcttcccgtccacgtatcggctaccgcatattcccgcggctgtacagtgaaggccaacgccgctccacatgtggggaagaaatacgtcgcgaatatcgatgtggaagacttcttcccatctatcaagtggcagctggtgcacaaaatgctggccctaggagggctggaggacaaaactgcctatttgattgcacggatgacgtcgtatcaggggggtcttccacaaggggcccctacttcagcgcacttgtccaacgtggtcctatatccttttgacaaagaaatgtccggcttttgtgagtccgtggatgtcaattacacacgttatgccgatgacatcaccttcagcggttcagacaaaaatgtggtctggagcgcagtggaaagagctaggcagctgcttaccgaccttgggctggagatcaacaaagaaaagacacgggttttcgggccgagctctcggcaggttgtaacgggcgtggtggtgaataaatgggcccaacccagcagagagaagcgaaggaaacttcgcgccgagctgcatcaagccaagatgaatcctgaaaaatacgctgctagagccgatgaaatccggggaatgtcagcctatatgctgagcttcgcttccgaggagagagccgtcggagggctctctaggggctacgtggaaagctcactcgctaaactcactgaatacatcaacgaaatgaaagctaaggagagcgcaatcgctccccccagtgctccctga

SEQ ID NO: 14214 - RNA, 1521 nt, synthetic construct
  source 1..1521: mol_type = other RNA
atggccattaatatcaatcagcgcatcgtcaggctggctcttggctgtattcaacccgccgacgctggcgctgtgatcaagtttttgagcaaggccttcaactacaataccggctatttcccggagggatctatacaggacatttttgacgagtgggccagtgatggcgacattattaacgttcataaacgaaccaaactctactccctgacgaggcaaggtgattctagactgaaccgggaagaacggcggctgcgcgataggactcgattattcctcctaaaagagatgcgcagcgccaagctgcatttgccagaggcaggagagccagaaaaggcggacgtgtcttcagccgtaatcgtggacccacctctgcaggaagatgaaagacctacaggagcggctcgaccacctcgtgtagctcgcagagctggacgggcttgttggccccctttaggaaaacaactgttcgttggcagcagttccagggcttcgggcccatattttaggtttctgtcctttccgaccattaaagcctgcgcccaggcaaacggcttagacgaaattcccaaagacgggatcgatattggcgagatctcattggcaatggggatctcgccccagcttataggccttctcatccacaagccagagcgccactatcggacctttgaaattcccaaagctaatgggaaggtcagagcgatccagtccccgcgcactatgatgaagatggtacagtatttcatcctggactacctcctttacaaactgcccgtgcacatatccgccacagcctatagccgcggatgcaccgtgcgagccaatgctgaggtgcatgtaaggaaaaaatacgtcgctaacatcgatgtggagaactttttcccaagtatcaagtggcagctggtgcagaaagttctcgtgatgggtggattggaagacaaaactgcctacctgatatctcggctgacatcctaccaaggtggacttcctcagggggcgcccacatcagcacacttaagtaatgtcgtcctgtacccatttgataatgagataagcaacttctgcgaaagcgtgggggtcagctacacaagatacgccgatgatattactttcagcggggacgataaggactcagtgaggtccgctgtcgagaagagcaccaagctcctgtctctgctgaagctcgagatcaacaaagataagacaaggattttcggcccctcttcccgtcaggtggttactggggtcgttgtgaacgaatgggcacagccttcacgggagaagagacgtaagctcagagccgagttgtatcaagcaaagctaaatcctggcaagtacgcaagcagagccgacgagctccagggcatgtctgcatatatgctatcattcgcgggggagaaccgacccgttggtggattgtcccagggttatgtggagtcatctctggcccggcttacggcatatatcaatgccatgaaggaacaggaaagttccaccgtgccccctagtgcaccttga

SEQ ID NO: 14215 - RNA, 1488 nt, synthetic construct
  source 1..1488: mol_type = other RNA
atggcaattatcgtgaacgttcagttggtcagactggccctcggttgtatccagccagcagacgccaattccgtctccaagttcttgggagcttctctgatcggcgatgacaacttactctccccaagcgttatccagactgtgtttgatggctggatagcagacggcgatgtcgtgtcagtgcataagaagtctcagctgtacagcctgactcgccagggcgacaaaaaattgaaccccaaagaacgcaaagtccgggaccggacacgtctgtttctgcttaagaacctgcgggcggcgaagttacatctcccagaggccggggaaagcgagaaggccgatgtttccagcgccgtgatagtggatcaacctctccaggaggacgaaaggcccactggagcggtatgcccacccagagtggctcgtcgcgctgatagagcatgctggcctctcctggccaagcagctattcgtgggttcttcaagccgcgcctcaggcccgttctttcgattcctgtcatttccgaccatcaaagcttgcgcacaggcaaacggcttggattcgattccctctgatggtatagggctgaatgagatctctctggccttgggtatttctcctcagctgataggactgctcattcacaagccagagcgccactacagaacgttccagattcctaaatccaatggtgggacaagaaatattcagagtcctcggacaatgatgaaggtggcacagtactttctgttggattatgtgctttataggtgtccagtacatgtgagtgctatggcgtattcccggggttgtaccgtccgcaacaatgccgaggtccacgtaggccgacgcttcgtcgctaatattgacgtcgagaattttttccccagcctcagcaggaaaattgtttttagggagcttatcgccagtgggatggaaacaaatatggctagcctggtgtctagacttacttcttataacgatgggcttccccagggagctcccacaagtgccgcactcagcaacatcgcactgtacagaatcgacgacgaggtgtttaactattgccagtccattggcgttgaatacacccggtatgccgacgacatcaccttctcgggcgaaagcctcgaggccgttcaaggggccattgagaaaatcaaagcattactgaactccataggcctggtcatcaataagagtaagaccagaatcttcgggccttccagtcgaaaggtggtgactggcgtggtagtgaacgaatgggctcaaccaacccgaaaatcaaggcggaagcttagggccgaactccaccaagccacgttaaatccggagaaatatgctggacaaattgacgtgatgaggggaaaggccgcctacatgctatcctacgcgggagaaggacgtcccgttgggggactacctagggggtacgtagagtcaagtctggctaagctggctgcatacatcaaggaacacaaaggctga

SEQ ID NO: 14216 - RNA, 1005 nt, synthetic construct
  source 1..1005: mol_type = other RNA
atgctgccggcgctataccccttcggcacagcccagagatggttagaggtggcccccgccttttttgacgagacaggcgtagctcaggcacagcagctcttggagaaaggggtgattccagtacagctcggtcccgaaatagcgatctacttaggtgtttctccaaagttggtgagccacatggtcattcggcctagtcggtactataacaccttcgagatcacgaaaaagaatggctcccgacgtctgataactgccccgcgggtgtttctgaagaccgttcagcgttacgtgctggattgcatcctgtcacaggtccaaccacatgacgcggccgtgggctttcgtcgaggtaggaattgtggagatggggccaggaggcacgtgggaaggccttacgtctggaacatcgatctggctgattttttccccactattacaaagcagctcgttgtcggggtgttccgagacattggctacccagacgccgctgcactgtttctaggcggactttgttgcctggaacgcaggttgcctcaaggagcacccacgtcccctgcccttgccaacttggtggcaataccaattgatatcgaactgacagctatcgcggagtcagctgggatgctttacacccgctatgctgacgacatgactttctcgagtacaaccttaattagcgctgactttagagcccgagttaccaatgccgtggaatccttcggcttctctctccgcgcaaccaaaaccaggctgatggggcccgcaactagaagagaggtcacagggctgaccatcaatcagcaagtgagcatcccgcggcatcggcgcagacagcttagagcatatttccatcacatatcccgcagccctgagcagtatgctgagcaaaggcagcaagctctgggatatgcacggtggctctacgattatcacagagaagaaggttctaacgccctccgcattgtagccaatatccctatcccacccactaaccagttctga

SEQ ID NO: 14217 - RNA, 1002 nt, synthetic construct
  source 1..1002: mol_type = other RNA
atgtctgtgcacccattcctctatcctctgggcactgctgagcgctggatttcctttctgagttcctgtctcgacttatctaaaaacgatctgagtaaagctaaggtgctgctgaataaacaactcgtcccggtcatacatgggccagagctcggtatctacctgggcgtgagccctaagctggtttctgccatggttattcggacctcccgttactaccggggatttaagattaagaagccgtcagggggaaacagagaaatctgggcgcctcgggtcttcctgaagaccgtgcagaggtacgtgctagactgcatgcttgcacccatcgtaccccatgaagccgccacagggttcaggagggacatagggatcagagatggagctcaacgacacgtgggcagaccctttttgtggaacatagatcttaaggactttttcccttctattaaccaaagccaggtaaccggattgttctcgcagctgggtttccctcatcaggcgtcctattttcttagcggattgtgctgcttgcggggcaaactaccacagggggcaccgacatctcccgcaatagccaatcttattctcttccccacagatactgaaatcggcaccctggcaagaaggaacaggatcatctacacgcggtatgctgacgacttaactttcagtgggacccaccctatctcagatgagttcagacgagaggtgggcgtcctgattgaatcagcaggctttcggatcaataagtccaaaagcaggctcatgggtccccgttgtcgccgagaggtaacgggcctggtggtcaatagaaaggtttcaattccacgggaaactcgcagaaagttacgtgcccgctttcaccgcgttagcgtgcatcccgaacgatttacaaagcagaaaggtaaactcctgggctacgccagttgggtgagccagtataggccaaaagagggacacaggtatcgcgctatcgccgaggccattccatccgagtga

SEQ ID NO: 14218 - RNA, 1029 nt, synthetic construct
  source 1..1029: mol_type = other RNA
atgatcacccctctggtgtctttcactagcttcgcccagttcgagcaagcccttcgggatagtagagtctcggctcattctggcgcttcattcagcaatagccttgaagtggatcgcctcgtcaaatccgctagggaactgtacgggcgcggattgccccctattgtgagctctcggaccttttctctgctgtttggcgtgtctccgcgactgatttccgcgatgaccaaaagtcctgagaagtattggagaacttttgagatcaagaagcgttcaggtaaaggccgtaacatagccgcaccaagggtgttcttgaagaccgtccagagattcttgctccgtttcgtgctggagaagatccctattcacccaaacgcctttggatttgctcccggtaagggaatttttaagcacgcggagcgccacttaaaagcaaggttcgttctgacactggatatcgctgattttttccccagcatcagttggacgcaagtgagggacatatttgcaaacatagggtttccagacggggtgccgagtctattggccgatctttgcaccaggaataaggtgtttcctcagggtgcccccacaagcccatatctgtccaacctcatcttcctaaaaacagacgaagcgctcacagaggccgctaatcagttcgagatgagatactcccgctacgccgacgacctgactttctcatgtgacagccagcccagtgacgaagcaaggctcgcctttgaacagatcattcgagatgcagggttcagaattcagcacagcaaaacacggctgagaggaccctcacaagcacgggaggttacgggcctgttagtcaacgaaaagattcagccatcccgacatacccggaggcttctgcgggccaagtttcataatctgctccgctccacttctttagaacaggagactctcccttctcttgggggctgggcttcctatgtaaattcgtacgacgtcgttaaaggcgaagagtatttgtcaatcgtacgctccaaagccagatga

SEQ ID NO: 14219 - RNA, 999 nt, synthetic construct
  source 1..999: mol_type = other RNA
atgaactccctaccactgctcgtgagcttggaacacacccctgacgtgatcgccgccctcaattccgagtttaacatgacagaaatcgaaacacgcagagcaatttcactcttagataaaggtttgccccctttgtttcgtcccgaggtgattgcatatctttttggagtgtctcacagactggtcagcaatatgtctagattcagtgacaactattaccgatgctataaaatacccaaaaagtcgggcgggtttcggaatatcgagacgccacgaatcgttctaaaggtaattcagcgttggattaacacaagcattctgtccaagatcgtcgtccctgaatacatcactggcttcgccgagggtaggaacatctttgttaacgggcatattcatatcggaacgcgcaacatgcttgtcatcgacattgcagatttcttccctagtgtgttcggacgaaaggttatgtacatattccggaaccttggtttcccggtgcaagtagctcggttgctgaccgggctgtgtctgtatcagaaaaggttaccacagggcgccccaactagtcccgctcttgcgaatcacgcttttcatagtgttgacgtcaccctggaggagctggcctctgaatgggggtgtaactattcacgctacgccgacgatatcgcgttttcaggagagaggttcttcgaggactcagatttacataagattgaagacatactcgagcagcacaagtttaggataaatcacaataagagccacatttccggctctggaagcaggaagatgctggccggcctggtgatcagcgaaaaatgcattccccctagaaagaagcggaaaatctggcgcgccatttttcataacgctgctaataatcccgcaatcctgcgcgataaactcccatatctcagaggcgtggcttgcttcgtgaagcagtacgacgaagagctgtaccaaaaataccggatcataatcgattccgtggcaccgtga

SEQ ID NO: 14220 - RNA, 1014 nt, synthetic construct
  source 1..1014: mol_type = other RNA
atgaatccactcccactcctcgtttctttgcctagggaacccgagtctatcgacgtcctcgctggggagcttgatctaacaccagacgagcggagtctggctgtgtctctgtacagcaggggcctgcctccactggtccatcgcaaatgtcttccttatatgttcggagtgagtccgagactgattgctgcgatgcaaaagagggctgaacattattatcgccggtttaccatcaataaacagggcgggggaacacgtgctatagtcgcacctcgtcgattccttaaactgatccagacgtggattaacggacatatatgttccaaggagaggatgccagagtgcgtaatgggtttcgtgagagggcgctcgatcttcgataatggccgggcccactgcaagaacaagaatgttatggtggtggatgtgaaggacttctttccctcagtcaccttgcagcaggtggaagccgtctttgcgtcattcggcttccctgaagaaatttgccgccagcttgggggactgtgtacactggatgggggactgcctcaaggagcccccacaagccccgcattggcaaacctcgtatttctgagcgtggatgagcggttgtcaagacaagccgccgagtggaactgcacctacacgcgatacgccgacgatattgtgttttccggcgcgcgccacttcattagcgaggacgtggcatgtctccgcgagatcttacggcaaggcggctttactattaatgacagaaaaacccgtatcgtcggtcagggcggccgacagactgtgactggtctagttgttaatggaaaagctctgccgcccaggagtaagagaagacgctggagggcaatgtttcacagggcagccaaccacccccatgaattctttgacagggctagatctttagccgggatcgctgccttcgtgaaccagtacagctccgaacgggccaccgagtatggtcggatagcccaggaagtacgagagaagtcccagcacagatga

SEQ ID NO: 14221 - RNA, 960 nt, synthetic construct
  source 1..960: mol_type = other RNA
atgcaatacttggcatctgagctcaagtggtatgacaatagcttggagagcgcgttagccctctatagacggggcctgccgccattagtgacactccccaccctggctttcctctttggagttagcccgagtctggtcgcatccatcgtggccgctcctgaggcgcattacagacattttactataccaaaggcgactggcgagccccgtagcatctctacacctcgagtcgtgctaaagaccatacagaggtggattcacgactggatcctgcctcacgctaacctgcatcgcgacgcccacgcgtttcggaagtcacgcagtattttttctaacgctcagtcgcatgtgggacaagtgaatttgctggctgtggacctggccgacttttttggcagcgtacgcttcgagcaggtggccgctatttacgaagatcttggatttccatgggtcgtagcagcccagctcgcttcactcagcacactggggggatccctaccacagggagcgcctacatctccagcactggctaatgccgtcttccatgacatcgatgtgatgctggccgaattcgcaaatggccggaccgcctcatacagtagatatgccgatgatcttgctttctcaagcacctatcaccgcttctctgttagtgatgtggacgcagttagtgggatcgtcggtgtcgggggcttcaggcttaacccccggaaaactcagattgtgggtggcgggtacaggcaccaggttgcaggtttgtctgtagcatcccacccccaacccccccgatggaaaaggagacggtggagggccatgttccaccaagcctccgtggacccatcctcctttcagaacgaagccgctaaacttgccggggtggcaagcttcgttaaccagtatcgacctgatctggccgagtcctacatggaaatcgctattcgtgcctcaagaacgccttga

SEQ ID NO: 14222 - RNA, 1224 nt, synthetic construct
  source 1..1224: mol_type = other RNA
atgcccacccgctcttactatttcccaaaagacttcctgcatctggaagagatcctcagagccgaaccggatggttttcccgatgaacaggctactaggttccgagacttaggactgcctccaatacctacgatgggggcgctgccgctgttccttggaatctccccgaaaacaattttttcaattcgccacctccccaagaaacactatcgcagtttcttgctcaaaaagaaggacggctccaagagggagatcgacacgccaaggacctatctaaaggtgatacaatggtggatcctggataatatattatcacatgccgagatcgctgccaatgtttttggtttcgtagcaggccgtagtgctgtgcagaacgcagaataccacttgggagctaaacacgtcctgaacgttgacattcggcagttcttcccatcaattaagttggatcaggttaggacaatctttagatccctggggtatcaggatgacgtcgctaatatgctgtctgagctttgttgcctggatggccatgtcccacaaggtgcccctacctcccctgccattgccaatctagtgctcagagagctggacatcgaactctccaatctggccgatgccgctggacatcggtacagtcgctacgccgatgaccttacattttcctctcaatctagaatcgagagcgaattcctgaatctggtggaatcggcagtccaagtggcaggatttgagctcaagcccgagaagaccaggtttagcgggtttgaaggccgcatggaggtaacaggcgtggtgattaacgagaaaccacagcccactagagtctggcggaaacgtgcgcgagctaccctccacaggttaagcctttctagcaggatgaccaggcgggagcttagttacctgcagggcctgatcggcatggctaaccagttccctaaaagcccccagatgcagcagctttcagagagcgccagattgattatggagcagaaaagccagaccattatcgggcggggaactaagcctactctgcccaacggcctcacctatcgccaagcagaggcattggctgggttagcccctcgtcggactaacattgaagtggcagtgagactagggacaacagaggcggcggtgaagaagcgactccaggaagcctaccgaaagataggtgccgctgaccggcaggaagcactgatctgggccgttaagaacttgtga

SEQ ID NO: 14223 - RNA, 1182 nt, synthetic construct
  source 1..1182: mol_type = other RNA
atggagaagatcctgcaggctgagccaggaggcttttccgaggaggaagctgagcaatttcgggagttgggcctgccacccatgcctagcgtaggagcccttccgctttttctgggcatctcccccaagacgatttttagcatacgtcactctcctaagaaacactaccgttccttccctctgaccaagaaggatggcactaaaagggacatcgatacacctcgaacctacctgaaggtgatccagtggtggatcctggacaacattcttaatcacgtgccaattgcggagaatgttttcggctttgtcgctggcaggtcagcaccacagaatgcggagtatcatttcggagccaagcatgtcttaaacgtggatattaggcagttctttccatccattacaatcgaccaagtgcaggaaatcttcagtagccttggttacgaggaaaacgtggcaggcatgttgtctgaactgtgctgtctggatggcagagttccgcaaggggcacccacttctcccgccatagccaacctcgttctgagaaaagttgataccgacctaagcgctctttctacccaggccggtcatcgatattcacggtacgccgatgacctcaccttttccagccaatcgtggattgacagaaactttctgaacagcgtgcagaaaatcgttgaaggcgcagggttcgaactgaaacctgaaaaaacacgcttcagtggatccgagggtagaatggaagtaacgggggtagtgatcaatgaaaagctccagcccaccagggtgtggcgcaaaaggactcgcgccaagctgcaccggctctcactctcggtcagactcacacgccgggagattagttatctgcacggtgtgatcggaatcgccggacaattccccaagtctactcagatgcagcagctgagtgaatcagccaggattgtcatcgaacagaagtctcagacagtcatagggatcgggaatagacccaccttgccaaaccgcttgactattaagcaagctgaggccctggcagctttagcacctgggcggactaatagcgagatagcgttgcgactagagacaaccgaggtggccattaaaaagcgcctccaggaagctttccgtaaagtcggggtgtttgagcggaatcaggcattcaaatgggctcagacgaacttatga

SEQ ID NO: 14224 - RNA, 1224 nt, synthetic construct
  source 1..1224: mol_type = other RNA
atgcctacacgttcatattattttcctaaggacttcgcacacctagaagaaattcttcgcgcggaaccaggcaacttcccagatgatgagacagcacgttttcgggagcttggcttaccacccatccccactactggcgcacttccactgtttcttggcatctcaccgaaaacgatatttagcattaggagacgccctcgcaaacactaccggtccttcccgctgaaaaagaaagacggaacaaagagggacattgatacaccacgcacttacttgaaggtcatccagtggtggatcttggacaatattctcaaccatgtggagatcgccgaaaacgtgttcgggttcgtggctggacggagtgcagttcagaatgccaagtatcacctcggcgccaaacacgtgctcaacgtggatataagacaattctttccttccatcaccatcgatcaggtccgggaaattttcgtcagccttgggtacaaggaagatgttgccgagatgttggctgaactgtgctgtctggacgaccgtgtacctcagggagctcccaccagtcccgccatcgcaaacctggtgctaagagggttagatgagcaactgagccgcctggccgacgaagctggtcatcggtactcgagatatgcagatgacctgaccttcagctctcagcagaggatagagcccgcctttctggactctgtgcagcaggaggtcgagcaggcaggatttgagctcaaaccggagaaaactcggttctccggattcgaaggccgaatggaagtaacaggggtcgttattaatgataagatgcagccctcaagggtgtggaggaaaaggacccgagccaagctccatagatttagccaggctactaggctcacacgaagagaattggcttacctgcagggcatcctgggtatggctgcgcaatttcctgagtcaatacagatgctcaagctgagcaaagacgccgccgggctgattgaggcgaagagtcacaccgtggtaggacgcggggagtcccctgtgttaccatctggcttgactctcagacaagccgaggttctggcgcagcttgcccccaaacggaccaatatcgaaatcgctatgcgcctgggtaccacggagtctgctgtcaagaagcgactgcaaggtgccttcaggaagattgacgtgaccgaacggcatacggcagagagatgggcctccgagaatctatga

SEQ ID NO: 14225 - RNA, 1182 nt, synthetic construct
  source 1..1182: mol_type = other RNA
atggaacaaatactgtgggcggaacaggatgggttctccgaagagcaggccatgcattttaggaatcttgggcttccacctattcctaccgtcggcagccttccactcttcctgggcatttctcccaagaccatcttctcaatcaggggtaaacccagaaaacattaccgcagtttccccattcgtaaaaaagacgggaccccacggtatatcgacacccctcgcacatatttgaaggtgattcagtggtggatcttggacaacatcctgaaccacgtgcaaatagcggataacgtctttggctttgtttccggaaggagcgctgtccagaacgctgagtttcacctgggcgcagctcatatgctcaacatcgacattgagcagttcttcccgtctatcacaatagaccagatccgcgccatttatggtagtctgggatacggcgccgaggtggcaaatttgctagcggagctgtgctgtctggatgaccgggtacctcaaggcgcgccaacgagtccagccttagccaatctggtcttacgtgatctggataaagagctgtctcggctggctctccagaccggccacaaatactcccgctacgccgacgatctgactttcagcagtagccacagaatcgaaacagagttcctcgacgcagtccaaacggcagttgaacaggagggcttcaacttgaagccggggaaaaccaggttttcaggtctgggaggtcgcatggaggtgaccggagtggtgattaatgagaagacccagccatcccgcgtgtggagaagacggacgagggcaacacttcataagctagggaattctccccggctgacccgtaagaatgtgagctatctcctgggcataaagggaatggctaagcaatttcagaactccccccagatgcagcgattttcgctcgacgttgaacagctcctcgaagccaagtcacaaactgtgatcgggaaagggacaaggcctattctgcctaacagactcacaatcaggcaggctgaaactctggctgcccttgcccccagacgaactaatatggaaattgcaatgcggcttgagacaactgaagctgccgtgaagaagagattacaggaggcatttaagaaaatcggagtagttgatcgaactgaggccttgaactgggccactcacaatctatga

SEQ ID NO: 14226 - RNA, 1224 nt, synthetic construct
  source 1..1224: mol_type = other RNA
atgcccaccagaagttattattttcctgacgattttcagcatcttgaaagaatcttgtttgaggagtacggcaataaatacgaggacgaactgagcttttatcgcaagaggcgaatccccccaatcaccaataccgggatttttccaattttcatggggatcagccctaagatcattttctctattctcaagaggccagagaaatactatcggtccttctccatacagaagaaggataagacaaaacgtctgatagataccccgcgcacttacctcaaggtgatacagtggtggattctcgacaacattctgaatcatatcgatgttgcccctaatgtttttggatttgtgatcggtcggaatgtcttccagaatgcagaatttcacctgggcgcgaagcacatcttaaacgtggacataaaacagttcttcccttccattaccaacgaacaggtcaaaaacatattttcctctgcaggctacaaagaagacgttgctgatatgctgacatgtctatgctgctacaaggggagagtaccccaaggagcacccacatcgcctgcccttgccaacttagtactgaggcaacttgataagtctctgagctctattgctgaggagaacaatttcaaatactcccgttacgccgacgatctgacgtttagcagcctagaacaaataaatgtgaactttctgaacgacgtgaaggagatcatcgagcgggagggatttaacctcaaaccagagaaaactcgcttcgtgggttcagggggcaggatggagatcaccggcatcgtgatcaacaagaagatgcagccggaccggatatggcgtaagaagacgagggcaacactgcaccaattcaagtataagacacggctgaccaggagagatatctcatatctgttcggtattaagggagtcactaaacagttccctgactcaccacagatgcagttgttcctcaaagaagctgacaacatcattcaggaaaagagtgaaacaatcatcgggcggagcaataatcccattctcccacatggcttgactcttagacaggctcaggtcttagtggagctgcgcccccagattaaaaatattgaaatcgccaagcgactcaacatttcagaggccgctgtcaagaaacgactgcaagaggccttcaaaaaaattggagtgactaaccgcagagatgccgaaatctgggcgaaaagtaatttgtga

SEQ ID NO: 14227 - RNA, 1224 nt, synthetic construct
  source 1..1224: mol_type = other RNA
atgcccaccaggtcctacttcttccccccggacttcagtcatctcgaggagattctcagagctgagccggagggactgcccgatgatttgcagaactactttcggggaaagagtattcctcctattccttcggaggccgcccttcctcggttcctgggaatctcaccaaagacaatctttagcatccggagaaacaaagaaaagcactaccgcgtttttggtattaccaagagggatggtacacggcgtgaaatccagacacctcggacttatttgaaagttatccagtggtggctgcttgataatatcctcgacaatgccaaagtcgccgataacgtgtttggcttcgtggcaggtcgttccgccattaagaatgcacagtatcattacggggcgaatcacatcctgaatgtggatatccaacactttttccccagcatcacgcaggcacaggtcgtgtccgtatttgaagaaatcggatacgggaaagacgtaagcaggtatctcgctgaactgtgctgttttcgcgagagagtgccacaaggggcaccgacatctccagctatagctaatctcgtgcttgcagctctggacaaggaactcacaatcattgccgagaacgctaattgtcgatattctcgatatgccgatgacttgtccttctcatctactgaactgatagatgcccggttccttaacgagatcactaacgccgtcgcccaggccgggtttacccttaaaaaaaccaagactaggttcgcgggcaagggcgagaggatggaggtgaccggcgtggtgattaacgaggtcatccagccaacaagggactggaggaaaaaagtacgcgcgaagttgcaccgactatcagccatttctcgcctggtgagagccgacgtcaactttttatacggcataagagggatggcggcgcagttccctgaaagtccacagatgaccgctctggccagcaaggccgaagagttatgcagaagcagagctcatacggttattggccacggacccaacccactcttacccaacggcctgaccttgtcccaggctgaagtgctagcaaatctgcggccccgcaatactaattacgacatagctatcaaactgggtagcagtgaggcagttataaagaaaaggctgcaagaggcattccgcaagattgggtcagccgaccgtacccaagcagaacgatgggctaaggagaacctgtga

SEQ ID NO: 14228 - RNA, 1224 nt, synthetic construct
  source 1..1224: mol_type = other RNA
atgcccacccgctcttattactttccgcaggactttaaacacttagaagaaatccttagggccgaaccagacggcctcccagatgaggtgtgtgagcattttcgggcgcgaggactgcctcctattacatccgaaggggcattaccacgatttcttggaatatcccccaaaactatctacagtatccggcttaactcccgcaagcactacaggaaattcgatctgaaaaagcgggatgggacagtgcgcgaaattcatagtcccaggacctatctcaaggttatccagtggtggctgctcgataacttgctcaatagggtaaagttggcggacaacgtgttcggcttcgttagtgggcgcagcgccgtgcagaatgctgagtaccataaaggcagcactcaccttctgaacgtcgatatccagcagttcttcccctcaataacccaagaacaggttgaggacattttcggccggttgggatatggtccggccgtagctaaaatgctggcagacctgtgctgcatgaatagacgagtcccacagggagctcctacttcacccgctctggccaacctggtgcttgaagatctagacaaagccttggccgacctcgccgcacgtttcggatgtcgctacagcaggtatgccgacgatctcactttttctagccatgtccggattgatgaggcgctgttagtggaagtgaccgcaaccgttcagaaggctggcttccagctgaaggaggctaagacaaggtttgccggctgcggtgaccgtatggaggtgaccggagtggtaatcaatgacgtcctccagccccctagagattggaggaagaagaccagagcaacactccacaagatggggtcacgcggccgcctcacaagagctgatatttattacttgtacggcatacgggggatggcggcacagtatgaggcctcgcagcacatgcaagcactgagagtggctgccgagggcctaatgaaggctaagtctcacactgtcattgggtttggggcgaagccttctctgcctaatggtttgacgctgcggcaagcagaggctctggctgagctgggaccacgaagaacgaattccgagatcgcagctaaactggaaaccacagaggccgccatcaaaaagaggcttcaagaggcctaccgtaaactgggtgtggccgacagagcagaagccgaaagatgggccaagaaaaacctatga

SEQ ID NO: 14229 - RNA, 1224 nt, synthetic construct
  source 1..1224: mol_type = other RNA
atgcccaccagaagttactactttccaaagaactttacacatctcgaggctattctgcgagccgaacctgacggattcccagacgagcaggctattcgctttagggatctcggcctgcctcctatccccacagctgggacactgccaatcttcctcggcatcagccccaaaatcatttttagtatccggcggaggcctagacgccactataggtcttttagcctgatcaagaaggacggcacggagcgcaccattgacacccctagaacatatttgaaggtgatacagtggtggatcctggacaatatcaccagccaggtcgagatctccagaaatgcctttggttttgtgagagggcggagtgccgttcaaaatgccgggcatcacctgggcgcccagcacattttgaatgtggatatacgacagtttttcccatctgtgaagatcgcacaagtcttcgagattttcatgtccataggttacaacgaggaagtcgctgagatgctttccgaactctgttgcatcgacggtcacctaccacaaggggcccccacgtcaccttccattgctaacttaatcctcagggacctggatgagaatctgtgtaacctcgccgaccggagtggttgcttgtatagcaggtatgcagatgacctgactttcagcagtcattcaagaatcaacgataatttcttggagtctgtgcgcaaggaggttgaaaactcaggattcaaactaaaatcggaaaaaacccgtttctctggacggggcgatcgcatggaggtgactggcgtggttattaatgagaaacttcagcccccgagggactggagaaagctaacccgagccaagttacataaactggatagctccaatcggcttactcgaaggcaacttagctacctccagggcgtaatgggaatggccccgcaattcccggattcaccacagatccagcagttgtccgaaaaggctcgtttaattgccgaacagaaactgcacactataattgggcacggccccaggcctatcctgcaaaacgggctctccctgagagaatcagaggcacttgcagcactggtcccctctaaaacaaacctggaggtcgcgattcagattggaattaacgaggtagtgctggaaaagcggctggaacgtgcttacaaaaagataggagcagaaaaccgccagcaggcgatctcttgggcggatcagaatctttga

SEQ ID NO: 14230 - RNA, 1224 nt, synthetic construct
  source 1..1224: mol_type = other RNA
atgcctactcgcagttactactttccgtctgatttcaggcatcttgatgaaattatcaagttagaggttgacggccttagtagcgcagatctggatcactttcgaaacctgaatatgccccccctgcttagagccgggaccattgccatatttctggggatttcccccaagaccatttatagcataagacggaaccagagtaagcattatcggagtttctgcatgaagaaatcagacggctcactccgtaacattgatacgccaaggacctatctgaaagtcgtgcagtggtggatcctagacaatatcctgaacaaggtcgttttcaacagcaacatcttcggatttgtgccaggaaggtcagcaatccagaatgcccaataccacatgggcgcccagcatctcttgaatgtcgacatccaagattttttcccgtccatttccattgaacgggtgagagccatctttagtactctcggcttcaatgaggaggtagcaacagtgctgagcgagctgtgttgcctgcacgatagactgccacagggagcccctacttcccctgcaatcgccaatctcgtgctgcgagacttagattctgacctaagccggatagccgaggcagagtggtataaatactctcgctatgccgacgatttaactttctcttccatgacaaaaatcgaagataccttcctggaccaggtgtacgaagcggtgaacagggcggggttcgctctgaagcccgctaagacaaggttttcaggtcgtggcggtcgcatggaggtaaccggggtcgtgatcaacgagaaacttcagccctctagggattggcgtaaaacgactagaagcaagcttcaccgactgagagacgctgctcggctgacccgcaaggaagtggcgttcttgttcggaattaagggaatgagcgtgcagtttccagactcccctcagatgcagtcattggcatttgaagctgagaatatcctcaagcagaaatcccacacagtcatagggcgcggtaagcaacccgtcttgccttcgggcctgactctaagacaagccgaagtactcattaagcttaggccacataagaccaatgctgagctggcctacgagctcggcacaaccgaagctgctgtgaaaaagcggttgcaggaggtgtttaaaaaagtttctgttacagaccgcatcgaggccaaacaatgggcagacgaaaacctctga

SEQ ID NO: 14231 - RNA, 1038 nt, synthetic construct
  source 1..1038: mol_type = other RNA
atgccgactaggagctactatttccctaccgaattctcacacgtcgaacagataatccgagccgagtccacggcagacagggaaacaagcttcgctgagtttcggcacttaaatattgcccctatcttctcggggtatgagctggcgaatatactcggcatcggcccaggtcttctcattggcatactgaggaacccccaccagaattatcgacagtttcctgtggtgaagaaaggagggggaacgagacaagtctcatctccccgcacttacctaaaggtcattcagtggtggattctggacaacattctgactcatctggaaacacctgatatcgtgtttggtttcaagcgaggaacctctatcaattggaacgctcggcatcatctgggctcacgccacttcctgaacgtggacattgccagcttctttgatagtgtcaccgaagtatccgtttacgacttgttttctcggctggggtatgccgactccgtgtccagcgtactctgccaattatgctgtctcaatggatcccttccacagggcgctccaaccagtcctgctatcggcaatcagatcctaaagccccttgataactcattatgtgagctgagttctgagcacggcattaagtattccaggtacgcagacgatttgaccttctctagccgggattttatagcccaagacttccttgatgccgtgagactgcgcgtcgccgagatcggatttgagctcaaggacgagaaaacaagatggcgggggccaggcgctcgtacagaagtgactgggttggtggttaccgacttcgtgcagccgcccttgaaatggagaaaacagtgccgcgctactctgcatcacctcgggaaaaaggaaaggctggagcaaaaggacatcagatacctcgaaggtatcctgggatacgcaagtagcttcgaggatgcaaggcagatgcaggcattgaaggccacaaccgcgagactgcttgaagagcatcgctttccctttacagaggttgatcgtaaaaacacccggtga

SEQ ID NO: 14232 - RNA, 1020 nt, synthetic construct
  source 1..1020: mol_type = other RNA
atgcccacccggagttatttcttcccacctgactttcagcatatagaagccatattgaggtccgacgatccgatggcggatgagcttcagtttgagaagtttcgtgagcgcggagtggctccactcctgactgagttcgacatcgcaacagtactggggattggtcccaagttgatcgtgagcatgctgaagaaacccaatagacactaccgtacgtttccactgactaaaaaggacggcagtgaaaggcaaatttcagctccccgaacatacttaaaggtcgcacagtggtggattctggacaatattgtgtctagagttcctgcaagtgaaaacgtgtttggcttctgccgcgggagatcaattcaagataacgctcgataccaccttgggagcacacatatcctgaatgtggacatcaaatccttcttcgacagcgtaaccttctctcaggtgctactcgtcttcaaagaactgggttactcacagccagcagccaaaacgctggctggactgtgtactctgaatggcaagctgccacaaggagcgcctacctcccctaacattgcaaatatggtcctttcaaaagtggatcgggagctcgaagcactcgcctcctctgtgggctccaagtatagccggtatgccgatgatatcacctttagcgctgatgattacatcagtgagcagttccaggtgagggtggaggacgtcgtaaagtctgcggggtttgagttaaaagccagcaaaacccggtacgccggtactggatcgagaagggaggtgacagggctaatctgcggcaccttcgtccaacctccgatagagtggcgcaaactcaacagagctcgcttgcacaacttgggcaaaaagccagttctggaaaagtccgacatcgcctatttacttggccttaggggttattctatgcagtttcctgatgccgttcagatgcaggccctcttggctggagccgacaagctgctcctgagcacaaagaagcccgttcccgaaacttga

SEQ ID NO: 14233 - RNA, 1005 nt, synthetic construct
  source 1..1005: mol_type = other RNA
atgccaagccgttcttttttcttaccacccgatcaactggcaaacgctgcagtattagcggaggccaatcctcccgagaggcatgacgagatcatgcggttggccagccgaggaattgcacctcttgtggacgaggtttccctcgcggagctggtgggtgttacacccagtttgatcttctctatactcattcgcaaggataaacactacaggtctttctgtctaccaaaagctaatggtagcacccgcatcataaactcccctcgaacatatttgaaggtgattcactggttcattctggacaacatcctgtcaaaggtgaagaacaacgactgcgtcactgcatttatctcagggcgcggaccgtacttcaacgcccaaatgcatagcggtgcgcaccatatctttcagaccgatctcgaagagttctttccatccataaaagtgcagaacgtgtatcggatgtggctgtcaatcggctacaatcaggaagtggccgagcagctgagcaatcttgtgacatatagaggcgaactgcctcaaggcgccccaacgtcacctgctatctccaacattgtcgccgggaacctggataagagactactcaaactcgcctatgagtacggctacaagtacactagatacgctgacgacattactttcagtagcaaagagaggattccccttgaatttgccgacgccgtcaatgaacagatcgtcttggggggcttcatcgagagtaggaggaagcgccggttcaaaggctttggtgcagctatgaatgtaaccgggctcaatataaacgattttccgcagcccccacgggaatggcgtaagagaacccgagccctgttccacagagcaaagttagatgccgcctttgctaaagaaaaccggggcaaaatcgcggggtcccttggagttctgcatgcagctggactgccctctcagcaccctctgattcttaatggaaaggaagctctgctcaattcgaagaattattga

SEQ ID NO: 14234 - RNA, 1035 nt, synthetic construct
  source 1..1035: mol_type = other RNA
atgccaccgcgatcatattacaatgagcctcgtccctctgactatgtcgcctttgcgaaagcctttttccccgatgaattgcaggcagctagtgagttcgccgaaacaagaggactcccctatatcaactcttccgcacacatagccgcgtacttaggtgtgagtgccagcctgctgaggcaggtgattcataagcctgcatatcattaccgagagttccccattaaaaaagcatccggggccgataggattgtctccactcctaagacctatttgaaggtaatccagtggtggattgccgataatatcctgaacaagatacaactgtccgacagcgtccacggattcagacggggcaagtcatacttcacaaatgcaagcgttcatttaaatagcaagcacattctaaacgttgacgtggagagttttttcgactccatcacatttgcccagatcaccaatgtcttcaactcacttgggtacaccgaagcgggctcactgacactcgctactctgacatccaaaaacggtatagctcccacgggtgccccgaccagtcctatgattgccaacgctatcctgcgctctctcgacagccacttggaggcttttgctgcgaaatctaatctgctatacactaggtacgccgatgatctgaccttttcgtctccagaatggattgaccagagtgttgtagacgcagttaccaagtatgtggagtcccaaggcttcaaactcaacgctaagaaaaccaaatttatgggcccaggggatcggatggaggtcactgggctggtgacgaatgctggacttaacgccagcaaggagtggcgcaattgggcaaggggcttcctccaccgtgtgtcacgggagcctgccaagcatatcggcgaaatcgaacgggtgagaggagtatacggagtgttgagacagctggatccagaaaagcacaagaaactcactgtggccgctgagcaggcaatggggcatcttgcagacgtgaaacgcgcccttgctggctctaagcaaagctga

SEQ ID NO: 14235 - RNA, 1026 nt, synthetic construct
  source 1..1026: mol_type = other RNA
atgccccctagaagctattacaacgcaccccggcccagcgattacgtggcctttgcaacagcatttttccccgaggacagcgacaatgcagggaaatttgctgaccagttcgggctcccgtacctggagtccaccagacatctcgctggataccttggaatcgccccctctctgataaggcagatcattcaccggccggcgtatcactttcgggaatttaaactgaccaagagtactggcgaggagcgattaattagtaccccaaagacttatctcaaggtcatccagtggtggatagccgataacatcctcgataagattgacttgtccgacaacgttcatggcttcaggaaaaacaggtcttacatttccaacgccataattcaccgggattcccgtcacattttgaatgtagatgtgaagtctttcttctcgaatatcaagatcgacaacatcttcaatgtgttcagcgcacttggctacggtgacgctgggagtttactgctgtcaacactaacctccaaagatggaatggctcctaccggcgcccctacttcaccaatgattgctaatgccgtctttagggacatagacactcagctgtcaaaattctcccagcaaatgggtctgctatatacaagatacgctgatgaccttaccttcagcagcatggagtggatcgagcatgatgttttggaagccgtgtcacagatcgtagaatcaggtggctttaaccttaatagcgcaaaaacgaagttcatgggaccaggcgataggaaagaagtgactggggtgacagtcaacgccgggctgaatacctctaaggaatggcgcaacagtgtgcgcggctatctccacagagcgttttctaatccagccgactatatcgccgatgctgccaaggttcgcggtatttacggaatcctgctccagtttgaccctacaaaggccaagcgtctgacacaaacggcagagcagaccatgctgcgactgttgaaagcgcaacgcgatagtgcttcctcttga

SEQ ID NO: 14236 - RNA, 1035 nt, synthetic construct
  source 1..1035: mol_type = other RNA
atgcccccgcggtcttattacaactcacctagagcgtccgactacatagcctttgccagggcctatttccctgatgagcaagaacaggctaactccttcgtgaatacatataacctaccttacatcagcagctcccaccacatcgctgcctacttgggcatctcaagcgcgctggtgagacagatcatgcacaatcccaattaccattatagggttttcccgatccagaaaagctccggcgatccacggatgatttctactcccaaaacctacctaaaggtgatgcaatggtggattaacgataacattctcaacaagattcagctgagtgaatccgtccacgggtttaggaagggaaagtcatacattactaacgcccgcgttcactttggagcccggcatatcctgaacgtggacatcaagagcttctttgataatatcacaaccccccaaattgcaaacgtattttccagtatagggtactgcgaaagcggaagtttaactttagcagcccttacttcaaaacagggtaaagctcctaccggtgcaccaacttctcctatgattgccaatgctatcttcctgaaggcagacgaacagctgatagagttcgctaggtctaaaggcctgcgttatacccgatacgccgatgacctcacattctcaagcgatcatcgcatcgacgaggaggtggtgggcaaggttaacgccattgtcaaaagctcgggttttcagctcaatgacaagaagaccaaattcatgggcccaggcgatcgtcaggaagtcaccgggatcatcattaatgagagaatgaacttgtctaaggagtggcgaaattttgcaagagggtatatccacagtatactgtcgaacccctccggaaatattcaagaaatgggacggcttctcggcatatatggggtgctgctgcaggtagaccagaacaaagagagtaatcttacgaagaatgcttacaaagcgatccgcattttgaaggacacggagcagacaaccacacatgctgagccatcttga

SEQ ID NO: 14237 - RNA, 1017 nt, synthetic construct
  source 1..1017: mol_type = other RNA
atgccacccagaagttactacaaagaacctagagtttcagactatattgcctttgcagatgcttatttccccgaagaaaggaacttggcggccgaatttgccgagcgcacccgtctgccctacgtagagtcgtctaagcacctggctgcatatgtcggagtatcaccttccctcctgaggcagatcatgcacaaacccagttaccattacagggaatttcccctgcacaaagctgatgggagcgagcgaaaaatcagtacacctaagacctatctgaaagtcgtgcaatggtgggtcctcgataatatcctcgctcgccaggcacttgacgaatgcgtgcatgggtttcgcagcggtcgcagctatgtcacgaatgcgagagtgcaccaaaactctcggcatatcctgaatgtggacataaagtcctttttcgacagcattaagatgtcccaggtggccaatgtgttcctgagcctcggatactctgaggccgggtccctgacactgacagctctgaccacgaaggacggagtagcgccaactggcgcaccaaccagtcctatgattgccaacctgatcttccgtgacgctgacttggcccttgccgagttcgcagaggccaacggtcttatatactcccgatacgcggatgatctaactttctcaggccagcatcggatccccgacgaagccgttgctaagattgctgaaatagtgaatgccgcaggttttgagcttaacatcaagaagaccaagtttatggggccgggcgataggcaggatgtgactggcgtggtggtcaattcaggcttaaatgcaccacgggagtggcggaactgggcacgaggatatctccaccgggtgcggctaaacccggataagtctgccgaagagctcgggagagttaggggagtttacggcattctgagacagttcgaccctgagaggaccaaaagcttgactagagccgctttcgagacattagaggccttgaaacagtatcgcacagagccatga

SEQ ID NO: 14238 - RNA, 1008 nt, synthetic construct
  source 1..1008: mol_type = other RNA
atgcctccccggagctactatgttgactcccgcatttccgattatatcgctttcgcaagcgcatactttccggaggaaaaagcccttgccgtggagttcgccgagaggaccggtctgccttacatcgagtcgtcaatgcacgtggccgcttaccttggcgtgtctccatctttgatccgtcagattatgcacaaaccaagctatcactaccgggagttcacgctgaagaaaaccgacggtggcgaacgaaagatctccacacccaaaacatatttaaaggtcgtgcaatggtggatactggataacattttggctcggcagccgttaggcgaatgcgtgcatggatttcgcagcggccgcagctatgtgaccaacgctcagacacacgagaagagtcgccatatcctcaatgttgacattaagtctttcttcgactcaataaagatcagtcaggtgtccaacgtttttgcctccctcggctattccgagtctggatctctcgctcttactgccctaacaaccattgacgggatcgcccccacaggagctcctacaagtcccatgattgccaacctcattttccgggatgccgacgtcagtctggtggcatttgcacaagctaacgggctgatctatactagatacgcagacgatctgacttttagcgcccagcacaggatagcagaggaaatcgtcgatcagatcgcggaaatagtggatgcggccggcttcagactcaatactaagaaaaccaagttcatgggtcctggggacaggaaagacgtaaccggcgtcgtagttaattcacggctaaacgctccacgagaatggaggaattgggctcgtggatacttgcatagaattagactgaatccaacggagaacgccggggaagtgaggcgagtcagaggaatttacgggaccctgagacaatttgatcccgagcatgcgacttcactgactaggatcgccctgcagacccttaatgtactgaagcaggcacgctga

SEQ ID NO: 14239 - RNA, 1095 nt, synthetic construct
  source 1..1095: mol_type = other RNA
atggcggcactgcaaccacgggctgaatttagctccgcgtcttacaaggcaagaactaagcagagtcaggactggtgctgtagaatgccccccagaagctactacaatagtccgcgcatcgatgattatttagcatttgccagagcctcattccctgaggagtctgaggctgcaggggccttcgccaaccgaactgggcgaccttacctggagaacgagattcatctggccagctatcttgggatttccccatccatcattcgacaaattttgcaccgtcctaggtttcactatcggacctttattctcaaaaaagctgatggcaccaaccgtattatacggacaccaaaaacctatctcaaggtgatgcagtggtggataaacgacaacatactgatcaccaaggagatggcggaagccgtccacgggtttcgcaaaggaaggagctatattacaaacgcagctgcccacgctggtgcgaaacatctgctaaatctggatatcagccgcttcttcccctcaattaccgctcagatgatcgttggcgtgtttcggaatctaggatactctgccgcgggctccgatttcctcgccagactgacttctcttgatgatgaggcacccactggggcaccaacaagtcctctcatcggtaatctgatccttgacaacttcgaccagacagtttcagaactgtcggctgcacgcaacatcacgtatacacgctacgccgacgatctgacattcagtgccagaacgaggattgacaatgagtttttaaaggaagtgaccgccttcgtggaaagctcaggttttgatctcaatccgaagaaaactcggttcctgggtaagggagacaggatggacgtgaccggcgtagtcataaatgaaggcctgaacttgcccgtggagtggaggaactgggctaggggctaccttcagcgcgccatcaggaatccagtcgagtttgttcagcaccatcctgccatcgcaggcatcttcggagtattgaagtctatcgaccccgacgaacaaagacatctcactcagaaagccaagtccgctttgaccgccatacggtccgctggagcttga

SEQ ID NO: 14240 - RNA, 1011 nt, synthetic construct
  source 1..1011: mol_type = other RNA
atgcctccgcgctcttactacaacagcccccgcgtggacgattatctggctctggctcgcgccttctttgcagaggacgctgacgcagcagccgcctttgccgaggtggaaaggaggccctatattgagtctgaaacacacctcgccagttacttaggcatctcaccaagcatcatccggcagatcctcaggcatccgaaatttcactacagaacctttaagcttaagaaggcagacggaaccaatcggattatttgtacccctagaacttaccttaaagttatacagtggtggatctccgataatatactgtacacagagcagccagatgtgtcggtacatgggttctgcaagggaaggtcctatatcactaatgccagcgcgcattccggcgcaaagcacctgctgaaccttgacataagaaagttcttcccttccattacggaagaaatgatagtcggcgttttcaggacactggggtatagtccagccggtgcgtcattgctcgcacgactgaccagtctcaacggcgaagcgcctactggagcccccacttcacccgctatcggaaacctggtgctggccgaattcgataaagctgtgtctgccgcggccaccgctaacaacatcctctacacaagatatgccgatgatctgaccttcagctctcagaatcggatcaacgaggactttttagccacaatttccaccctagtccagtccagtggctttgagcttaacctgaagaaaactaggtttctggggcgaggggccagaatggacgtaacgggtttggttatcaatcagggtttaaatctcccaattgagtggcgtaattgggcacgaggatatctacaacgggtggtgcgcaatcccgccgctttcattgaccaccgttcaaccatcgctgggattttgggcgtcctcaaaagcatcgaccctactgaggatcggggcttgacacagaaagctaagtctgctctgcgcgcaattcaagagcaagcaagctga

SEQ ID NO: 14241 - RNA, 1017 nt, synthetic construct
  source 1..1017: mol_type = other RNA
atgcccccaaggagttactatatcgaacctaaacagtcagattacctggccattgccaaagcattttttcctgaggagctgaatgacgccagagactttgtcgagcaaacagggctgccatatctgaaaacttccgcacacgtcagcagctatctgggcgtgtcccccaaactggtgcgccagatattacacaagccgtcataccactatagatttttcgagattcctaagtctgatggctccctccgagcaatcaccacacctaaaacttatctgaaggtcgttcagtggtggatctgcgataatatcctcaatcaaatgccactccatgactgtgtgcacggattccgttccggccggtcttatctcacgaacgctaaagcccacttcggccagaagcactttttaaacgtcgacatcgagagcttcttccccagtattggggcagaccttgtggaagctaccttcctagagatgggataccatagcgacggagcctcagtgttgagggatctggttacccttggtggagctgctccaactgggtcgcccacgagtccgatgattggtaatctggttctggccaagtttgacgctctccttacagaatacgtggcggatagagggttcgtgtacacacggtacgcagacgacatcaccatctctagcaagcactggatagatgatgaggttctgggggatatttccgcattggtgcagaagtttggcttccggctcaacgagaggaaaaccaagttcatgggacccggcgaccgacaggaagtaaccggtattgtattaaactcatctcccaatatacctcgcaactggtgcaacagcgtgagaggttacctgcatagggtcaaattggcccctcacaagcatgtggacgagcatgccaaagtgcagggcattctaggaactctgttggccgcggatccagaagctgaacgtaagatcacaaaggctgcgcgcgaggccgcccatcttgtaatgctggaacggctcatgcaatga

SEQ ID NO: 14242 - RNA, 1002 nt, synthetic construct
  source 1..1002: mol_type = other RNA
atgccccccaggtcctattatctcgagccgcagaagacagattaccttgcattcgcaaaagcatacctctctgatgaatatggaatagctaaagcctttatagacgagaaaggcctcccatacatacgcaacgctgaccatctggccgcctacctgggtgtgagtccctccctggtgcgccaaattttgcacaagaaggaataccactatcgtcaatttcctctacctaaggcggacggaccacccagactgatctccacgccaaaaacttatttgaagaccatccagtggtggatcggcgataacattctcagtcatgttgcgctgggggacgaggtgcatggctttcggcagggacattcctacgtgaccaacgctagagttcaccttgggtgcaatcacattctgaacatggacatcgaacagttctttcccagcattacaaaacccatgacgactagcgtctttacatcactgggctatgggaaggaaggggctggggtgttggccgagttatgtacacttgatggcagcactccaactggcgctcccacctcgcctgcaatcggcaacatggtcttggtggacttcgacagagccatgacaaagctggccggggaaaataccttaaaatatacgaggtacgccgacgatctcaccttctcttcaaacgaatggatcagtccagaattcgctctgcaggtggaggaggtcctgaaggggtacggattcgcgccaaaaggtaccaagacaaagttcatgggtcgaagcgataggatggagattaccggcgtaactatcaatgagggtaccaatccgcctcgagaatggaggaattgggctagaggatttctccatcgggcacggatgaatcctcaccagtacgcccacgagtggaagaagatcgccggcatttacggaacattaaaatcaatggaccctgatgaggataaactactgactaagcgggccaaacaggttctgaaccttgtacgctcttga

SEQ ID NO: 14243 - RNA, 1035 nt, synthetic construct
  source 1..1035: mol_type = other RNA
atgcctcctagatcctattaccattcaccacgacactccgattacctcgcatattttacagcctatttcccaaatgagttgcaagtgtgcagagcatttctggaagcaaccaactatccctatatcgggaatatccatcacttagcggcttacattggcgtttcaagcgctctcctcaaaaaaatcataagcaatgtcaactaccactacagtgacttcacaattcccaaaggtggaggaaaagagcgcgtaatttactctccaaaaacttacttgaaggtaatccagtggtggatctgcgacaacatcttctccaacctgaagtttaatgagtctgtgtacgggttcgtcaagggtcggaactacatagacaacgccaaaaaacattttggaaggaaatacatcctgaacgtggatgttaagaactttttcgattccattagcactgaggatgtgaaaaagattttcctgaagttgggctatccaatttcatcttccgaaatcttaagcaagctgtgtaccctggacaatcggctccctactggagctccgacaagtccggtgatcgccaatctgtatttcaaggatatcgacaacatccttgagctggagagtattaagaatgggtggatttacaccaggtacgccgacgatctaacgttctccgccaataccaagatcaactttgatttcttggaaacccttaagaacgtgctggacgaatatcaccttaagctgaacgacaaaaagaccaagtttatgggccctggcagccgtcaggagatcacaggcattgtggtcaattctgtcataggtatgcccaaatactggcggaataagactagaggatttttacacaacgtgaggaaagaccccagcaataacctggacaaaatacaggaagtgaagggcctttatggggttctgatctatctagatcccgagaagaatcgctcgataacgaagcaggcctatgaggtcctcgggattctcaaatcacataagaagcctctgcatgaaaccaaacacaagtga

SEQ ID NO: 14244 - RNA, 1017 nt, synthetic construct
  source 1..1017: mol_type = other RNA
atgtctccccggacgtacgatttaatcaccaacccaaagtatatcgacttcatttccgagagtgtcaggtccggctgcagcctggaggatgtaaaatttccagtgcctagtgtgtccctgccagccctcaacaaagcagaagacatctcctactatcttgggatcagtcccgagctgatctggacgctcatacgctctccccggtacaagtacaatactttcagcgtgaggaaaaagtcaggaggtagccgcgtgatcagcgctccccgtacatacatgaaggttgtccagtggtggatcaacgacgtgattctctctaaatttcctcagcgcgataatgtgttcgggttcgttccgggggtgagttacgttgataatgccgcttaccaccacggcgcggtgacaatgatgaatgtggacatcaagaacttttttcctagcatcaagtcagaagatgtgcttgtatgtttcatgaagattggctattccaagcaggtcgcccttggactcagtgccttgaccacctatgcaggatttctacctcagggtgcacctacttctcccaacctttcaaatattgttttctccgagtttgacgagaaaatttcgaacatttgcaagctatacaacttaaagtactcacggtatgctgacgacatgaccttctcttccattggtagagtcccgaaagactttcatagaattatctcacgtgaactgttccctaagttcctcctgaacgatgaaaaaacccaatatatgggggctggggacaaaaaggaggtcactggcctggtcctgggaagagatggcccagccatctctagggagaaactgaatggcctccgaggctggttgcatcagataattgccaatccagagcaatatgtggatgatctggaccgattgagcggaacactggcaatggtaaggatggtgggcggacgagggacaggacccatactgttgcaaggcggtagagccatgcaggcgatagaacagagcctgcggatctga

SEQ ID NO: 14245 - RNA, 1797 nt, synthetic construct
  source 1..1797: mol_type = other RNA
atgacattcccagcagacttccggagggtgacgaccagagaagcgctgataaccgctatcggcaccgacgaggccacttttgaagcgattttagcatttgaccccccacggacaagagaagaacagatcgaggcccttcaaagggccgctgatgccgcgtccattgaagatatcccggtattcctgagacatgacatcccgaagcggaacagacgtagaggacacagaacggtttgggagccactgctaggaaagcccggatatcgcacactcgctcggcggttggagacattttttaggatcgcccttcctgggtatcctcacgacgcagtgtacggctataggcctggaaggaacattcgcgaaaatgcctccgctcacgctggacgttccgcacttcttaatgcagatctggagaactttttccccagcattactaccgacagggtggccgctctcttcacaaagctaggactggtccctgacgtcgctgagctgttggcccgcttcgtgacgatcggtggtggactcccgctcgggttacccaccagtcccgtcatcagcaatgcagtcgccctgccattggaccttgcttgtgcagccctggcatcaggggcaaatgccacctacacccgatacgccgatgatctgacattctccggcgatgatcagctgccagcaatcgatgcgctgcgcagcgtggtagaagcccaagggttcgttctcgcagaagacaagactaggcgatcgaaaattgggcaggcgcattatgtgactggactctccatctctgaccccgcccaaccccacgtgccaagagagaggaagcggcgtctgcgccaggagctgtactacgccggaaaatttggcatcgctgatcacttccgccacagaggtgttaacgacgctcgagtgatccagcaggaggtcaaccgagtggacggccttgtcagattcgtggcccatcatgaacccgcgatggcccctcggttgcggactcaatggcggaaagccttacaggacgagggcatgaaaccaagttttgcacctcgcggtcagcatcgcgctcccttcttcatcttcgtggacgaggccgaatttgatcgcggggggcagaaggtactagcaattggtatggccgtctcacagcatggcccacgaatggccatagaggccgggcaggtacttgaagccgctttggcggatatgtatctggatggagatccagctgccctgcgtaagcgcggcttgcacttcgtcgacgccaccgaggatctgaggatagcctacgtgagaagactggagggcatgcggtttgagggctatgtggcttttgctgactgcgatgatccaagtagatatgaggaaacatatctccgactgctgggtgcaattattgaaaggaggctcaaagccgcggaatctcagttagccagcttttacatagagcagaatgagaaagtgagtgctcacagggtgaaaggcttaattcaggatgcttttgacagactaaaggcacgtgacgatcggcggcccgttgacttcgcagttcaattcgtgagcaagcctcacctcggcatctcagctccagactttctgctcgcagttctcggccgatacttgaagtcaaaggctgccaaacctgggaaaccggagcccagagatcgactgatgtttgagcggcttagggacaagtaccggctgatactcgatgtcactacctggactgaatactctcgcaggcgccctattctgccctggagcgaccagacccctccttctgacgacggggcttga

SEQ ID NO: 14246 - RNA, 1785 nt, synthetic construct
  source 1..1785: mol_type = other RNA
atgacatttccagcagactttcggcgcgtcaccacacgggaagccctgatcaccgccattggcactgacgaggccaccttcgaggccatactcgccttcgatccaccacgtacccgcgaagagcagatcgaagcccttcagcgagctgcggacgctgcctcaatagaggatattccggtatttctgaggcacgacattcctaagcggaatcgccggaggggtcatagaaccgtgtgggaacccctattagggaaaccagggtaccggacactggctaggcgcctcgagacatttttccgcattgccctgcctggatatccgcacgacgcggtgtatggttatcgccccggaaggaacatcagggaaaatgcctccgcgcacgctgggagatccgcattactcaacgccgacctcgaaaatttttttcccagcattaccaccgaccgtgttgccgccctttttaccaaacttggcttggtgcccgatgtggccgagttgctcgctaggttcgtgacgattggtggaggcctacctctgggactgcccactagccctgtgatttccaatgccgtggcactgcctctggatctggcctgtgcagctcttgcgtcgggcgctaacgctacatatacgagatacgccgacgacttaacattcagcggcgacgaccaactccctgcaatcgatgctctgaggtccgtcgtggaagcccagggctttgtactggcggaggacaagactcggaggagtaagatcggtcaggcccactatgtaacaggattatctataagcgacccagctcagccacatgtgcctcgggaacgaaagcgtcggttgaggcaggagctgtactacgctggcaagtttgggatcgccgaccatttccgccaccggggagtgaacgatgcaagagtgatccagcaggaggtgaaccgggttgatggcctagttaggttcgtggcgcaccatgaaccagctatggcgccgcggctaagaactcagtggcgaaaggccctgcaagatgaagggatgaaaccctcattcgcgcccagaggccagcatcgagccccatttttcatatttgtcgacgaagcagaattcgatcggggggggcagaaggtccttgctatcggcatggcggtcagtcagcatggccccaggatggcaatcgaggcaggccaggtattggaggcagccctggccgatatgtacctggatggcgatcccgccgccctcaggaaaagaggcctgcactttgtcgacgcaaccgaagatctgcgcatcgcttacgtgagacgcctcgagggaatgcgcttcgagggatatgttgccttcgcagactgcgacgaccccagccgttatgaagagacgtacctgcggctgcttggagcaatcatcgagcgacgccttaaagcagcagagtctcagctggctagtttctacattgagcaaaatgagggcctgggagcccaaggtcagagggctgatccagggcggctcagaccttctcaaggggccaggcgtccaagcccaggtggattgagacgacctgtccgcctcgaggctgcatcaggcgaccagagggctgggttcagcgccagaagatcccgatccatatctcaggtggagtctggagaaactgggcaagccggtgcagctcgtcctgctgatgtgagagcactcgctaggcagatttcggcagatcccagacgccacgatgttgaccgagttttggccgctactagttacccttcattggtccggccggatcccgccgagagatga

SEQ ID NO: 14247 - RNA, 1770 nt, synthetic construct
  source 1..1770: mol_type = other RNA
atggcgttcactccagactttagacgattgtccaacagggaagccgtgcggggagctctgggagtaagcgaggatgtcttccaggccgttcttaccttttcaccggaggcggtcgtgggcaaacccgaaatggagggagggttttacctcgcctccagcatcaccattcctgtcttctttcgccacgacattccgaaacgcaaccctgcccgcggggtaaggactgtgtgggaaccttctatcgaggtgaagagcgtgtataaagccctcgcccggagactggatctctttttcagggcacacttggatggttttccacatgatgctgcctatggattccgagttgggcgtaatatccgtgagaacgccgctcctcatgctggacatcggcatctcgtggccaccgacatagaggacttctttccatctataagtgtggacagaattcaggggctgttcaatgagctcggctgccggaaggatgctgctcaggccttggcccaatttgtgacgattggcggcgaactgcctgttggtttaccgaccagtccagtgatcagtaacgccgtggcactccctctggacagggacttagccgcgctggcagccacaacagggtcgacatatacccggtatgccgatgatatcgcactttcaggagatgtggagccaccttcttcagaggaaatcggccgcgtcctggaagcccagggtttttgtctagcagagtcaaaaacacgtcgatccaagatcggccaagctcactttgtcactggacttagcatttccgaccctgtcagaccccatgtacctagaaggacgaagcgggaaatgcgccagaccctgtattacgcaaagaaattcggtctggacgaccacctcggctacagaggttactctgattggcgcactgcccagaccgagattaaccgcttagacggcctggtgaagttcatcggacaccacgagcccacactggcttcgagtcttaaaagagcatggtccgaaattctgagggacagcggcaatcaggctagtttcgagccccgcaatcagcaccgggaaccctttacaatattcgtagacgaggcggagttcgagaggaatggccgacccgtactggcccttgctatggcagctacacaacaccccaacgtgattcatgacgatagcgaccgggttcttcaggcttacctgtctgacctttttgccgacgggcgacctgaagtgatacggaaaaaagggctgcacttcgttgatgcgaccgaagatctgcgcagatcttacgttgaggcgatgaggtccatgccattcgagggctacgtggcttttgtcgagtacgacggtgcagcagattacgaagcagcatacttgtgtctcctagaagccatgaccccgcgacgtttgatggcggctgaatcacaaatggcatccttcatcttcgaggaaaatgataaggtgtctagaactgcaatcgaaacttgtgtgattgctgtccattcagccctcgtggagcgttgcgataggcacccaaagtgcatcggcatcgattatgctagtaagccccatgccggaatagcactgtccgacttcctcctaggggtcctggggcggtatttaaggagcgagcccccagccccaaatgctactagccgggacagattgcggtttgaacagctgcgcgacaagtatagggtcattctggatgttacgaacggccgcgagtacagcagaagaaggccaatcgccccctgggccgatcccttttga

SEQ ID NO: 14248 - RNA, 1752 nt, synthetic construct
  source 1..1752: mol_type = other RNA
atgaccaatagggaagctctcatcgcggctattggtacagacctggctacgtttgatgcagtgcttgatttcgtcccacccccacggagagtgggatcggaagcaccggaaaccgagaaggtgcaggtgttggaaattcctgtatttctaagacacgacatcccgaagaggcgccgaaaaggcgaatttcgaaccgcatgggaaccagtgcttgccaagtccgagtacaaggccctggcacggaggctggactcattttttcggttaaccctggctgggttcacacacgattgcgcattcggatttctccccgggagaaatataagggaaaacgcaactgtgcactcagggcacaggcatctgttgggagtagacgtgcaggatttcttccctacaatcacacgtgcccgtatcgagcggctcttcacggaagtgggcgtggagacaagcgtggctgaactgctggctcggttcgttaccataggcggctccttacctctgggcctccccacttcccccgttctaagcaatgctgtgtctttgccaattgacgtcgcctgtgatgccttagctgcccgacggggagccgtttatacccggtatgtggacgatatgagtttctctagcgacgacgagctacctgacgtggaggatgtgcgaagaatcctggccgagaacggctttggtttaagtgagagaaagacccgccggtccaggattgggcaggctcactacgttactggcctttcagtgagtgatggtgtcggaccacacgtcccccgtgagagaaaacgtcgcctcagacaagaacttcattacgcacggaagttcggcctcgcggatcacctgcgccacttaggcgtcaacgacgatagggtcattcagcagcaggttaaccgcctggacggcatggtgcgtttcgtggttcaccatgagcccaggatcgctccccggttgagaaccgagtggcgtgcgctgctgaaggataatggtatgtctccatccttcgtgcctcgcgggcagcatagagccccattttacatgtttatagacgaggccgagtttgacagggatggggagcgaattctcgccttgtgcatcgcgatcactcaacatggcccccttatcgcaggagagggggctgctattctggcagccgccatgacagatccgtttagcgacggcaatgttgacgctctgcggagaagaggtctgcattttgccgatgctactgaggatctccggctggcatacgtcaccagattggcaagcatgagatttgagggtttcgtggccttcgccgatcttcctgatccggccgcctacgaggaaacgtatcttcggttgctcggagccatgatagagcgccgactgatggcagccgagagccagtatgcctatgtattctgtgaagcaaacgataaagtcgggcgcggagggatcgaggaatgcgttgcgactgcgcaacgccgcctgaaagaccgcgacgatagaaggcctgtcggcgtcggagtggaattcgtaaacaaacctcatctggggattagtgtgcccgactttctcttgggtgtcctagggcgctacctgaggtcaccacctgtacccgacggaaggccagaacgacgggagaggctgatgttcgagcggctgagagataaataccgcctgattctcgacctcacagactggactgaatattctaggcgaaggcccatcaggccatggaatgacgccggcaacgacgctccttga

SEQ ID NO: 14249 - RNA, 1746 nt, synthetic construct
  source 1..1746: mol_type = other RNA
atgtccttcaattacgatttctcccgcattaccagccggggctccctactggctgcgctttccatagacgaggcactcttcacacaagtcctagattttgtgccacctcctccggcatggtcagtccctccaagccccccagatgaaatctcaaagctgatggtgcccgcctttttgcgccatgatattcccaaaagaaacaccaagaggggccacaggacagtgtgggaaccggttttagccaagggaacgtacaaagcattgggtcgccgccttgactctttctttcgtcacaagctggacggctacccccacaagagttccttcggatataggccaggcaggaacatccgtgagaatgccgccgtgcatcgaggaaagaagtttcttctgagtctcgacctgcaagactttttccccagtatttctcggtcccgcatcgcctcaacttttgagcatctgggtatcgcccctgacatagccgctcttttagcccgatttgtaactattagtgatgctctggcgatggggctgcctacttcccccaccatttccaatgctgtggctctttgcctagatcaggcactagaggaactggcactgcggtcaggggcagtgtatactaggtacagtgatgacatctcaatatcttctgataatgccctcccagacctggccctcatcgcccaaatcgtgagcgataacgatttcaagcttgccgacgagaaaacgagactgagtgtccgggggcaggctcactatgtaaccggattaagcatctctgaccctaaccagccacacgtgccaaaagctaaaaaaagacgtttgagacaggagttgtactacgctagaaagttcggcttgggtcagcatttacaccggcagggcattaacgatcctacagttgtgcagcaggaggttaatcgactggacgggatgattaagttcgtggggcaccacgaaccaaagctgtcgtcagtaataaaacaggagtggtgcgaaattctcactgcagctgatatgaaaccgtccttcgcccccagaggaatgcatagggccccatttgtactcgtcattgacgaagctgagttcagcagggacggccaacgatacctcgctctgtgtatcgttgtgtctcagcaaatggacagggtcgcagaggaaaccggacgggtgctgagcaatgccttgaatgacctctggggcgacggtaatcggaacgcaatgctcgcccgggggctgcatttcaccgatgctactaaggatctccagctggcctacatcaaggagctggccaccatgcctttcgagggctatgtcgcgttttgtgagtacgacggccccaaaaactatcaagcagcatacctgcgcctgctgagcgctatgatccctcgaaggctcatggcggccgaatcacagtatgccgcggtgttggtcgagcagaacagcaaagttagccagacagctataaccgagagaattagcgaagtggccgccgatcttaagagaacaaacaatcgccgtcccaaagatacactatccaagctgttgtctaagccaaaccccttcctgtcgcctcccgactttttacttggagttctcgggcagtatctgaaatctaaaccggcggcacccgaaccaagagaacggttgagctttgaacggctgcgcgacaagtatagactgatccttgacctcgatgccagggctgagtacagtaggcgacgccctatcgcaccctggtga

SEQ ID NO: 14250 - RNA, 1746 nt, synthetic construct
  source 1..1746: mol_type = other RNA
atggcttttgtttatgactttactcggattaccacccgagatgccctgctggacgcactggcgatcgatggcgctttgttcgatcagatcttagccttcgagccaccccctcccgcttggcttgagagcaagtccgtgagggactccataggtaccatctccattcccgcgttcttcagacacgacattccaaagaggaatgcgtctcgggggcatcgaaccgtgtgggaaccagcccttgcaatggggagttacaaagccctggccagacgcctggatgatttttttagatacaaactcgtcggttatccccacgatagcagtttcggctatagaccagggcggaatattcgggaaaacgcagctcctcaccgcgggaaaaagtttctgctgagcatggatttagagtcgttctttccttcaataagtggcacccgagtcgccggcttattcgagactctgggcgtgcagccgaacgtggctaacctccttgctcgatttgttacactgggaaacgggctggcaatgggatttcctaccagcccggtcataagcaacgccgttgcccttcccctggaccaggctttgcaacagctagcgaggtctactggctggacatatacgagatactctgatgacataagcgtgtcatccgacaactcctttcccgagattgaccaaatctccggcgtcatcttcgataatggatttcaattggccgagggcaagacaaggtggtcccggcagggtcaggcacattttgtgactgggttatctattagtgatcctgcccaaccacacgtacccaaggccaagaagcagaaactcaggcaggaactttactacgcacagaaattcgggctggctgatcacattcagcgcaaaggagtgaatgacccaaagatcatgcagcaggaggtcaatcgcctggacgggttggtgaagtttgtgtcttatcatgagcagaaactgtctcctaggttgaaggagcaatggcacaagattatcacagttgccgatatgaagcctagtttcgaaccgaggaaaatgtcaagggtgcccttcgccttgatcatcgacgaggcagagttcccacgaggtgaccgacgttaccttgctctgtgcattgtggcaacgcagcatgtagataaagtcataggcagcacacggcaggtactgacgacagctctcaacgacctctgggcagacggaaaccggcaaagcctccttgcacgcggcctccacttcaccgatgccacaaaagacctgcagctggcctacattaaggaacttatgaccatccccattgagggatatgtcgccttttgtgaactgcacagccatcagaactacgaaactgtgtacctacggctcatggctgccatgatgccccgcagactgatggcagctgagtcccagaaggcctcaatcatggtggaacagaactcaaaggtatcgcaaactttggtgaacaggtgcatagcggacgtgttcgccgaactgaaacggaccaataatcggaggccacgtgacctaactattaatttcgttaccaagcctaatcccatcctgtcccctccagacttcttgctcggagttttaggtcagtatctgcgctcaaaacctgctgaacccgagccgcgtgagagactcaattttgaaagactgcgcgataagttccgcctcatcctagatctcgataacgacatcgagttttctagaagacgtccaatcagtccttggtga

SEQ ID NO: 14251 - RNA, 1776 nt, synthetic construct
  source 1..1776: mol_type = other RNA
atgtacgccctgcacttcagtcgactcaagacacgcgacgacgtgatctccgcacttactattgacgaggcattgttcgacaaaattattgcttttgaacccccccctcctgctgctcctagatctgcggaacctccagtgcctaaacccgaagcagccgtccaaacgatagttttgcgagagccacctgtcttcttccgacatgacatcccaaaaaagaacaaagccagagggcacaggactgtgtgggaacccgtgaattcaatgcctgcctacaaagccctggcccgtcggctcgaggcattctttaccatgctcccagactacccacatgaatgtgcatacggatataggccgggccggaatattagggagaacgccagcgctcattccggcaataagttcctcttgagcctggacattaaagacttttttccatccatcaccgtggagagagtccggtggctgtttgaagctatgagcatcgaggcttacgtcgccgatctgctagcgcgcttcgtaacaatcggcggtgcactaccactgggtctgcccactagccccgtgatcagcaatatgatcgcgctccctctggatgacttactcagggatttagctggtcagtacgaggcagtgtatacccgctattctgatgacataaccttctctggcaatggcgatctgcccgatatcgaggagatcagacccgtgcttgcagctttcgattttgccatcgctgataggaagactcgacgttcaaagcgtggccaggcacactttgttactgggctttcaatttccgatcctgctcaacctcacgtcccagcggacaagaaaaggtccttaagacagacgctttatttcgcagggaagtttgggctggccgagcattttcagcatcgaggcatcaacgaccagaaggtgattcagcgggaagtaaatcgcctcgatgggcttgttaaatatgtcgcacaccacgagccccgcatggccacatcgctgaaagagcagtggagacaaatccttgccgactcggggatgaagcccagcttcacaccacggggacagtaccgtgcacccttctatttactggtagacgaggctgagtataggcggggtgatgacaaaatgctcggactggccatggctgtcacacaacacccgcagagactggccgacgaaaccaacggtatactcacccgctttctagccgacttatggtctgatggaaacgatacagccttgaggaagaacggcctgcactacacagacgccaccgaagatctccggagtgcttacgtgaagcagctggccacgatgccgttcgagggctacgttgctgtgggcccccttgacgcggatgcaggatacgaggcctcatacctccgactgttgaaggcgctgataagtcggagactgatggccgccgaaagtcagtttgctttcttgattatagagaagaacggaaaagttgcccaggacgcgatcaaggcctgcgttcaagaagcttttgatgccttgaaacttgccgacaacaggcgccctaccgccttcggagtgaatttcgtggccaagccgaatgctttgattagcgtgcccgattttctactcggggctctggggaagtatctgcagtctaacccagcagcaccaggacgcccagaacctagagagcggctgctgtttgagaggctgagagacaaatatcggctgattgtcgatgtagatccctggaccgaattcactaggcgcaacccggtgaagccttggtcctga

SEQ ID NO: 14252 - RNA, 1749 nt, synthetic construct
  source 1..1749: mol_type = other RNA
atggaatactggcacgacttgtctcgattggaaagccgagaacaactcattaccgccttgggcatacccgcagccctgtttgacgcaatactggccttcgagcctccgattatcgggtgcccggtcagtgaccctacaattactacagagattggtatccccctgtttatccgtcacgacatccccaagaagaataaaactagggggaatagaacggtgtgggagcctttattaaacaaatctcattacaaggcgctcgcccgacggctgggtagctttttccgcttgaaactagatcaatatcctcacgattcagtctatggatacatgagcgggagaaacatccgcgagaacgcaaaagcccacactgggcatagggttctgctgagtatcgacatacaggattttttcccatccattacaaccgaaagcgtttgcagactgttccagtccctcggagtgaacgcaaccgtgtcaggccttctctcccgcttcctgactatcggtacaactttacccctggggtttcccaccagtcccattatttccaacgctattgctcttcctattgatctcgagcttaaagctctggccgacctcatcgacgctacttatacccgctatgcagatgatctctctttctctagcaatggcaagatcccagacgttgaggaagtgagggccatacttggttccaacggcttcaaaattgccgacgcaaagacccggcagtcaaaaatcgggcaggcacactatgtgacaggactatccatctcggacccgcttaggcctcatgtaccgcgcgagagaaagcacagcttacgcagagagctgtactttgctagaaagtttggccttgcagaccacctgcgtcatcggggagtgaatgacgactcagtcatccaacaggagattaaccggatagatggcttcgtgaaattcgtggctcatcacgagccacgcatggcagctgatctgaagaccggttggagggagatacttcttgccaatggagccaagccatcttttacccctagaggacaatacagagccccattttacattttcattgatgaagccgagtatgttaaaaccggccataaaattctggctctcggtatgacggtgacacagcatgcgcaggagctcatcagtcagacttcagaggtcctgtctagcgctagagctgatttatgggctgccggaaatactgaaatactactgaagaagggcctacactttagcgatgccacagaagacctgaggttggaatacgtaaagcggctggcggccatgccattcgaaggctatgtcgcctttgctccttgtaagagtcccgccgactatgaggccacatacctccgcctgctgtcagccctgattccaaggcggttgatggcagcagagtcccagtttgtatttatctactgtgaggaaaactctaagatctccagggacgaagcgaaggctaagatccagagggccttcgatgatctgaaagctagcaataatcgtcaccctaagggattcgcagtggagttcgtgagcaaacccaacctcgggatctctgcgccagacttcctgctaggcgtgctggggacctacctccgatccgagccaagtcccctgggcaaaccagagcccagggaaagattgatgttcgagcggctgcgggataagtatcgtctcatcttggatgtcgaaacgtggaccgaatactcgcggcgacgccctatcgaaccctggtga

SEQ ID NO: 14253 - RNA, 1755 nt, synthetic construct
  source 1..1755: mol_type = other RNA
atgaagttccactacgatttccggcgcctcagggacaagcagcagttactggatttcctaggcattactgaggcgttttttgagctcgtggtgtcattcgaagtgcctaccgaccctcctccaccacctgtctatgcaggtgggatcgaagagttgtccattcctccgttcttaaggcacaaaattccgaagaaaaacaagaatcgggggtgccgcgtggtatgggagcctttgctgtttaagactacatataaaaccctggggcggcgcctcaacaacttcctggtgaatttcctgagcaactatccacatcccgccgcttatgggtacctgggaggtcgaaacattaaacagaacgccgccgcacactgcggtcacaaatttttgatctcggctgacatcgtagacttctttcccagtatcacatgtgagaggatcaaaaacctctttatcgatctcgaactggtacccgatgtggctatcgcactgagcaggtttatgacgataagcggcgcattgccacttgggctgcctacatctcccatactgtcaaatgccatttttctgcccgtggacattgaattgcagtaccttgcctctcaggccggcgctacctatactaggtattctgatgacctatcattctccagtgatcgtaagctgcttatcctggaacagattggtaagtcacttcaggacaatggatttaaaatcgcagaagagaaaaccaagatttctcgccttggccaggcgcattatgtgaccggcttatcgatcactgaccccaacggcccacacgttcccagagacaagaagaggagactgcgccaagaactgtattacgccaaaaagttcgggctcaatgatcatttcaaacatcaggaggtaacggacgccaaagcccaacagcataacgtgaatcgactagatggcctggtgaaatttgtcagttaccacgagccgaagcatagtgctcgtttaaagtcccaatggtcacagatactcatttccagtggaagtcgaccatcatacgaaccacggcgacagaagagagtgcccttctgtatctgcattgacgaggccgagttccagttttcccagggagtcgttctggccctgggcatgagcgtgagtcagcaccaggacgaactcgatatggcggccgctgaggttctggataagtggctcagcgacttttgggcagctggaaatcagagggtgatcgaaaagagagggctccactttgtcgatgcaagcgaggatcttaggctccaattcgtcacaagaatgcaggcattaccatttgaaggctacatcagcttcggccggctgttgtctcctgcctactatgaggaaacctacttgcgactgatagagtccatcattcggcggagactaatggccgctgaatcccaacttgccctattcgtcatagaggagaactccaaggtgtctaatcagagcgttcgagcagctatcgatcgggcctacgatgagctcaagtcatccaataaccgcagaccacgtgcgatcatcgttcaatttagatccaaacctgacctttctataagctttcccgacttcctgttgggagtcctggggaagtacttgcggagccgcgaccaaaaactgggaaccccgattcccagggatagacttctgtttgaacgtctgcgggacaaatacaggctgattctcgatgctgacacaggtttcgagttctctagacgccgcgagattcagccttggatctga

SEQ ID NO: 14254 - RNA, 1728 nt, synthetic construct
  source 1..1728: mol_type = other RNA
atgcgcaccaaacagcaacttctaaatttcctggggcttcctgaggaggtattcgaatttgtggtgaattttgaacctccaccggacccccagccacctcctattgttgttgaaggtgttcagcagatttctgttccccccttctataggcacaagattcctaagaaaaataagaaccgaggatatcgggtcgtatgggagccccagatcgctaggcttgagtacaaagctctgggcagaaggttaggaagcttctttaagcacttcctcaccaactacccccacccggccgcttatggctatctgggagggcggaatatacggcaaaatgccgccgcgcactgcgggcatagattcttgctgtctacagacatagccagtttcttttcctctatctctatcggtcaaatcaagggcctctttctggaccttggaatttgtgccgatgtagcagtgcccttgtcaaggtttgtgacaatcggcggagtgttgcctctgggccttgccactagtcccgtcttgtccaacgcgatcttcctccctgcagatactcagctgcaggccctagcagacagagtgggagccacttacacaagatactcagacgatctgagtttctcctccaacgggaatctcccaccgatcgaagacataaccaaatgtgtccaaatccatggctttcgactggcggagggcaaaacgaaaacgtcggagcatggccaggcccactacgttaccggcctcagcatctctgacccttccagtcctcatgccccaagggagaagaagagacgcctgcgtcaggagctgtactacgcccacaagtttgggctgaactcccactttcaaaggattgaggcagcaactaccaaagaccagcagcagaatgtgaatcggctggatggattggtgaaattcgtggcttaccatgaaccacgccaggtgggtagattgaaaccagtctgggcaaacatactcgcctcctcaggggcaaggcccagttttgagccccgacggcgcaacggtcctcctttttgcatcagtattgacgaagcagagttccagaatgatcaaggcactgtgctagccttaggcatggtggtgtcgcagcaccaagaccaactcgtctcagctgctagcgaagtcctgaatagatggctcgccgacccatgggctgtgggaaacaggctggctatcaacaagcgcggcttgcatttcacagacgccagcgaagatctgcgagccgaattcgttattcggatgcagacccttccatttgaggggtacatttctttcggacagttgagcgattcatctgaatatgaggcaacatatctgagacttgtcgggtctattattaaacggcgcttaatggctgcggattccgagagcgtgttatttctcatcgaggagaattccaagataagccagaacaaggtactgttcctcatcgatcaggagttcaacgagctgaagctgagcaataaccgtcgtcccaataagatcaccatacagttccgccacaaacccgaccttaacatcagctttccggacttcattctaggtattctcgggaaatatctgaggtcaaaggatgccaagccaaacgcacccatgccaagggatagactgctgtttgaacggctccgcgatcggtaccgcttaatcctggatgctgacacaaaggctgaatttagccgaagacgtcccattgaaccatggatgtga

SEQ ID NO: 14255 - RNA, 1755 nt, synthetic construct
  source 1..1755: mol_type = other RNA
atgaccagcttatatgacttctcaaggattactacccgcgaggcccttaccgccgtgttgggaatcgatgaaacgatgctggatctggttctgacttttcagccaccgattgactcccccacagccaagaatagccctgaagctataaaaaccatcacgatccctgtgtttctgcgacatcgggttccgaaaaaaaatagaaacaggggattcagaacagtgtgggagcctatcctccttaagagtagctacaaggggctggctagaaaattagatgccttctttcgtcatcatctagtgggctatcctcacgagtccgcatttggctaccgccccggtaggaacatccgagagaacgcacaggtccatgccgggagcgctaggattctcagtctggacctggccgacttctttccaaacatctctaagggccacatcaagaaactttttctggctatgggcgtgaacgcgaccgtctctgatctgctgtcacggtttgtcactatcgagggtgccttggcactgggattgcctacttcccctgtgctctccaatgcgattgctctaccaattgatctggacctcggtatcctggccgatcagtcgaatgctagatactccaggtatgctgacgacatcacattcagcgggaacggagaactacccaccttggaacgcatagaggattgcttaaggcagcacggctttcaaattgcagaaggaaaaacaaggtggagcaagcgtgggcagtcacattacgtaactggcctcagtgtatccgaccccgcccaaccacacgttcctcgagataggaagcaggcactccgccagcagctgtattatatggagaagtttggcatcgatgaccatttccgccgcattgggacaaatgattcagatgtgatccagcaggcgttgaattcaatcgacgggatggtgaaattcgtggcacatcatgaaccttgcatagcagcccccctgaagatgcagtggaatgaaatattgcgtgtgaacgggaagaaaccaagtttcaaacccaagaagcaaaatagagagcccttctacatttttgtcgacgaggcggaattcaaacgggcaggtacgaccgttcttgctcttgccatgtctgtctcgcagcacgaagaaagaatagtccaagagacacgggaggtactcgaggctgaaatgcaagacttttgggccgccggcaacatcgacgccctgagaaagcgggggctgcacttcgcagacgctaccgaagaccttcgccacagctacgttaagcgcctggcgagcatgccctttgagggctacgtggcctttcacccgtgtgcagatcctcgaaattatgaggacacctacctcagactgctgggcgccatgatttctcgacggctcattgccgcagaatctcagttcgtctgtctctatttcgaggagaacagtaaggtgagccaggaggccgttcggagtctggtacagtgcgctcacgatcagttgaaaagagccaacaatagacacccaaagctctgtgtcgtgaagtttgtgtctaaacctaacttcggaatttctgtgccggatttccttctaggagtgctgggcaagtacttacactccaaaccagctgccgctggtggaccagaaccaagggatcggttgatgttcgaccggttacgcgataaataccgtctgatcctcgacctgtccacttggacagagtattcacgaaggcaacccattgagccctggcagtga

SEQ ID NO: 14256 - RNA, 1755 nt, synthetic construct
  source 1..1755: mol_type = other RNA
atggcctacacgtacaacttttcggacatacggacccgtgaggcccttttggctgtcctcggcattgatgagacaatgctggacctggtccttagtttccagccgccaatcgatcctcctaccgtgacgattatcccagacgtcattagtacgttgcagatccctgtcttcttgcgacatagggtgcctaagaagaatcgagcgaggggtttccggaccgtatgggagcccatactccttaagagcacttataagggtctgtctagaaagctcgacgtttttttcagacaccacctggcaggatatcctcatgagtcagcatatgggtatcggccaggcaggaacattcgggaaaatgcccaggtgcacgtcgggtctgccaggatactgagcctggacatcgccgacttttttccttcaatctctaaggagcggatagaacaattattcttgggcatgggcatgaacgctgcaatctctgatcttttgagccggtttctcactatcgaagggaccctcaccctaggctttccaacaagtcccgtcttatccaacgccatctccctgccaattgaccttgagttgagctcggtggcgcgacagtttgatgccagatactcacgttatgctgatgatatcaccgtgtccggcaacggggatttgccaagcctggaagcggtcgaggactgcctgtgccgccatggattccaactggcccctggcaagactcggttcagcaagcgcggacagtcccattacgtgacaggtctgtctgtgtccgatccagttcaaccccacgttcccagggaccgcaaacgcgcattgcggcagcagctctactacatgacaaaattcggggtagatgaccacttccggagacttggtatcaacgatcctaaagtcgcacagcaggctatcaatagcattgacggtatggtcaagtttgtggcacaccatgagccaaggattgcggctccgctgaaatctctttggaatgaaatactgagagtgaacggcgagaagccatctttcacacccaaaaggcaggataggaaacccttttacatatttgtagacgaggccgagtttgaacgcgcagggactaaagttctggccctggcaatgtcagttagtcaacatgaggagcagatcttccaggaaaccaacgaagttctggaggctgagctcggggacttctgggcagctggcgatatcaacgccttacgcaagaagggactgcacttcgctgacgccacccctgatctccgacagagctatgttaaacgcctggccgcccttccattcgaaggatacgtggccttccacccctgtgacgacccatgtaactaccagtccacttacctgaggctactcggctcaatgattagtcgtcgcctgattgctgcggaaagtcagctcgtagtgatttgctttgaggagaattccaaagtgtctcaaaagtcaattaaggaactcgtgcagttcgcccacgatgaactaaagcgtgtgaataatagacaccccatttcctgtgtggtgcaatttgtaagcaagcctaatttaggaatctccgtgcccgactttttactgggggtgctcggaaaatatctacagagcaaacctgctaatgctggacggcccgagcccagagacagactgatgttcgatcgactgcgcgataaatacaggctgatcctcgaactgccgtcctggacagaatatactagaagacatcccatcgagccgtggcagtga

SEQ ID NO: 14257 - RNA, 1752 nt, synthetic construct
  source 1..1752: mol_type = other RNA
atgtcctttaaatatgacctgacccagctgcagaaccgcgagcagctgatcaacttcctgggcctgtctaaggacgtatttgaggatgtactcgacttcgatccaacaggctccaacttctcccagttttccgaaaaggaatcctccctgattgagctccctttgttctttcggcatgaaattcctaaaaagaaccggcaacgtgggtataggacagtgtgggaacctactttcctgaagtcaccctataaggctctcgcccgtaggctaaataattttttcgcccacaagcttgagggatttcctcacgcccagacctatgggtacatcagcggccggaatattcgggagaatgctcagaaccattgcggacacacccacctcgttagcatagacctcgaggatttctttcctagtattaaggcctctcgcatagcgaccttcctgcgtacgacaggcattacacccacggtggccgatctggtgtcgaggtttgtcaccatcgaaggaagtctgcccttaggccttccgactagccccaccatagccaatgccatctgtctgccaatggacattgaacttgaggcactcgcccaaaagctaggcgcgacttttagtagatacgctgatgacatctcatttagctctgacggcacctttccatcgctgcgggagttgatggcttgtatccgtcaacacaatttcgaaattgcggaggcaaaaacaagaacttctaaattaggacaagcccattacgtcaccggtctgtctgttagcgatcctgcccagccgcatgtccccagaaagaagaaacgacgcctcaggcaggagctgtactatgccgataaatatggtcttgacgatcacctgcaccacgtgggattagggaacagtagatttgcacagcaggaaattaataggctcgacgggttggtcaaattcaccgcgcaccacgagccacgcctatctgctcatctgaaaactacatgggccaaaatcctgcagaccagcggacatcgaccatctttcgctcctaagaatcagcataggcttcccttctacatctatattgacgaagccgaatacgcccggccctcaggagataggttgctcgctcttgctatggcagttagccagcaccaggaacaaatcaacagggcaacgcaggatttgctagagactaccctgagtgatgtgtgggcggcagggaacttggacgctatcgctaagaagggtgtccatttctcagatgcaactgaggatatgagacttgcttatatcgacagaatgcggcttctcccattcgagggctacgtagctatggccaggctaccatccgccgcggactatgaggtggtgtacctccgattactgaacgcaatgatcaaacggcgcctgatggcagcagagtcccagtttgccaatctggtctttgaagagaacagcaaggttcgacaggaagccataaggaaaacagtgacagacacttacgacgccttaagagaatcaaacaatcgacaccccgagtactgcagcgtggagttcgccgggaagcccaattttggtctgtcaatacctgacttcctcctgggcgtgctggggaagtacctgacagtgggtccccaacaggatggcaagccagcagctagatacgtcttgctcttcgagcgccttcgcgacaaatatagattgatcctggatgttgacaactgggtggaatacacgagacgccggcctatcattccgtggtga

SEQ ID NO: 14258 - RNA, 1752 nt, synthetic construct
  source 1..1752: mol_type = other RNA
atgaccttccgctacgatcttagactgcttaacagtcgcaaatcactactggctttcctgggcgtcgatgagattgcatttgagaaggtgctgagttttgacccagtttcagcacagatgtccatcggcattgaggatgatattcactttttggaggctcccctgttcctaaggcacaagattccaaagaagaaccgagctcgaggctatcggatcgtgtgggaacccacggcttttaaatctgaatataaggccttggcaaggaggctgtccaatttcctctcacatcggctcaacggtttcccccattccaggacctttgggtatatcgggggccggaacatccgtgaaaacgcgagggatcactgcgggcaccgtcacctgatcagtttcgatctggagaatttcttcccctctataagcgcggccagaatcacaaaactcttgatcagtaccgagattgacccgggcattgccgacttgctgagccgctttatgacaattaatggaagtctccccttgggcttgcccactagccccactctggctaacgccatctgtctgccaatggatattgaactacaactcctggctcagcaacatcttgccacattctcccgctacgctgacgacatcaatttcagttccgacactagtctgcctcctctggaaaaatttgcaacgctggtgaaatctaatggatttgagatagccaagagcaaaacccgcatcagcaaactcggacaggcccattacgtgacagggctgtccatatcggacctggcgcatcctcatgtcccccgacacaaaaagaggaggctgagacaggaactttattatgcccagaagtatggtctggaggatcatctagtgcggagaggcattaacgatcaccagctcatccagcacgaaatcaatcggctggatggccttgtaaagtttatcgcttatcatgaaccacagctgtctgcgaagcttaaaaccaactgggccgatatattacaagagagcggtcgccgacctagcttttctccaaagaatcaggctcgccctcccttttgtatttacgtagatgaggccgaatacgttcggccagacggaacccgtctgctcgccatggggatggccgtatctcaacaccaggaccgagtggtgcaggcagccaaggatgtgcttgaggagacaatttccgatcagtgggctgccgggaacaagcctgccatcgtgaagcgcggattacacttcgccgacgcgcaccctgatttacggctggcatacatcagacggatgaggagcctgccattcgaaggatacgtcgttatggcacgtttggactctactgcaagctacgaaggcacttacatcagactgctcaacgccataattagaaggagactaatggcagcagagtcccaagctgcactgcttgtctttgagaaaaatgacaaggttagccaagtgaccatccggcaggccgtcatgcagtcatacgagtccttacgaaagtctaacaatcggcgccctgtgggttgctatattgattttgtctcaaaacctgacctcggaatgtcagtgccggacttcctcctcggtatccttggcagattcctccggtcaggaccagggaaaatggaagatcagttcgacagggacagaaaattgttcgaatctctgagagacaagtatcgcttgatattagacgctgacagctgggttgagtactcgaggaggagagagatttccccgtggtga

SEQ ID NO: 14259 - RNA, 1764 nt, synthetic construct
  source 1..1764: mol_type = other RNA
atggcgttcaattacgaccttagaagaatcaagacaaaggagcagctgctgacatacattggtctagaggaaatgtttttcgaccgcgcattaactttcaacgtcgcagaatacgaagctttgatggctgaacctgttgtggagatgggtatcaaagagctctatcttcctacgttcagcctgcatgaaatacctaaacggaatcccaagcgaggcaaacgcaccgtctgggaggcaaactctcacatcaatgacgcgctcaagggactctccagacggctgaccctcttctttgagacagtggtcccaggctttccccaccctcaaaattgtggatacgtacgcggcaggaacatccgtgagaatgcgcagttccacattggtgcaaaatacctgctaaaggccgacattgaaaactatttcccatcgatctccatcggccgaatcagcacgtttctggagaggctcggagtggcctcagaggtggccaagcttctctcaaattttctatccatcgatggaaaactgcccttgggcctgccaacatcacctataattgccaacgccattagtcacatcatggatattgatcttaactctctggccgagaagcacggggccatctactcccgctacgcagacgacttgacgttctctagcgaaggtgagctgccgaccgaaatggccattagcgaaatcgttgaactgcatgactttactttggctctggataagactaggttgagtaagcgtgggcagaatcattacgtaacaggtttaagcgtgtccgctaccgacgctcctcatgcacccaaaagaatgaaaagatccctcaggcaggaactccactttagtaagaaatacgggctggatgatcacttagaacatcttggcctcagccaccactttgcacgccagagttatataaatcacctggacgggagagtgaagtacatagcctttcatgagcctaaccttgcctcaaagattgttccactgtggcaagagatcctggaggagtctggcgactccccatctttcaaacccaaaaatcagaataggaagccgttccagttttatgtggatgaagccgagtttgagctcaacgggataaaatacctggctctcggcatgagcgggacccagcatcaagaccaccttaacgacgttactgaaaaggtgctggaagattatttggcggacccgtggtcagacgggaacagggagaagatcgataagaaaggaatgcacttcactgataccactgaggatctcaggaagatctatttgtctgccctgcagcccctgccattcaatggatacattgtcttcggcaaactcaccgctgattaccaggattgttatcttgaactgctgcgatttgtgctgaagagacggttaatggccgctgagagtcgggccgcttatttccattttgagcaaacatccaaagtatcgaaagacgctataaccaagaccgtcgacgatgtgtggaaagagctactgcgggagaataaccgctgccccgagtatgtcgtcatcgatattgtggataagaagtatttcggcgttgcagtacccgatttcatgcttgccactttctgcagatatttaacaaccaatctgagcgaaaacgactaccgacggaaagccaacatgtttgagatgttgcgtgacaagattcggttgattgtgaatgcagacacaggagaagaatttgggaggcgcaacccactggtgaaccctgacatcgagaacctgtga

SEQ ID NO: 14260 - RNA, 1764 nt, synthetic construct
  source 1..1764: mol_type = other RNA
atggcattcgattacgaccttcgtcgcattaaaactaaaggtcagctcttaacctatataggcctggaggaatacttctttgacaaagccctcgacttctcagtgacagagtatgaagcacgaatggctgagtatagcaacaagacggatattggatctttatttctcccgctcttttggaagcatgagatccccaagcggaacccaaaaagagggaatagggtggtctgggaggccgattcccatataaataatgcgctcaaagggctggcaaggagacttaccctgttttttggcaccgtaattccagacttccctcaccctcaaaattgcggctacgtccggggaaggaacatccgagagaacgcgcagttccacatcggtgccaaattcctggtgaaagcagatatcgaggattatttcccgtcgattagtttcgaacgtgtgtctaaatttcttgagaatctgggggttaacgccggaatcgcacgccagatctccaatttcttatgtattgacggaaagctgcccctgggactccccacctcacctataatcgccaatgctatcagccacctgatggactttaaccttaatagtctggcccagacgcacggatccgtctacagtcggtatgcagacgacctcacttttagttcagacgacaccttgccatctgaggatgatatttcgaaggtggtcgagcaccacggcttcgctcttgccgccgataagactagacatagcaagcgcggccagaaccactatgtaacgggtctgagcgttagtgaatccgatgccccccatgtgccccggaggatgaagcgttccctgcggcaggaattgcatttctcaaagaagtacgggctgaatgaccacctaggccatttgggcttacgagggcaaccagaacgccaaagctatatcaatcatgtggacggtcgcgtgaagtatatcgcctttcacgagcctggcctcgccgctactatagtaccactgtggcaaagcattctggaggaatccggcgaggggccttctttcaagcccaagaaccaaaacagagtgccttttcagttctacgtagatgaaacagaattcactttggatggagtcaaatatttggcacttgggatgtctgcttcacagcaccaagaccacctcaacgacacaacccagaacctttgggaagattacctggcaaatccatggtctgacggggctctcgaccagatttacgctaaaggcatgcacttcactgacacgaccgaggatctgagaagaacatatctgtccgccctgcagcccctgccattcaacggatacattgtttttggcaaactcacctcagactaccaggaaacctacttgacactgctaaagtttattctgcgccgcagacttatggctgctgaaagccgcgccgcccatttttacttcgaacagacatccaaagtcagcaaggactctttaacccgaacagtgaacgcagtgtggcaggagctaaggaatgagaataatcggaggcccgaatatgtggttaccgagatcgtcgataagaagtactttggaatcgcggtgcctgatttcatgctcgctgttttccgaaggtacctgactactacaccgagcgagaaagactaccggcggaaggccaacatgtttgagatgatgagggataaaatcaggctaatcgtgaacgccgacacaggtgaggaatttggcagaagaaatcagctggcgaaccctaacatagaggatttgtga

SEQ ID NO: 14261 - RNA, 1764 nt, synthetic construct
  source 1..1764: mol_type = other RNA
atggccttcgattatgatttacgacgggtcaagaccaaggatcagctcttgacatacatagggctcgaggacatcttttttacaaatgctagtgacttcgatgttcacaagtacgaggctcgacttgccgaacctctggtggagatgggaatcgcccagttgcatttttcccctttctataaacatgagatccccaaaagaaacccgaagcgaggcagtcgtgtggtctgggaggcatcaggtcatcttaacaatgccctgaaaagcctcgctaggcgccttaccctctttttcgagatgatcatctctaactttccacacccccataactgcggttatgtgagaggtcgcaatacgagagataatgcccaatttcacatcggagccaagtacattctgaagagcgacatagaaaattatttccctagtatctccctgcggaggctcatttctttcttcgagtctcttggagtaaactcgggcattgctatgcaactcagccatttcctgtgcatcgaccagaaattgcccctggggctgcccacaagtcctattatcgccaatgcaatctcccactttatggacatcgacttgaatggactcgctgacaagtacaaggctgtctatagtcggtatgccgacgatctgaccttctcttcaaacggcaatctgccacaggtttcagaagtgtccgaaattgtcgctaggcataagttccagttatccagcgataaaacaaaatactcaacccgtggacagaaccactatgtcacaggcctaagcgtgtcggaggaaaacgcaccacacgccccgaggaaaatgaagctggcgttgcggcaggagctgtacttttcaaagaagtatgggctcaacgaccatctagaccacctgggaatctccgatagctaccagaggcagtcttacataaatcatttagacggcagagtgaaatatgtagcatttcaagaacccagattagcttccaagatcggccctctgtggcaggaggtgcttgaggatagcggcgaggccgtgaactactccccaaaaaaccagcaccagaccagcttccaattctacgtggatgagactgagtttacactggatggggaaaagtaccttgcgttggggatttccgcatctcagcaccaagagcagctgaataacgttactaagagaatttgggaagattacatcgcaaacccctggagtgacggggacctggacgcgattaccaaaaatgggatccacttcaccgatacgaccgaagatctaaggaggacctatcttactgcactgcagcccctgccattcaccggctatattgtgtttgggaaactaggagtagactaccaaggctgttatctgtctctgttgaagactgtcctcaaacgacggctgatggcagccgagtcaagaggtgcttacttctacttcgaacagaccagcaaggttactaaatctgccatcactgaaacagttaaagcagcctggagcgagttaaagaatgataataaccgccaccctgagtttgtggcgacggaaatagtggataaatcatacttcggcattgccgtgccagacttcatgctcgctgtttttcgccgctacctgatggccgactccaaagataagcagtatagacggaaggtgaatatgtttgaaatgctccgtgacaagattcgcgtaattgtcaatgccgacactggtgaggagtttggacgccggaacccgataaggaacctggacatagaaaacacatga

SEQ ID NO: 14262 - RNA, 1770 nt, synthetic construct
  source 1..1770: mol_type = other RNA
atggcccacgattatgatcttcggctgatttccaccaaagcgcaactccttacatacataggggtggaggaggaatggttcgacgtcgcatgtggattcgatgttgctgcttacgaccaagcactatgccaggacaccgagagcgagatcggaatctatcatcatcacccatttactaggcacgaaattccgaagcggaatcccgccagggggaagagagtagtgtgggaagctgagcgttacttgaacaatacatacaaaggccttgcgaggaggctgactcggtttctcgaaacagccattacaggttttccccatccccaatgcttcggatatgttaggggtcgcaatatacgggataacgcagggaggcacgtgggtgcaactcttctgctaaaagccgatatcaaggacttcttcccgtccattgacaaagctcgcgtcgagaagctctttgttgatctcggagtgaactccgaggtcgccacgcaactgactagcttcttaactatagaaggaaaactcccattgggcttgccaacatctcccatcattgcaaacgccatttgccacggcatggacggcgatctgagcaaactggcaaccaacagtgattctacctacagtcgctacgctgacgatattagcttttcaactaacgtcaccctgcctaaggccgaggcaataagcgtgatcgttgctaggtacggctttgagctggccaaagataagactcgggtgtcgaaaagaggccagaatcactatgtaaccgggctgagtatttccgaccctcgagcccctcatgcccctcgttccatgaaacgaaacctgcgtcaggaactgtacttcgcccgcaaatttggcctggacgaccatatccgaagtctaggcatcacagaaggagacgaaattcagagatacatcaatcatcttgacggttcagtgagatacgtggccttccacgaacccaccaaggctcgtgaccttctcgtgcagtggtacgcgatcttagaggaatccggttcttcgcccagctttgaaccaaagaaccagcacgacgcccaattttgtttttttgttgacgagacggagttcgaatggaatgacaagaagtatctggcactctgtttatctgccactcagcagcaggacgtaatcaataccacgacagagcgcattctgaaggactacttggctaatccattctcagatggggatagggaggccatttcccggcatgggatgcatttctatcacgccacagaagatctgaaaagcctgtatttcagggcacttcagaagctccctttccaaggatacatagtgttcggagagcagtctggcacctacgaggcggactatacaaagctgctgtcacagatcatcaaacgccggctgatggccgcagagtccaaggctgcattcttatgctttgagcagaacagtaaggtcagcaagcacgctatcgaggaggtggttagaagaagctgggaagagctcgatcggaccaataacagacgccctaagtatgccaccgtagaaatggtggataaatcatattacggggtcggggtgcccgactttttgctgggcgtgttcagaaagtatgtgtctggcgtgcctgctgcttctccaccccagaggcagcacaatatgttcgagggcttgcgggataaaatccgagtcatcgtcaatgcggataccggggaagagttcacgcgcagacacccatttgataacttttcaattaacgacctccgagaaagatga

SEQ ID NO: 14263 - RNA, 1716 nt, synthetic construct
  source 1..1716: mol_type = other RNA
atggaacggttcatcggggtgaaatctgatcttcttgacctggtactggactttgactcggaatcatcaaacagtttcagtgagcagaattcccgcatatacatgttatcaatgcccctttttatctgccacaaaatccccaaaaaaaaccccaacagaggcgagagggtggtctgggaagccctgatggatttgcgcgatgtctacaagtccttttctcggaagctggacattttctttcaaaagcagattgagacgtatccgcacagctgcagctacggttatttgggcggtagaaacacccgaggcaacgccgagaaacatgttggaaaaaagtatctgctcaacgccgacctgtgcaacttctttgattccattagcgccgacaaagttcgtctcctgttcgtctcttgcggtgtggacgagaaaatatcacaaatcctcagcagattcctgaccataagcagtcgactccctatggggctaagcacatctccagtgatagccaatgttttagcacacaagatggattgtgaattgagtgatttagccgagaagttcaattgtcagtattcaaggtatgttgatgacttaaccttcagctctgacgagatcctgcccgagatcagccacatagaagagattgtagcaaggcataacttttccctcgctcacgaaaagattaagttctctaaaagcggtcaggcacactacgtaacagggctgtccgtgagcgacactgaagcaccacatgtgcctcgaaaaattaagaaagatctccgcaagtcactgtactacatggataagttcgggatttatgaccactttggaaggctaggcattcacgaacatgagaacgtgcagagagaggtgaacaggatagatggactcgtgcattatgtatcctatcacgaaccacggaaaagcttcgagatcaatgctatttggcagaaaattctgcgcgactccgggtttcgcccctatttttccgctcataaacaggaatacgaggtgttcaacattattatcgacgaggccgagttctctcacaacggcacaaattacttggcgctggcggctagcgttacaaataagcaacgggaaatcgacaatagtatttttgagatcctggataacttcctttctaatccttggtctgatggaaaagtggatctcatcaaggaacgtggccttcattatgtcgactgtactgaagacctgaagaaggaatttatccagtgtctccagatcctaccttttaatggctacattagtatcaatgccgtgggcgagtccaattatcgagatagatacatcgagaacttcaaaaacatcatcatgcggaattactacaagatcgatcgtagtatcgtgtttgtctcaatcgagcggaactcgaagatctccaatgacgacatctatggagttgtggattacgtcaactcttaccacctcaacgataaaagggtcatattgccgaaaggtaatgtgtccttcgtcggaaaggaatgcctgggagtcagcgtgcctgacttcctgcttgggtgtttcgcaggctacattaaggacaaccagaccgtttctgggggcgctaagtcaagaaagtttctgcaattcgagatgctgcgcgacaagattaaagtagtgtcggatctgaccactaatcagcattttacgagaaggaatccattttccaagagtaagttgaagatatga

SEQ ID NO: 14264 - RNA, 1752 nt, synthetic construct
  source 1..1752: mol_type = other RNA
atgaaccaaaaagatatgccaagagggttcgaccgcaacagaataaagttcgacttcagggttttgaaggatctgaataccctgaaactgttcataggcgtggacaatatcaccgaatcctttattaacaccaaacatgaggttcacagatggttcatccagcataggattcctaagaaaaacactactagccacgataaatacaggattgtgtggcagccaattaacggggccgagcgcctgtacaagactctgaatcggaggtttgagatattcatacgtgatatcgaccggcggtaccctcacccatgttcatatggatatgtaagaggccggaacaccctagataatgctaagttacacattggagcctccgtgatcctccatgcagacatttctaatttcttccactccatcaagatcgacaggatcaaaaagctgttcatcagctatggcatcgacgccacaattgcaaattatctcagcgagattgtgactctcaacggttctctccccttaggtgttcacacatccccaatgctggcgaatgtgtgctgcctggacctggacgacaaactgtacaaattatctcagcgctatagctgtgcctactctcgatacgctgacgatatctctatcagcggatcagatctgcccagcaaagacgaagttgagatgatatttagtgaggaggggtttgtgctttcacaaaacaaattcagtatctccaagctgggtcagaaacattttgtgacaggactctccgtcagcgatcctcttacaccgcacgtgccccgccagattaagaagagccttcgccaagaactgtactattgcaataaatttggggtaattggccatctcgagcgaatctatgatggcagttttgacttcatacagaagaacattaacagaatcgacggcttcgtccgatacgtctctttcattgagcgtaaacccaattttaaggccgactggatggctatgttgagccaggagaacttgcgtattaactatcgcaacaagtcgaatgaacaatcaaatgaatgcgttatctacatcgatgagacaaaattcgagtttaacggggcctcctatttagccattgcccttgtccagacctcgaattttgaccttattgagtcagaatccaggcgcatttacgaagaatatatcgctgacccatttgcagcgggccggaaggacaacatcgccaaaaataaaatccacttcacggatgtgcatcctgatctgcagggcagatatatcgattggctgtacggtatagcttttgacgcgtacattgctttttgtaaagaggaaagcgccaactatcaatctctttatctcagtctgctctcgcgaatactccccgatcgactaaggcatttgcggaaccacaatgtaaagctcatcctagagcagaatccagaggtcagttccgaatccatcaagaacaaggtattcggcatcgataattacctgaagttgcagcagatccgcagtgcaaagactagtgttatagtgggatctaagcaagaatactatggattctccgtgcccgactttgtgctggggttgagcgccagatacgcaatttcaaactctggaaagcagcagaatgacagctcaaaccccccggctagagataccctgctgtttgaaaaaatgcgggacaagattcgggtcgtgtacgatgtggatgcaaagaggaagtacacgagacacaggccttttgtccctttccagtga

SEQ ID NO: 14265 - RNA, 1746 nt, synthetic construct
  source 1..1746: mol_type = other RNA
atgttggatctgcggaatatgagggacgcatctgacctcgctaagtaccttgggatttccgagggccgcgccaggcagttattggtggctagtccggaagaggtcttcaagacttatgagatccccaaaagaggcaatcgcggtgttagagaaatatgggaggtgaccgaaacctgggcggccgacatgtataagggacttgcacggcgcctgaatgctctgtttgtcggcgccctggcgggttttcctcacccttctgcgcacgggtatgttgccgggaggagtacctggactaacgccctggcccaccttggacagaggcgagtcctatgcacagatatccgcgcctttttcaaatctatccagcatgaacgggtgcgacagttgctcctgcgctgtggtctaaataacgaagctgccgctgcactgagtagaatcctcagctgggatgaccacgtcccactcggattgcatacttcacccattgttgctaacgcagtgtgtcacgatctcgatgctcgcttacgggccttagcacctgcagggaggtatactcgctacgccgatgacctgtttttctctggccctgaactccccacccggaacgacgttgctgctgcccttgctgccgacggctttgagattgcccccaggaaatgggggttagccaaagcggggaggggactctatgtgaccgggctcagcctcgaacacggcgatcgtcctagagcccctagatcaatgaagcggagactcaggcaggacctccaccatgctgatagatacggtttgcgacaacacctggggcggagaggatacccttccttccaatccggaatcaacaagatacatggaaccatacaatacctgcgcggcatagaacgggacttgggggaccgtctaaacaaggagtggatggagctgctgggaagagagggagtcgcggtagcataccccacgcaagagaggctcgcgggtcgtactgtgctgtttctgctcgacgagtccgtccccccagacagagacgtgcttctgttatgcctgacagtggtggaagacgtggagtgggtttccgctgaagtgcagcggttcctggacgacaggatcgcagacacaatgaccgctgaaagcgaacgggcagtgctaaaacagcggggccttcattggaatgaacttacacctgacaacaggacacgggccacggaactgctacgaactctgccattccgtagtttcgtggcatacgctgcactgccaaagcaggataaggcaagctatgcagaaacctacgcccgtacactggctcagcttctgagagatcgcatgattcgatacgatggctgcacgctgaagatcgtcggcgaggagaatccaagggtaggacgccgcctgctgtctgagattgccaattcgatcttcagcgagctggagtgcttaggcgcacgaagacccgctgccgtgccaagttgtgaggtactgagcaaaggttccaacccggccttgccccttccggatctcgtcctgggggtgctgggagattttgccttgtcaatcgtcagaagcgagcgggaagaggtgggtgacggcaaaaagaagaggagatctggcgatcaggcctcgattcgctttgagcagatctcacataaagttaaagcgatttacgatttgcagtcaggggtggtatattccaggcgaaatcccttcaccgcctggccactcgataacgccagcacaggcggcgagtga

SEQ ID NO: 14266 - RNA, 1788 nt, synthetic construct
  source 1..1788: mol_type = other RNA
atgtcattagacgattatattccgcaattggccaggccagcgaatgtggagcagttggccaaggcactgggcgtggcaacgcagattttcacttttatcgctgacaattctgagccggagagaatctaccgccgccatctgattcctaaacgggccgtcagagctcttccctccgtgccagtagaggatgccaggggaatcgttactctgagcctggatagcttcgacctgtcgaaatatcgggtggtttgggaggcccactctcccgtgatcaaacacgcacacaagtctgctgcccgggttctcgagagatatttgtcgcgtcccggagccctgttcccacatgaagcagcatttgggtacgtgaaagggcggtctaccaggcataatgcaaggaggcacgtaggcgccaagcgcttgctgagcgcggacatacaggatttcttcccaagtatcacgctcgcacgggtggagcttgctttagaagccgctggtttgcaaccggctgtgaccaatgccctgggccgatttttaaccattgaaggaagcttacctcttggtcttaatgcctcccccatgatcgccaatctggtggccactcctctagaccacgatcttagtgcgctggctaaagaatggggactcacttacacgaggtacgcagacgatattacattgtctggagacggggaattgccaacccgcgaaatcatcgagacagtgctcaagcgccatttctttcgcctgaacaaatcaaaattccgtaccagtaagctgggacagaagcattacgtgacagggctgtccgtcgctgataaggctgcgccacacgcccctcgtgccatgaaacacaagctccgccaggagctttattacatcgagaagtttggctttctggagcatctcagcagagggggtgagggaggtaccgagcagcacaacgtgaaccgtttggacggcacggtcaactatgtcagctccattgagccgagactagcacatcgcttgcgagccgcttggaagaaggtctgcgacgaaaacgacatcgccaaaagtttcgaacctcggccagtgattcagctgaggccagcctcttggtttgttgacgaggcggagattgtccatcccgatgggaccagacttctggcactctgcctggctgacgtgctagaacccgggagactcgatactgaacttaggacactctttgctgaagaagccggtgatgcctttggcaccgcggaccctctaagcatcatacagaagggcctccactggtccgatgccacatggagccagcgggaagccgtggttaagctgatcgcagcgtcccctgtacgggttatggtcgccatggcacctttaacaagcccctcagagtacaccactacatataccgacctgctgtgtgaaatcctggaaaccgccctgaagatagctgatgacgctgaaatagccatacatgtagaggagaatagatcaaaggtttctaaggcagacgtacaaggcgcagttactcgagcttatacagagctcgagacaaagaaccagcgacgacctctccaagcccccgaggtcaacattgtgtccaaaggggctaccccctgttgctgtgtgcccgatactgtcctcggcgctctgcacaggtacgccgtgagtcggaaagatggcaaagagggatcactggcagtcacactgttcgaaagactgcgcaaccactactccgtgatcttcgaccaccatgctaataaaatttaccaccacaggtcaccattcaagagatggtga

SEQ ID NO: 14267 - RNA, 1116 nt, synthetic construct
  source 1..1116: mol_type = other RNA
atgggcagcgctcaacctggccatcaggcctgtccccaggtgtgcagaacagggacaggagctctgccattgccagccaggctccctgtgagtcacgaagccgcttttgggtacgtgaagggtcggtcaacccggcataacgcgaggcgccatgtcggagccaaaagactgctctccgctgatatccaggatttcttcccatcaattactctggctcgagtagaacttgctttggaggctgcagggctgcaaccagccgttacgaatgcactgggaagattcctcacaattgagggaacgctgcctctgggcctcaatgcctcccccatgatagcgaacctggttgcgacccccctcgaccatgatctgaatgctctggccaaagagtgggggctgacctatactagatatgctgatgacattaccttgtccggagacggtgagctgcccacaagggagataatcgaaactgttcttaagcgccactttttcagattgaacaagagtaagtttcgcacttccaaactgggccagaagcattatgtgactggtctgtcggtcgcagacaaagccgcaccacacgcccctagagccatgaagcacaagctccgccaggaactgtactacatcgagaaatttgggtttctcgagcacttaagtcggggcggagaaggcgcccctaactctaccacatcaattgtgtggatggcacggtctaccatgtacccagcctccaatcgggtgtggaggatcgactgtgccctaccaggcagacggtacgcaacacgcatgaccagtccgaatcacttatcacttggtccctctagcagctgtgatttgcttcgggggtctttaatgcgtcctcgctcctctatccgaatggcacacgggttcagcagatccgcgctccctaccttctggagcttggcaggttggatccagaactatggacgatgcagccctaaacgtcccgagatgaggagtggacagccgatccgctgcctgtcttcacggaggggctgcattggcgtcatgcgacacgggccctctgtacgtccatggtcgagccttagccccccccatctaagcggcagttggtccccgtggaggaggtga

SEQ ID NO: 14268 - RNA, 1788 nt, synthetic construct
  source 1..1788: mol_type = other RNA
atgtccctcgataactacgtgccacagctgagccgcccttcttccgttgagcaattggctaaggccctgggcgtggcgacacagatatttacctttatcgtggagaatgacgaccctgaacgaatataccggaggcatctcatacccaaaagggctcctcggcgtttgccattggtccccgtggaagatgcggggggtatagtggaggtgagtctggactctttcgacttttcgagatatagaattgtgtgggaagcacagaatccggttatcaaagtggcccatcgcagcgcagctcgggtcctagagagatacctctcacgcccaggaagtcaatatccacacgaggcggcctttggatatatcaagggaaggagtacccgccacaatgctcgtaggcatagcggagctaagcacttgctgtcagccgatatcaaggattttttcccatctatcacgctggcacgaattgaactggctctggagcaggctgggcttaactccacagtctgtaacgccctcgccagattcctgaccatcaaggggagcctgccactggggttgagcgcatctcctatgatcgccaacctcgtcgcaacatcccttgaccatgacatcagcgctttggcgaaggaatggggcctatcttatacacgttacgccgacgacatcactctttctggagatggtccactccctgccagagagatcatcgaaaacattctcaagaggcattttttccggctgaataaggctaagtttcgcacctcaaaaaaagggcagaaacactatgtaacgggcctctccgtggctgacaaagtcgccccccacgtgcccagagttatgaagaggaagctgcggcaggagttgtactatatccgaaaattcggttttcttgaccatttaagtaggagtggcggtcgaggcactgagcaacacaatgttaatcgactggacggcactgtgaactatgtatcaagcattgaggccagctttggctacaaactgaggagcgattggaaaggcatttgtgaggataacggaatttcccgctccttcgagcctcgcccagtgattaaccttaggcacgcctcatggttcatcgacgaagcagagataattcacccggacgggacacggctattagccctctgcctcgcagatgtcctggaacacgatcggctcaatgtggagctggtgactcttttcgctgaggaagctggggatgccttcggtactgcggactccctttccattatccgtaagggacttcactgggccgaagcgacgtggagccaaagagaagccgttgttaagctgctggctgtgtcccccttcagagcaatcgtagccgtagcacccctccccaacccccaggaatattctcgggtgtatacagacctgttaaaacagattctggccactgccctgaaaaccagcgatgatgccgcagtcaatatgtacgtggaggaaaaccgcagtaaggtggccgagtctgaggtacagattgctgttaagaccgcttactttgacctggaagagaaaaaccagcgacggcccttaaagctgccgtgcgtcaatattgtgcccaagggggcaaccccttgctgttgcgtccctgatattttattgggcgcactacatcgctacgcaatatcgaagaaagtcgatgccgagtcaggactggccgtgaccctctttgaacggctgagaaataggtactcagttatcttcgacggccacgctgagaaaatctaccaccatagaagtcctttcaagaggtggtga

SEQ ID NO: 14269 - RNA, 1716 nt, synthetic construct
  source 1..1716: mol_type = other RNA
atggctaggcagatctttgagttcattgctgataatgagaatccagaattgatctaccggagacaccttattcccaaaagagccgcaaggcctctgccgtcggtacccatcgaatccatggatgggggtgtggagttttcactcagcggattcgacctttcgaggttccgggttgtgtgggaagccgagaatcctgtgatcaagcatgctcacaaaagtgcagccagagtcgtagaacgttttttgaccaggccaggcactggctttccacactccgccagtttcggctatgtcaaggggcggagcacccgtcataatgccagtcaacatataggtcgcaaatacctgcttagcgccgatattaaagacttctttccatctattacggcagcaagggtccagctggccttagaggaggccggtctaaaggccgttgcggcagaggcactatctcggttcctcaccgtgcagggctctctcccgcttgggctgaatgcctcacctgtggtggctaacctggtcgcactcccactggacaaggagctcgatgagtttgcaagaaaactgggactttcttattcacgctatgctgatgatgtgaccttgtctggggaccagatgctgcccagcaaagacgaagtggatcagattttcaagaggcatttcttcaggatgaatcgagtgaaattccgcacatccaagcgcggccagaaacactacatcacaggactgtccgtcgcggacaagttcacaccacacgctcctcgagctatgaagcaaaagcttcgacaggagctatattatatagacaagtacgggtttagcgaccacatctcccgtagtaggtgcggtggaactgagcagcataacgtgaacagagtggacggcatggtgagttacataagttccgttgagcctcgccattcatacagactccgcctcatgtggaagcggctgagaaccgcgaataatatcgagagatccttcgaacccaggcctgtgatccggtttcgacaagccagttggtttgtcgatgaagctgaattcacgcacccctcaggggtcccgcttttggcagtgtgtctggcagatgtgttggatagcgcccgcctggatgaagtgctcgccagctttatcgaagaagaggccggagatgcttttgggtctgtcgacgaggtcagcatcgtgcggaaaggcatccactgggtagatgccacttggtcccagcgagagggcttagtcaagatcctagccgaagcgcccattagagcaatggtcgccttcgctcctctgcggaacggcgaagactactcaaaggtttatctggctctgttgcgcaaaattctcggtacagcgttgaaggttgccgatgacgccatagtgaagatttacgccgaggaaaaccgctcaaaagtccgcaagtccgacgtagttgacgccgtgtcgtctgtgcatagtatgttagcagacaaaaacgagaggcgacctctgaaggtacccgaggtgaacgtggttcccaaggcttttctcccatcttgttgcgttcccgacgccttactcggcgctctggctcgttacgcgacttctaggtctgagtccgaccggggaggactgagcgtaaccctgtttgaaagactgcggagcagatattccctgattttcgatgagtacaactcaaaagttttccacagcaggagcccatttgtgcggtggtga

SEQ ID NO: 14270 - RNA, 1788 nt, synthetic construct
  source 1..1788: mol_type = other RNA
atgtcacttgacaatttttaccctgacctgactaggccatcgacagtgccccaactcgctaaggctctgggggtgccactggatattttccagatgatcatggattgcagcgacccgagtctgatatatcgtcaacactttatccccaagaaagtctgctcgatcatgcctggcacacccgtagccaactcagatggcacgatcgaaatagtgctgcctaatcatgacctcagtcggtatcgcgtcgtttgggagcctaccaacaacgtcgtgaaatttgcacacagatctgcagccggcgttctcgagagattcgtgtctagacccaatagccaggctgtgcatccatgcgccttcggatacgtgaaaggtaaatcaacccgtaagaatgcccagcagcacctgggaaaatatttcttgctcagtgcggacataaaaaacttcttcccgtctgtgagcgtggcaagaattgaggttgctttacgcgtgattggcattaaggacgaagtcgtcgagtccttagcgaaatttttcgccattgaaaacagtctgcccttaggcctcaacgccagtcccatcatcgctaacctggtggccaagcctctggacgaggacttgctcagtctcgcggagggatttaattgcagctacacacgatatgccgacgatttgaccttttcaggaaatgagtcacttcctaaaaaggaagacatcgagtttattctacggaagcataggttcaaggcaaaccagagcaagttccgatactccaaaagagggcaacgccactacgtaaccggactgtctgtagctgatgtgcacagcccacacgcaccgaggaaaatgaagaagcggctgcgccaagaactcagattcattgagaaattttcactggacgatcatttcagcaagatcaagaagagcggcgagcgacagcacgaaatcaatcgcatcgatggcactgtgtcttacgttgcctccatcgaacggaaactaggggccgacatcagaatccaatggaaggctatttgtgataaagaacaggttggccggtcctttgaaccccggcccactacccttttgaggtccgcggtgtggttcatagatgagacagagtttgacgccagggacggtactaagctgctagctctctgtctggcagacgtgctggacccacagcggctaaatatagatctgttgaccctgttttcagacgagtctggtgatgcctttgggcttggtgccgccgccggaaaaatgattcatgacgggttacattgggttgatagcaatcttacacagcgagagaaggtagtcaatgtcctgtctatctccccaattagggtaatggtggcaatggattccgtggaaggggctacttatcagaacgtctacctggatctgctgcggaggcttattaacgttaatctccgcggagccgacgacgcaagagtgcatattgtcatcgagagtaacaagtccaaggttcctagacaactggtcatacaggcggtgcgagacgagtgtgcccttctcgaagctgccaaccagcggcgtcctctggagatccctagcatcaacgtggaaggtaaggattggacgcccgctatgtgtgtcccagatgtgttcttgggcgtgcttgctcagtacgcaaactccaagcagaaagggcagggagaatttatcgtaagcttaatggagcgcttgcgtaataggttcgcagtcgttttcgatgaacacgagggcgcaatttatcactctgggaatccattcaggcgctggtcctga

SEQ ID NO: 14271 - RNA, 1512 nt, synthetic construct
  source 1..1512: mol_type = other RNA
atgaacatcgatagattcatccacgctcatgcccctagttttatccacgagaacgcttatggatacataaaatacaggtctaccagggctaacgcttctagacataagggagccaagattatcgtgagtgccgacataaaggaattcttccccagtataagcattggacacgtggagcatgcccttcgaaaaaccgggatgaaaaaggaaacagcttccctgctcgccaagtttctgacaattaacaatagcctgcccctggggttgaatgcctctccaacgatcgcaaatctagttgctaaccctattgatatagaattcaccaatctggctaagcgaattaattgcacgtataccagatacgctgacgatctcacattttcaggcgacaatacacttccctctcacgacgagatcaacgggatactgggcaaatttggattccgctcaaatgagcgcaaatttagggcgtcaaaacggggccaaaagcactacgtcaccggtcttagcgttgccgaccctaagcagccacatgtgccgcgcggactcaagcgtaaactccgccaagaattgtactacattcagaaatacggtctgaagaatcatgtggaaaagtctgactccgaatcaactcagcggatcatcaaccggctggatgggacaatcagctacgtcactagcgtcgagagtcagctcacaagaaaacttcgatccgcatggaccagcatttgtcaaaccgagaaagtcggccgctcctttgagcctaggcccctccacatcctgagggatgcatattggttcatcgacgagagcgaaattccgcgaccagacggctccacctgtctagctctctgctgcgtggaactcagtgcaaacaccatccaggcagatgaagcatctctgactagcctgatcgagaaggaaaccagcgacgcctaccaaacggccaaatcgagcctgcactgggcggagtctacattgtcccagcgtgagaggatcgtcgatacattaatgccaagactgttctctacttttgttgtgctggagaatctctccgacgaaccatacaaagatacttatattcgggcgttgaagctggtaatcgatcccattttacggagaagtgatgacgcaatcgttgaaattatgatcgaggccaacccatcgaagatttcacagcagtccgtaacatcctctattaaggacagttatctgagactggtggagttgaacgagcggaggcccgtggaaatgcccaagattagagtggagaaaaagggtgccaggcctgcgttactgttaccggacatcatgctgggggccctttccacctatgccaagtttcagcctggctcaaactcgacccttgagtattcattcttcgaaaaactacggactaagtatacgatcattatagataccgccgagaagaagttgtaccaccgtaaaaatcctttcactccctggcatactcgcaacaatacaaagatacagccaagcaaagcagagtga

SEQ ID NO: 14272 - RNA, 1722 nt, synthetic construct
  source 1..1722: mol_type = other RNA
atgaacaccgctccacctggatctcagcagctgtttagactggcggacgtgcgaactatcgaccagcttgctagggccctgggtgttcccttacaaatttttcaggatgtgatcgcctgtgaggatcctcagcagatttatgccctccatgccattccaaaaagacacccgagaaatcccgaagactaccggatagcttgggagtgccgacaggaaccagtggcacggagccataaggctgtcgcaagaagactggacgatttcgccaggcgccgcccgatatcatacccccatgccgccgttcatggatatgtgcggggaggtagtacacggtccaacgcacagcctcactgcggtgcaagagtcgccatcagggccgacattgaaaatttcttccctaccattacactggaacgaattgaagctatgctaaggaccatcgggatgcaagccgcacctgcgaaggcacttgcccgcttcgtcactattaagggggcgttaccgctgggattggcggagtctcccgttatcagcaacttagtatgtctgggcttggataaagacttgcagtccctcgccgaagagcgtggtgtccgctatacacgctacgccgacgatatcactttttctggagatgccaaccttcccagcagggagcaactccgggcaacacttgcaaagcatgggttcagactgagtgagcggaagttccgcaagagtaagcgcgggcaggctcacttcgtaacgggcctttctatcagcgaacgggattacccccacgtgccaaggaagctcaaacgcatgctgcgaatggaattgcacttctgtgaaagatttggcataggctttcatgccgagaaaatcaatgaggactttcgaaaaacgtacttgcgcctggagggaatggtcaagtacgtggcgtatatcgagcgcagaaagtcaaaagaaatcaacgaccagtggcaaagggtcctggccgttcacagaggcccaacttcccacgcaaagatagagagcaggaaacgggatgacaggtttgtaattgctgatgagacagagtttaccgtggatggcgtgaaatatctggccttttgctgcgtgcggattgctaatctggagagggtggaagaggcaatccagatcctcctgggcgactatctaactaagcccggggccaagggcgatctggacgtgttgcaggcagtgggcattcactacaccgacgcccacttcgatctgaggaccaagaccctagaccttatgaccgacttcttatcttggagcgcatccatacactttgcccggctggactcatcatccaaatacaaagacacatacctgaaattgttcgctgactccattcgccaggagctcatcacatcagatgagtggacacttcatatcctcgtggagcgaaatgacaaagtgaagctcccctccctcaccagggtcatggaagctgaatatcaacgagctgctaccgatggcgctcgtcggcctagctctctcccatcggtgcaaagagtcgaaaaggcgagtactagtagcctaaccctgcctgatttcgtgctggccacgtttagaaactacgctcagctggtaccagatgaccgtgttctcgacttcgagagaatccgtgaccgggttaggtatatacatgatgccgatcggggggtctactatactcgtaagaaaccctttgtggggattggatcggcttga

SEQ ID NO: 14273 - RNA, 1725 nt, synthetic construct
  source 1..1725: mol_type = other RNA
atgacgactgtttccatgcagccatgtgcacattttagactcgctgacgtgcgaactgtagatcagctcgctcgagccctgggagtgcctctgcaggttttccatgaagttatcgcgtgccaggaccccgggcttatttacgctatgcatagcattcccaaaaggtcgcagaggaaccccgatgggttccgcgtggtgtgggaatctcgcacggaagccgtcgcgaggtcacacaaagctgcggctagacggctcgacgacttcgcaagaaggcaggaaatcggctacccaaaccctgctgtccatgggtatgtccgcggagggtcaaccaggtctaacgcactaccgcattgtggtgcccgggttgtggtgagggccgatatagaggattttttccagactatcacgttggagcgtgtcgagagcgcctttagagccatcggtatcgctcctgaaaccgcccatagtctggcgctgttctctactattaatgggaaacttccactgggtctgccagagtcccccgtggtaagcaatctggtctgcctcgatcttgaccgggatctgaaggccctggcagaccgacacggtgtcaaatatacaaggtatgcggacgatatgaccttctcgggcaatgagaacctcccttctagagaagagatccgcaccgtcttactaaggcacggctttcgtctttccgatcggaaatttaagaagagtaaacgagggcaagcccacttcgtgactggactgtcagtatctgaacgcgactacccgcacgtgcctcgtaaacttaagagaatgctgcgtctggaactgcacttctgcgaaaagtatggcctggcaactcacgctgagaaccggcgagagagcgaacgcaagacctatctgcggattgacggcatggtgaattacgtgagcttcatcgagcgccggaagtctgctgccatcaaaggccaatgggataggatccggaagaaacacctgggctcaaccttgtacgctagattagccggcaaagaaataggagatcggtttgtggttgcagacgagacagagtttgaggtggacggtatcggctacctagccatctgttttgtacggttgagtaatttggaggacgtggagaaatccctggacctgctcctcggagattatctcaccaagccaggagccaaggggaatctggatgttttaaagaaggtgggcattcattacgcagacgcccactttgacttgcgcacaatgaccctggatctcatgactgagtacttgcagtggagcgcaagtatttgtttttcaaggctgcggacaagcgacgattataaggaagcatatttaaggatgttcgcagaactcgtaaaacaggagtttgtgacctctgacggccttagagttgagatgctggtcgaaaacaatgacaagattaagttacccgcacttacacaagtgtgcgaggccgagtatagacgatccgaaagtgaggacggacgccgcccaatatccctgccctccattcgttccgtcaagaagagcgagattcgaagtttgacacttgccgattttgtgctcgccgccttcagagcttacgtgctgcgggctcacgacgatagagtcctcgatttcgaacgcataagagacagggtgaggtacgttagggacagcgactcagataacttctacacaagaaagaaacctttcctaggaatcggggatgtcacctga

SEQ ID NO: 14274 - RNA, 1269 nt, synthetic construct
  source 1..1269: mol_type = other RNA
atgctcccagcgcgccttttggccaaatttgttactattaacggcctcctgccccttggactgcctgagtcccctatcatttccaacctggtatgcctggacatggatcgggagctgcaggctatggccgatgagagggatctgcgttatacacggtacgctgacgatattaccttttccggttatgcaaaccttccctcaaaagaggatattaggcacttgctcacgggacagggcttccgcctatctgaccgcaagtttaggatcagcaagcggggtcaggcccacttcgtcacaggattgtccgtcagcgagcgcgattacccccatgtcccgcgagaaatgaagaggaagctgcgccaggaattgtatttctgtgaacgatttgggctagacgtacacgctatcgagcagggtgaaacctctcagaagacattcaataggctctacggccttgtcaattacgtgagttacgtagaaagaagacaggcagaccggctccatcagaaatggggcaggatcgtgcgtagagagctgggagaggctgcctacgctactgtgcagggccgggagtaccgagacatacacctgattgtggacgagagcgagtttaagatcggggaacaaaagtacttggccatatgcgtggtgaggctctctgaattagacagaaagcaaagagtggtgcggaagctgttactagattatgttacgaccctcggagcaaaaggggaaattgatgctttgaaagatgtgggagtgcatttcaccgaagtccattacgacctcagaacaaaaaccctggatctgatgctcgagatgttatggtctgcgagcgtccattttgccaaatatgagtcgggggaggactatgagttcacctggcttaagctgttcaaagaagcaatgcaccaggaactggttactgccgacgggatcggcctcgaggttctggtggaggaaaacgacaaggttagttccagtgccctgaagtcaattgtagacgcccagtaccaacacatggagcttgcgggctcacgacgtccacgcgtgaagcctgatgtcaagcgggtggggaaatcagatactccaatcctgactctgcccgacttcgtgctggccgcctttcgacataatgtgcttcaagtcgcagatgaaagagtgctggattttgaacggataagagacaaagttcgctatatccacgatcacgacttagacgcattctatacaaggaagaaacctttcgtcgaggtgggcagcgcttga

SEQ ID NO: 14275 - RNA, 1770 nt, synthetic construct
  source 1..1770: mol_type = other RNA
atggcgcgagatcctgtggcaccctttattgtcgacttccggaaggctaaagatactaaccaccttgcaactctgatcggatgccatgccgagatgctggaccgaatcaggaattccgccacacaccaagaattctatcgggaacacagaatcccaaaaaggaatcggagacgtcgtggcgagtaccgcgtggtgtggcaagcagtctccgagctcgcccaaattcagaaggccctcctaagaaagttcgaaaatttcgcacgcgacactgttgatgactatccgcatagtgctgtgcacggctatgtgacagggagaagcactctgacgaacgctcggtgtcatgctggagccaaaatcattgctagggccgacatcaaggactttttcccatcaatatctagagcacggttggaagcactccttactgagcttggcatctaccagtcagtggccgaggttatcggaggacttgcgacgatcgatgatggcctgggacaagggatacacacctcgcccttcttcgcgaatcttgtgtgtattccactcgaccaggagttgtctgatctggccggtaagtaccaagctatctatacccgatatgcagacgacctaacgtttagtagtgatacacgcgtgccggacagaattgccatcgaaacagtgctgcagactcatggcttccccctggccaaagataagtttcgaacaacaaaaattgggcaggcgcactttgtcactggactgagcgtttctgagctcgatcggcctaggattccatataagttcaagcataagttgaggcaggaactctattactcagaccgttttggaatcatgaaccacgctgagagagccgggtacaggttcccccaccactgcattaactcgatcgatgggcgcatatcctacctgcagggaatcgagcctgagctcggggtggaaatgagacagctctggaaaagccttctcaagcgagatggcttattctccacctacttgcctacctataaagagggcatgcgccagatatttaaggaggttgagggcgtatcatacttcattgatgagacagaaacccattttaggggcgatgtttatctgggtctagcattagtagccgtcgccaccggggatgtgtctaccattgaggaggctatagcacagacattggataggttcctgcatgacccctacgctagcggtaggaaggaaaagctgcagaagaaagggctacattttactgacgacagtgaagagatacgtaccgactttatcaaaactattgcccggttccccatcagagcctttgtggcctatcggaaactgtctgggatcaccagaaaggacgcctacctgtccctgctgaggattctggtcacagatcgcctcagcgacccattgcttaccctgaacagcacgatcatatacgaacagttgagcgaagtcccgcacaagtactttgagctcaccattcacgaagtaatgggcaagattaaggagcgcggtggcaaattctatcaggagccaaggattgtatgctgtggtaagcgggatcagccttgcatcgctatcgccgactacctgctgggtgtgttttcccactacgctacctccgagccccctaacgaaacccctaggaaacgcttcgaacgcctgcgggacaaaattcggttaatcgtcgacgctgacgagaaacgacgcttttggagaaataacccatttcccggcttctctgcaatggatggaacagaaaataatttagcgtga

SEQ ID NO: 14276 - RNA, 978 nt, synthetic construct
  source 1..978: mol_type = other RNA
atgaccaccgcaaagctgagggatctgaagtctatagacgatgttgcacgggcctgcggagtggaagccgactttatcgccgaatatgcccagagcgagtatcagagccatttctacaatttcctcaagctcccaaagcgcggcaagcggaggaaaggagagttccgcgttgtgttcgctgcgaaagaggaacgtttgcgggcgcttcacagatctatcagcatggtggtaacaaattccgctaagtttggcaaccacgtccaggggttcatgaaaaaaagaagtactagaaccaacgctgaacaacacttaggcgcgaaagtgctactgcatgctgacatcaaggggtttttcgactctattactaccaaacacgtccgcgatgcctttatttcggacggtacagacgttagcgtggccgagctgctagcctccgcttgtactattgacggcctgctgagacaggggaccagatgctcacccacaattgccaacttggtttgccatgatatggaccaggcatttcttaggttggcacgagctcatgactgtgtgtatacgaggtacgccgatgacattactttctccggcgagtccgtcccgagtgatgatgcagtccagcagattctcgaatcacgcggttttgaactgcgcgatgggaaatgttaccgccaataccggggtagatctcagtttgtaacgggactcacaatcgccgacaagagtgcccctaggctgcctaaggctttaaaacgacgtcttaggatgataatgcactatatagagaagttcggaatcgcagaccatttcaaacacgctggcgtgtttgatccctatagagaagaagcctggctccgagggatactgatttatgcacggtccatcgagccagagctggtggagaagtggcaagagatcctggataggtcaatctacgaccggagcgattacgatgagcccatcgacgacgattactga

SEQ ID NO: 14277 - RNA, 951 nt, synthetic construct
  source 1..951: mol_type = other RNA
atgaagtcgattgacgacgtggccagggcatgcggagtagaggcggacttcatctctgagtatgcccaaagtaaataccagaaagactactataacgccttgaagcttgccaagagaggcaagcgaagaaagggtgaattccggatcgtctttgccgcaaaggaaaaaagactgcgcgccctgcatcggtccatttccatgattgtgaccaattctactgagttcggaaaccacgtccagggcttcatgaagaaaaggagcactcgcactaatgccaagcaacacttagcagctaaaattctgttgcacgctgatattaagggcttttttgatgccatcaccacccagcacgttcgcgaagcactgatatctgagggagcggctgtccctgttgctgagctgctagctaacgtttgcaccatagacgggcttctacggcagggaacaaggtgttcacctacgatcgctaatctggtggggcatgacatggatcaggccctgctgaggctggctcgagccttcgactgcgtatacacgaggtacgcggatgacatcacattcagcggcgcctccgtaccaagtgatgacagcgtgcgtgaagttctcgaaagcagaggcttcgagcttcgggacgccaaatgttttcgccagtaccgtgggagaacacaatttgtgacaggtctgactgtggtggatgaaaccgctccaaggcttcccaaggggctcaaacgacgtttgcggttaatcatgcactacatagagaagtttggcatcgtggaccatttcaagagagtgggagtctcagatccctatcgggaggaggcatggctcaaaggtatcttgatgtatgcacgctccatcgaaccccagctggtggagaagtggcagaaagtcctcgatgacgcaattagtgaacatccgccttatgacgatctcattgatgacgattga

SEQ ID NO: 14278 - RNA, 993 nt, synthetic construct
  source 1..993: mol_type = other RNA
atgacaataagtaagctgcgggagctgaaaactatcgatgacgtggcccgagcctgtggcgttgaggcagatttcattacggaatacgcagagtccccggagcagagtacctattatgaagctctgaagctcagcaaaaagggcaaacgccgatctaatgaattcagaattgtctttgctgcgcatgaacagagactgaaacagctccacaggggcctttctatggtcgttgctaactctgccaatttcgggtggcacgtgcaaggttttgtgaaaggacgttccaccttgagtaacgccaaacagcacctgggcgcaaaagtgttgctccatgctgatatcaagtcattcttcgacgcaattactgtggatcaggtgcaagctgcctttgtcgagcatggtgtactggctcccatggcggaggttctagctaagttatgcacaattgacggtctactgaggcaggggacccggtgctcgcctatgatcgcaaatttagtctgtttcgatatggaccaggcctttcttaggctggccggggcaaccaacagcaattacacccgctacgccgacgacataacattttcaggagatagcgtgccctccgacgattcagtaagaactatcctcaagaatcgctcctttgaacttcgggacgggcggtgcttcagacagcatcgtggcagagtgcagttcgtaactggactgagcgtggctgacactacagcccccaggctcccaaagcgcctgaagcatcagcttcggttggtgatgtactttataaagaagcacggcctggacgatcacaacaattgggtgaagcaaggatataaatctcaccctgagatcacctggctctgggggatcttgaactacgcgaaaagcatcgaacctacgctggtcaaccaatggcagcaggtttatcagacagcctgggaggaacagcaagccaagcgaaaggagaggattaaggtcaaagattggaacccatga

SEQ ID NO: 14279 - RNA, 1041 nt, synthetic construct
  source 1..1041: mol_type = other RNA
atgtcaagcaacccgtacattaaaacccttttgtatccttcccgccgatgtaggccttacatgacgatagccaaattgaaggagctgaaaagcctggatgacgttgcccgagcttgcggagtggaattcgatttcatcgaggcctatagttccagccagaatcagaaatctttcttcaatgtgctgaagctgcccaaacatggtcgccgaagaaagggtgagtatcgcattgttttcgaagcccgggaacagcgtctagcagcctttcaccggtccattagcatgattgtgaccaactcagcggtgttcggggagcatgtgcagggcttcatgaagaaaagatccactcgtactaacgccgaaaagcacctggcagctaaggtcctgttgcatgccgatataaaggggttttttgacgccatcactaccgaacaggttagaaatgctttcgtgaccgagggggccgcagtaaggatggcagacgtattagctaaggcctgtacaattgatggactcctaagacagggaacccgctgctctcccacaatcgctaacttgatttgctttgacatggaccaaagtttccttcgtctggctcatagccacaactgcgtctatacaagatacgcagatgaccttactttttcgggcgatcaggtgccatctgatgacagcgtcaaggagatcctcgagagtaggggatttaagctccgcgatgatcaatgttacagacagtacaggggcaggtcacagtacgtgacaggcctcaccatcgcagacccaaatcagcctcggctgcccacacggcttaagaggagactccgcctcatgatgtattacatcgacaagcacggcttagctgaccactggaggaaagtaggggtcaatgacgtgatacaggaagaagcctggctgcggggcatgctgaaatacgcggggtcaattgagcctaaactggtcaaccaatggtggcaaatctttggtgaggcgtggtccaaccggacgtcttatgagcccatcccaggaaatgaagagcactga

SEQ ID NO: 14280 - RNA, 987 nt, synthetic construct
  source 1..987: mol_type = other RNA
atgacgactgccattctgaagaatttaaaaagcttggacgacgtagctcgagcgtgtggaatcgagcgggacttcattgaagcctactcaaattcactggaccaaaagagcttttacaacgtcttaaagatccggaagcgtggcagacgacgtaagggggaattccggatcgtttttgaagcccgggagggcaggttggcgagtttccacagggcactcagtatgattgtgaccaactcaaccgtctttggcgatcacgttcagggtttccttaaaaaacgctctacacggactaatgctgagaagcatctagcagctaacgtgctcctccatgccgatattaaagggttttttgacgctatcacgactgagcaggtgcgaaacgcacttgtggccgagggaaccgccttgcctatggcagacgtcctgtccaaagcgtgcaccatcgatggcctgctgaggcaagggactcgttgttctccaaccattgccaacctcgtttgcttcggcatggatcaggccttcctgcgcctttctcgatcccacaattgcgcatacacaaggtacgctgacgatctgagtttctccggggacgaagtgccatctgatgactccgtgagggagatactggaaagctgtggattcaagctccgccatgatcagtgctatcgccaatataagggtagaagccagtacgtgacaggcctgaccgtcgcagaccccaatagacctcggctaccgaaacgcctgaagcacaggctgaggttggtcatgtatcatatcgagaagcatgggctcacagatcactggaataaagtaggagtggatgaggccctgagagccgaggcttggcttagcggtatgctcagatacgccggatccatcgaaccccacttagtgagacagtggcagcagatatttgacaaagctcgctcgaacagagatccttataagcccctgccagactgtgatgaaggtcagggctga

SEQ ID NO: 14281 - RNA, 984 nt, synthetic construct
  source 1..984: mol_type = other RNA
atgactaaagcaaagcttaaggatctcaccaccctggatgatgtggcaagagcttgcggtatcgaacctgacttcattctcgggttcgtcaaaaacacaatccagaaggactatttctacgttgtgaagatggcaaagcggggacgccggaggaaaggcgaataccgcgtggtatttcaggccagagagaagcgcttatccgattttcatcgctccatcagtatgatcgtgagcaattctgcttgttttggcgaccacgtgcagggctttcgaaaaaaacattctgcccggacaaacgctgaacaccatctaggcgcggccatactgctccacgccgacattaagggattctttgatgctatcacgactgcacaggtcaaaaccgctttgatttcagaaggctccccgcctcctgtggccgagttaattgcgaaagcgtgtacaatcgatgggttccttcggcaagggacccgctgctcaccagtcctggcaaacctggtatgtgtggccatggaccagagctttctaagactggcccgtagtcacacctgcaattacacgaggtatgctgatgacttgactttctcgggagagagggttccctgtgacgaggccgttagggaaattctcgccgctgatggcttcgcacttcgtgatggaaagtgctaccgacagtttagagggaagacccaatacgtgacaggactgactgtcgcggatccaaacaggcctagactgccaaagcaactgaaacatgacctgaggacaacaatgtatttcattgagagacacgggcttgccgaccactgggagcgaataggtgaggagcatcccatgaagaaagaagcctggttgcagggcatgctgagatacgcctggagcatcgagcccaatctcgtccgcaggtggcagtatattctggaccgggctttcactgaacgggcaccctatatcatagacatcaccgatgaggactacggttga

SEQ ID NO: 14282 - RNA, 1104 nt, synthetic construct
  source 1..1104: mol_type = other RNA
atgatacagagtgcacttgctaccgtcgttgacttctctgggtacgtccgtggccgcgattctgcggtgaggtcattggagaacttcctgtatcccagcaccgtggctacagatatgacacaatcccggctgagcgaaatcagggatattggggacctcgcacgcgccactggaatacctaaagactttattgccgcctacgctaattctcaggcacagtccgatgcttactcagtcgtgctaattcctaagaaaggacgaaaaagaagaggccactttcgggctacgtttagcgccaaccaggagtggcttagtcagctgcacagaggcgtggccatgattgtactgaattccgtcgactttggagaacacgtgcagggatttatcaagaagcgttccatcaggactaatgcagagcatcatctgggcgccaaacagctccttcatgcagacatcagcaactttttcgactctatcaccactaaccagatcactcaaaatctcataacggtaggagcagccccagaagcagccagtttaattgccaagtcatgcaccatcgatggcctgctcagacagggcactaggtgcagcccgattctggcgaatctcgtgtgccggtctttggatgctgatatgatcagtctggcccagtccattggggctaagtataccaggtatgccgacgaccttactttctcaggtgatcagacaccctcaagcgacagtgttgacgccataatcacccagcacggtttcacactgagagatgggcggtgttacctgcaacaaaaaggccatcgccagtatgtgacaggtttaaccgtggcagacacagcccaaccccacctaccaaagcgcctgaaatctcggttgcgcctggttatgcattacattgaaagaaacggtgtccgagctcacttcgcccacgactgtaaacgacctatcgcccgaaacgcaaatgagctgtgggggatgttgaggttcgcgaagagcattgagccagatctcgcttcgacctggcttgaccagtggaaggcgggagagagaatcgattcctccaaggaacggcgcaggctcaaaaagctggctcgttggttatga

SEQ ID NO: 14283 - RNA, 972 nt, synthetic construct
  source 1..972: mol_type = other RNA
atgacccaaagtcgtctgagcgagctccacgacattgtggatctggcccgcgccactggagttcctgctgaatacatcgattcgtatgctaatgaggcaacccaagctgacgcataccatgtcctccgtatcccaaagaaaggccgaggacggcgaggacagttcagagtcgcattttccgctaaggaggagtggctagcccagctccacaggggtattgctatgattgtggtgaactcagtggagtttggtgaacacgtgcaaggcttcttaaagaagcgctccatcaagacaaacgccgcccagcatttaggagcgaagcagatactgcacgccgatatcagcaatttctttgacgctatcaccaccgaacttgtgtctgaatcactggtgacagtcggcgtcccccccaagatggcagttctgatcgcgaaaagctgcactattgatggcttgctgaggcagggtacacgatgtgggcctgccctcgccaacctggtttgtcggcctctggatgccgatatgttgagtctggcagctgccacaggagcgaaattcacgcgctacgctgacgatatcaccttctctggcgctctcctaccaacgggcgacagcgtaagggccatattgaataaacatggttttgcgttacgcgacgacaggtgctacattcaaagaaaggggagatcccagtatgtcaccggcctgactgtggtggacactgtacaaccccatctgccgaaaaggctcaaagctaggcttcggctcgtgatgcactatgtggctaagaacgggctgcaggcattgtttgcacagcaccatgatagacccatagcccagtcagaatccgagctgtgggggatgcttcggttcgccaattctgttgaacctgccctggccgcaaaatggtttgcccagtgggaggcgggggagcttgtagacgcacagagaggaccaaagcaggccgcatga

SEQ ID NO: 14284 - RNA, 999 nt, synthetic construct
  source 1..999: mol_type = other RNA
atgactaagactaagttagttgacttgaaaaccctggagcacgtagctcaagcttgcggagtgtctgccgaatttatcgttcaatacgcaaatgatcaacggcaaagagattactacttcaggataaaaatccctaagcgtgggaagaatagaaatcgccagtttcgcatcgtcttccaggcgaaggagtaccagctggcttcactgcatcgctctgtggcaatgataatcgccaattccgtgcagtttggtgaacaagtccagggcttcagaaaaaagaggtcttcccggtccaatgcacagcagcacttggccaaagccgtaatcctccacgctgatattaagagtttctttgattccatcaccacagaacaggtgcacgtggcgtttgtgtcacagggcgtgtcgaacgagatcgcccagctactggctaaggcatgcacaattgagggccttctcaggcagggtacccgctgtagcccaatcctagccaacttggtctgtgccgggctggataacaagctgctggcccttgcacatagctgccattccgtcttcacaaggtatgcagatgacctcactttcagtggcgatcaggtgccctctagcgccgcagttaagacgattgtcgagagcgaaggattcacactcagagacgacaagtgtaaactgcagcggcagggacggtgccagtatgttacaggtttaaccgtaagtgacggcaacatgccacgtctccctcgacgcctgaaatcaagactgcggttgattttccattacatcgagaagaatggactcaccgaacactggcaaaaaactgggcagaaaaacggccgaaggaaagagcagtggcttgacgggatgctgcaatatgctgctagcattgagcccgaccttgccaacaagtggcaggacattctgactaccgccaaagtgcagaaagctgccacggcgcgacagaagtattttgtggactgtgggatagatgatattgactga

SEQ ID NO: 14285 - RNA, 927 nt, synthetic construct
  source 1..927: mol_type = other RNA
atgacaaccaccaaactcttagacatccatgaccttgccgaactgagttatgccgtcggagtccgagcggagctgatcgaagagtatctgaccgcgcccaggcaggtagactactacgaggtaataagaatcgccaaacgcggccgcaacaggaaaggcgagtacagacaggtttacaaggctaagtcaaactggctgtcacaattgcacaggtctatcagcatgatcgtaaccaactcagtggagttcggagaacatgttcaggggttccttaatgggcgtagcacagttagtaacgcaaaactacacatgagaaaagatattgtggtccacgctgatatcaaggatttcttcaatgcaattactgaggcgcaggtgtgccagtccattatgtcgctcggatgtgcccagtttattgcctccataattgcccgggcatgtactatagacgggcggttactgcaggggactagatgtagccccgtgatctccaatgtcgtgtgcagaaacctagatctggacatgctggaactcgccagggctacgaagtctaccttcagccgctatgctgataatatcacgtttagtggtaaggctccgcctaacaaggagaacatcgaggccgtggtcaatgccaggggctttatactccaacccaagggatgctacgtgcagtatcggggctcccgccaattcgtgacaggtctgtctgtggttgatggcgttatgccacgattgcctaaacaagtcaagaagaaacttcggctgattgcatactacgtgaagaaatatggtgacggccacttcgagtttagcagtggaaatcactctattgcacctactcgtacacagctcgaagggtttatcgcttatgctcattccgtggaaccagaatttgccaagaaattgtggagcatggtgtcatga

SEQ ID NO: 14286 - RNA, 927 nt, synthetic construct
  source 1..927: mol_type = other RNA
atgaccacaacgcgtattgaggacgtgcacgatcttgctgagttaagcttcgctgtcggtgtcaaggccgaattgatcgaatcctacctgaacgccccttggcaggcccatcactatcagattatcaaaattgcaaagcgcggccgcaataggcaaggggagtaccggcaggtgtacaaggctaagaataaatggctcgctcagctgcacaggtccatcgctatgataatctcgaactctgtcgaattcggcgagcatgtgcaggggtttcttgctggtagaagcaccgtatccaacgccaagctgcacatgaagaaagacgtcatcgttcatgccgatatcaaggacttcttcaatgctatcactgaggtacaggtgtgccagagtatactggcactggggggaaacctactcatagcccagatccttgcccgggcttgtactattgacggatatctcttgcagggaacacgatgttcaccagtgctgtctaatattgtgtgcagacgactggattcagacatgctcgagctggcacgtaccaccaagagtacttttagtcggtacgcagataatattacattcagcggtatcacgccaccggcaccagagaatattgaggccgtgatcaacgggaacgggtttcagctgcaagcgaaaggctgctatgttcagtatagaggagccaggcagtttgttacaggcctatccgtggtggaccatgagcgccctaggttgcccaagaaaatgaaaaagaaactgcggctcatagcctactacattaaaaagcacggagatggccacttcgaatttccctctcgctctcacagcatcgcgcccaccagagcgcaattcgaaggctttattgcctatgcacatagcgtcgaacctcaattcgcaaagaaattatggtcaatgctgaactga

SEQ ID NO: 14287 - RNA, 927 nt, synthetic construct
  source 1..927: mol_type = other RNA
atgaccgctaccaagattgacgacattcatactctcgacgatctgagcttggtagtcggagtaaaagcgcagctgatacagcagtatgtccatgccccatgccaggctgactactaccagattatccgtatagctaagagaggaaaaggtcgaaggggcgaataccgggaggtttataaggccaaagagttttggctggcacaactccacaggtcaatcgcaatgatcattgctaattccgtgcagcacggccaacacgttcaggggtttgtgtatggccgctccacattaacaaacgcccagtaccacctactgaaaaagatcatcgtccatgcggatatcaaaaatttcttcaacgccatcacagagagtcaggtggaacaggcattcttgacgataggcgggcactcttctgtcgcgcatattttggcaagagtgagtactatcgacgggagactcctccagggtacccggtgctctcctgctgtgagtaacattgtgtgtagaaaccttgatcttcaaatgctggaggtcgccagggtaacctcgagcgtgtataccaggtatgccgacaatattactttctccggggacaagcccccctcctcaagcaatatcgaagccgtggtcaaaggctgtggctttgagctacaagggaaaggatgctatacacagcatcggggcgcccgccaatttgttaccggactgtcagtggttgatgatgaacggccacgcctgcccaagcagatgaaaaagaaacttcgtctgatcgctcactttgtgaagaagtacggtgacgagcacttcgagttttctgccgatagctcaagcatcgctcctacgcgaactcagttagagggactggtggcctacgcatactccatagaaccgcagttcgcaaagaagatttggagcatgattaactga

SEQ ID NO: 14288 - RNA, 927 nt, synthetic construct
  source 1..927: mol_type = other RNA
atgaccactacaaagattaaccaaatacattccctggaagaactaggctgcgccgttggggtaccagtgtcagatataaaaacctaccttaactcgaaccggcaagtctccttttatcgaaagctccgcatcccaaagagaggcaaagctagaaaaggcgagtacagagaagtctacaaggcgtcagaggcatgggtggcccagctacacagattgatggctctgattattcggaattcagtcgagttcgggctgcatgtccagggttttgtggacggcaggtctacaataagcaacgcgcggcagcacatgaaaaaagaggttattatgcacgcagaccttaaggacttctttaataccatcacggaggtgcaggtggcagaatacttcttggccattggagcccaccccgaaatggctcccgtgttcgccaggctgtgtacaatcgatggatacttgctccaaggcacgcgatgctcccctgcggtttccaatatcgtgtgtgaccgcctggacagcgatatgctccggctggcccgttcaacaagcagtgtgtttactcgctatgctgacaatctgactttcagcggcgataatccacctagtgccaaacagatcgaaggcctggtagaggccaacggatttaagatccgaggaaccgggtgctacagccaacatcgtgggtcccgcctcttcgttactggactcagcgtggtagatcaggaaaggcctaggcttcctaagcagatgaagaagaggctgcggctgattgcatattatgtcgggaagtatggtgaggatcatttcgagcactctgagcacgcacgctctatcgccccctctttaacccagttggaaggtctgcttgcttatgcatacagtgtggagccgcagtttgctagaaaaatctgggccatgttaaactga

SEQ ID NO: 14289 - RNA, 930 nt, synthetic construct
  source 1..930: mol_type = other RNA
atgaccagtgtgaagattgcggacattcaaactatagacgagctgtgtttggcaatcggtgctaatagagaggaggtgctccagtaccttcagagccctcgtcaggtggattactacgagctaatctgcattcccaagcggggcaaacgacgcaggggtgagtatcgagaggtgtataaagctaagtatcagtggatcgcacaggtccataggtcagtcgcaatgattatcaaaaacagcgcatcgtttcaagaatgcgtccagggtttcctggacgggcgttccacacttagcaacgccctccttcatatggggcaagaggttatagttcacgctgatatcaaggattttttcaatgccattaccgagttacaagtgaaggacgcctttagtgtcatgggagcttccttaattatcgctgacatcctggctaggatgtgtaccatcgatggctttctgagacagggcacgaggtgttcaccaggcattagcaatctggtatgcagacggttggacctggatatgcttggcctggccaattcaaagtcatctgtgtacagccggtacgcggacaacatcaccttctctggctgcagtcctccttcctacaacctgataaaggccgtggtggagaacaatgggttcgaactgcgcggatctggatgttacacccagtatcggggggccagacagttcgtgacaggcctctccgtggtagatgacaaaatgccccgcttgccgaaaaaaatgaagaagaaactccgcttgatagtttattatgtttctaagtacggggaagaacacttcgaagcctccgccggagcacacacaatcacacccactatgactcagctgctaggaatgattgcctacgcctatagcgtcgaaccagtatttgcaaagaaactctgggccaaactggctccatga

SEQ ID NO: 14290 - RNA, 936 nt, synthetic construct
  source 1..936: mol_type = other RNA
atgacaactcgacgccttaaggatatacactctgcacatgagctcgcccaggcagtgggtgtgagcgagtccaaaattctggattatgcggtatctgactgccaggagggtttctacgagaaacttgagatacctaaacgggggcgcaacaggaaaggagaattcagagaggtctataaagctaatcacaagtgggtcactcaactgcataggtccgttagcatgttagttgctaactccgcaagctttggaacccatgtgcaggggtttttaaaaggtagaagcacattgacgaatgcggaattgcatctcaggaaaagcctgattttgcacgctgacatcagaaacttctttaatgtgattaccgaaccccaagtggctaaggccttccttactatcggggccacccccgagatttctaaactgcttgcaaggatttctacgatcgatggatttttgcgccagggaacacggtgctcacctatcatctccaacctcgtctgtaagggactggaccaggccatgctcgatctcgcatcaactcacgactgcatgtacagtcgctacgctgataatatgacaatctcgggggccgagatccccgacattagtgcgattagcacaatagtgactaataacggctttgaactccgaggctcaggctgttatatacagcggagaggcagtcggcaatttgttaccgggctaagtgtggtagatagggaacgtccaagactgccgaagaagctgaagtcgaggctaagactggccgtgtactacgccagcaagtatggcaaggaacacttcgaacggtcacgccacgtcgacaccgtcaccccatcttgggcccagatgaaaggcatgatcgcctacgctcactccatcgagcctgacttcgccgagaagctgtggaagctgctgcgtcattcccgatga

SEQ ID NO: 14291 - RNA, 936 nt, synthetic construct
  source 1..936: mol_type = other RNA
atgacgaccagacgtcttaaagacatccacagtgtcgaggagctggctcaagcagtaggggtgtccgtggcaaagatattggaatatgccgtgagcggttcacaggaaggcttctacgagaagctggagattccaaaaagaggccgcaataggaaaggcgaatttcgagaggtttacaaggccagttataagtggattgcacaactccacaggtcggtgtccatgctggtgaccaactccgtctcattcgaaggacatgtgcaggggtttttgaaaggacgcagcacactgacaaacgccgagctgcatcttagaaagagcattatcttgcacgctgacatccgcaacttctttaatgtcataactgagtgtcaggtcgcaaaagctttccttactattggcgtaaagagtgaagttgcccaattattagccagggtgtgtacaattgatggctttctccggcagggtactcgctgctctccgatcatctcaaacctagtatgtaagtctctcgaccaagccatgctggatttggcttctacccacgactgcatatactcacgctacgctgacaatatgaccatctctggtgaacagatgcccgatattcgggtggttgcacagatcgtgaaggataatggcttcgaactgcgggatacaggatgctacacccagctcaggggagcgagacagtttgtgaccggacttagtgttgtcgatcgtgaaaagccacggctacctaagcagctgaagaggcggctgagactgattgtctattatgctagcaaatacgggcgagagcattttgaccggtccaggcaggtggacacgatagcccctagctggactcagatggaggggatgatcgcgtatgcccacagcatcgagcccgagttcgccaacaaactgtggaaaatcctccgaaaatccagatga

SEQ ID NO: 14292 - RNA, 1005 nt, synthetic construct
  source 1..1005: mol_type = other RNA
atggcccttacgcccttttccagaatcagacacgtcggagacttagctctacacctgggctgttcacccgaggaactgttgcactttgctaatacacaacctcagcggcagttctatgacctcctgcggattcctaagcgccggggtcgggacaaagttagaatcgtctaccgtgccaatgaggagagtctggcacgaatgcataagactttagccggcgaattggcgccacaggagggagaggatttcgatgagtgcgtgcaagggttcgttagggacagatctatagttaccaacgctcgcaagcatctgggctgcaaggtgttgctgcacgccgacatacaaaacttcttcgagtccattacactcgcccaggtgatgagcgtgtttgaaaccctgggatgtaattcgggtgtggcagctctgctgggccgcctatgcactctggacgggtttctcccacagggagcacatgctagtcccgcactcgccaacagagtatgccttcatctagataccgacctgaaacaattggccgcacgacacggctgtgtgtatacccggtacgcagatgacatcgctttttccggggatgaagtcccagagcctcagagggtcgaagccattctcaataagcatgggttcaaactgagggctgagaagtgtcgcatccagcgccgtggacactctcagttcgtgacaggacttagcgtcgccgatacccagggccccaggtatagcaggcaggccaagcgatggctgcgacttgtgctgcactacgcgagcagatatgggcttgaaaaccacttaaaacgtacgggtagggggtcagcaaacccgaaactcgcctacgcggaactcgagggcatggtacgctttttgcggtctgtggagccgaggacaactgaacggatgaaccctctgctcgctgagatcggtttcagactgcacgccgacgccagggaagaagctcatgagggcgaggatgaaaatggcgagccatga

SEQ ID NO: 14293 - RNA, 987 nt, synthetic construct
  source 1..987: mol_type = other RNA
atgaccggcgtagaatttccattcaagacaatccgggatgagcgggacttagcgcagcacctggaatgtgaagcgaacacactcctcttcctggccgacccaagcaggcaacatgagttttatgccgagctccgcattcctaaacgcaaaagaggcggatttagactggtgtaccgatcgcgagaggatgtcctctccagaattcataaggcactggctgttgcagtcgcagacgcagccaggttccgtccatgcgtgcaggggttcgtgaagaaacggagcattgtgactaacgctcgccagcaccttgggaagcagctgctcctccatgccgatatcgagcactttttcgaaagtatcagattgccttccgttatctcttgctttcaatctctggggtgtcgaccccaagtcgccgagcttttgggccggctgtgcacaaggaaggaagtcctacctcagggagcccatgcttcacccgtgctggcgaatattgcttgtagacacctggaccaggatttcgagcagctagctgaggtgcacgggtgtacttacacccgctacgctgatgatttgacttttagtggcgacgaagtacccgaggaaggtaatatccaaagtattctggccggctatggattcaagctgagggacggaaaatgcagaaggcagcagcggggcagaggacagttcgtgaccgggcttagcgtcggagatccggttggcccaagaatacctaagaaaatgaaacgccagctccgcagggacttacactacgccacccgatatgggttggaagaccatcttcgtcacgtgggtcggcctaccgtggatccgtgggaggaatattcagtgttagaaggccggacacgttacctggccagcgtagagcccaagatcgcctcagcaatgtggaaacaacttgttaggataagggcccagctggacaagtctgctgacacgggttccgaggaggcaccctcctga

SEQ ID NO: 14294 - RNA, 978 nt, synthetic construct
  source 1..978: mol_type = other RNA
atgtggatgagtcttagaaatttcgccttcgtgagaaacattcaagatctgagtagagagttaggatgtgaacgggcccagctggaggaatatatctcttctcgccagagggaattttacaaggaaatgagaatcccgaagaaaggtcggcggcggagggaattcagaacagtttacaagccttgcagggagttggctgtgctgcaaaaaaacatcgctactctgctgcagcgcaacccactcccggagtatgtccagggcttcgtgtcagatcgatcaatctacaaaaacgcgaagattcatatcggccagaagattctgctccacgctgatatccacgaattctttgagtccattaccctagaacgggtccgtgacgcatttgagacatgcgggagcaaccgggaggtggccacattgctggccaaactgtgtaccttagacgggtttctcccacaggggagctctgcttcaccagtgctcgctaatctcgtatgtcgccaccttgacaccgacattaatgccctcgcgataagctacgggtgcaggtattcaagatacgccgacgatataactctgtctggcgatcgcgttccccctgcagagagcgtcgagaatctgcttaagaggcacgcctttgagctgcgacctggatcttgccgtacccagcgtagaggccatggacagtatgtcacgggactgtccgtggaggacgcggtacctcgaattccacgcaggatgaaacgccggctccggttggttctgaggctagcccgctcggcaatgcaacatgcagaccttttgctgtccgagacaaagatcgatggttggctggcctttttccattccgtggaacccaaccttgccagcaaattaagcgctgagtgggatcccatacgagcaagattgaataataggcacactggctcccctgatgaccccagtgaagaagtgaccgaggaagagcccagtgactga

SEQ ID NO: 14295 - RNA, 924 nt, synthetic construct
  source 1..924: mol_type = other RNA
atgctgccgctacgcttctcagacctccgcagcgtgcaattggtctgcgcccacctccagacaactcctagggctctgcaaagtttcctgcgggaaccagaaagatactatacccccattgatctgccccaggctccaggtcgacgtccaaggagggtctttgaggttggggcccctctgcggagaatacatcgggtgctcgctgtggcgttagccccacacgttgacgcacagccatcctatatacagggattccgcagtggccgttcgatccgcagtaacgctgctatgcacgtagacgcggaggttgtagtgacagccgatatccgaggcttttttgacgaaattgatgtcgagcgggtgaccagcctgtttcaatccttaggcgccacttttcaggccgcaaccctgctggcaagactgacaacctttcaggggcaccttcctcagggcggacgagcatcaccggccattagcaacctcgcagtgcccgatctggataaagcattggtaagactaggtgggcgctgtgcatacacacggtatgccgacgacctgactttttcaggatctgcggctgcatgccctacggaagagcagatcagacgagtgctcgaatctagcggattccagttacgccccaggtccttccgccggcaactcaaagggagcggccagatcgtgaccgggctttctgtcgtgtctggctctcccacacttactagacggacgaggcgggagattgagcgtgccctgtacttcggcgctaggttcgggctttcctaccatgcctccagggccggtagtgaaaggagccctcagagagagttcgccagattgtgtggacacatcgctgctgccggaggcgtggataagaccctgcatgcgaagtgggttaagttgctggagtcagtcaatctctga

SEQ ID NO: 14296 - RNA, 969 nt, synthetic construct
  source 1..969: mol_type = other RNA
atggagcacgttaaattcgaccagatcaggaacgatgaggatctcgcacggaatttcgggtgtaaggtcaatgacctgagaagactgacagagggtgatcagcgactgctctatcttaccattcgaattccaaagagaggggctgcgagacggggtcagtaccgcatcgtgtacaaagcgctggaccaaactttgcgcctcttgcaaaaaaatcttgctagcagtatcgcagcccgggtgaccttcgctgatcatgtccaggggtttgtggctaggcgctctattgtcacaaacgccagaaggcacctcgctcgaaagtacgtgctgaccgccgacattgagaacttcttcgaatccatcacaatagaacgagtggcggctgcattcagaggattggggtgccacgaaggagtggcgcagacactggccaccttagccaccctgaatggccacctggtgcaaggctcatccgcatcacctgtcctagctaacctcgtatgcgaaggcatggacgccgacctattagccttgggtggttcgtacgattgtacttttacgcggtatgccgacgacattactctgagcggcgatgagcgcgtaccttccggggaagagatcgccgatgtcctggcaaggcacgcctttgttctgcgggacgggagggtgagggttttacgccgtggacgtcgccagtatgtgacgggcctgagtgtatttgatgccgaaagaccaaggatcccccgcgttcacaagagacggctgaggctgctccttcattacgccagcaagcatggcttggagaaacattttgagaggataggaatcgaacccgagaaccggtatcgggaactccggagaatggagggctggatacagttcatgaggtctgtggagccccgacgcgcagctgagtttgcagcccagcttgatgacgcccgtgctgctgacgcacgtggacttccgaagtga

SEQ ID NO: 14297 - RNA, 1005 nt, synthetic construct
  source 1..1005: mol_type = other RNA
atgatcgaattaaacttcaaagcgctcgaaaacatagaccatattgcccgagccgtgaattgcttcccctcttttataaacatcgtgcttgagcgcccttccctcttctatacgctgaagaagatccctaaacggggaaaaaggcaaaaaggtcagtatcgcattatttatgaggttgagtccgagctgaacattattcagaaaaacatctcaaccgctgtgaccagtaagcagcagttcccagagtatgtgcaaggctttgtcagcaagaggtctatcgctacaaatgccagtctccacctttcacagaaatatgtgctgaatctggatgtcaagaacttctttaactccattacccagaagcaggtgtcggatgtctttaaagagttggggtgcaccgagaagtcagccgaaatcttcacgaaactatgtacatttaacggacacctggtacagggcgcctccacaagtcccgtgcttgcgaatttggtgtgtaaagaactggaccaggacttcgcaggattagctcaacagtacaattgtagctactcccgatatgcagacgatatcacattttcaggcgatctgacccccagaaaaaaagacatcgagaagtgcctgaacaaatataagttcgagctgaatccagccaagtggaagcaccagaggagaggccgttctcaatacgtcactgggctaactgtttttgacaatactaagccaaggatccccaaattcataaagaagcaattgcggcagatcctctactacgccagcaagtacggttgggacaatcatcagtacaaggttaatagccataaccacaagaacatgtactatgatatcaagcggattgatgggctcatcgcatttatgtacagcgtagaacctgatagagcattcgagtttgacctgcaatggcagaaaattctgaaggaagaaggcattgtcgatgaacaggagcgggacccttacgctatattcgctcgccactctccggtgtga

SEQ ID NO: 14298 - RNA, 1023 nt, synthetic construct
  source 1..1023: mol_type = other RNA
atgatccaactcgacttccagagtctcgaggacatcgataccgtggccatggttctgggctgctttcctagttttatcaacaccgttatagatacaccatcaaggttctataccctgaaaaagattcctaaaaaggggaaagggcaaaaaggccagtatagactagtgtacgaagtggatagcgagctgaatgtcattcagaagaatatcgccacggccatcgcgagtaaaattcagtttcctgaatacgttcagggctttgtgaataagcgctcaatcgcaacaaacgccgcactgcacctgtctcagaagtacgtgcttaacctggacattaaaaacttcttcgattccataaaccagaagcagatcatagaggtctttaaagagataggatgtaccgagactattgccgagatctttgctcggctttgtactttcaatggccatttagtccagggtgcttccacttctcccatcttggctaacttggtttgcaaggaactagatcagaacttcgtagagctggcaaagaagtacaactgctcttattcaagatacgcggacgacattaccttctcgggagacataacccctcgtaagaaagagattgagaaatgtctcaagaaatacggcttcgagttgaatcccgtcaaatggaaaggacaaccacgaggtaaatctcaatatgtgacgggactgactgtgttcgataatacaaagccgaggattccacgggtaatcaagaagcagctcagacaaattctgtactatgccagcaaatacgggtggtccaatcacaagtacaaggtgagcatttgcattcagaagaacatgtattatgacatcaagcagatcgatgggatgattgcttttatgtattccgtggaacccgaacaggcccttaaatttgacttacagtggcagaagatactcaaggaacaggatatcgattacgtgaagggtcgggaccccaatgtcatcttcgcaaggcgcagccaagtacagacagacatcagcgaatga

SEQ ID NO: 14299 - RNA, 1023 nt, synthetic construct
  source 1..1023: mol_type = other RNA
atgattaatatcgatttcactacgattgaggagatttctcaaattgagatcgcattcgggtgtagcatcggctttatacagacagtcttagataaacctagcctcttttacgatcagctccagataccaaagaagggccgagggcagaaaggcaagtacaggatagtgtataaggtcgaagacgagctcaatctgctacagaagaacattgcaacggtgatcaatagcaaaatcagtttccccgagtatgtccagggattcgtgtcaaagcggagcattgccactaatgcctcgcttcatttgtccaaaaagtatgtgctgaacatcgacattaaagacttcttcgacacaatccatcaacagcaagtgtgtgaagtgttcaagaatctcggttgcgttgacaagattgcggacgtgtttgctcagctatgcactttcaatcagcacctggtccaaggcagttcaacatcacccgtgcttgcaaaccttgtgtgccaggaactcgatgaagccttcgtagatttggccaaacagtacaactgttcctattcacgatatgctgacgatatcacattctccggggaaaagaccccaggcaaaaaagagatcaagcgctgcctgaagaactacggatttgagctgaattctaacaagtggaaatcccaatctagagggaggagccagtatgtcaccggattgaccgtttttgacaccactatgccgagaattagtaagagcctgaaacgtatcctgcggcagatcctttactacgcctccaaatacggactggagaatcatttgaatagagtacacgactttaaccacaagaacatgaggtatgatatcaagaccatagacggtctgattgcctttatgtactccgttgagcctaacagagcattacagctggatatggagtggcagcgcatactcaacgctcaggaagccgaacaagcggagagctcttctcggaaaggcaagcgcaaccccgaagttatctttgctaggcggagtaaactgtga

SEQ ID NO: 14300 - RNA, 993 nt, synthetic construct
  source 1..993: mol_type = other RNA
atgaggaggattgagttttccgaaatccgcaatatagatgatctggcgaagtgtctatcttgtacaaatgaagacctgcgccggctggcttttgacgctacctctgccaaacattgccgtaaaatgctgatcccgaagaaaaacaaaagtggccacagaattgtctataagtcctttgataagtccctctcactgattcagaagaaccttgagacaactataaaccacaacgagattttcccagagtgcgtacagggcttcgtgcgaaaagggtgtattgccaagaacgcaggtaaacacttggcaaaacggtacgttttgaatgccgacattgaagatttcttcgaatcaatcggcatgctccagattgtgaatgcctttaaaagaatcgggtgcaatgatgatatcgctataatgctgagtaggctgtgcacactcgacgagcagcttgtacagggcttcagtacctctcccgtgatttcaaacctggtgtgtcatggcatggacgaggactttgtgacccttagcaagcagtacaattgcacttatacccgctacgccgacgacatgtcatttagcggaaatgccgtgcccacccagggagacatcgaggatatcttaagcaaccacgggttcaagctcaacaaaaaaaagttctttctgcaaaagcggggagacaagcaatacgttactggcttaacagtcttcgatgacaaatatcctcgaattcccaagaggatcaagaaaaagctcagattgacgctgtattacgctgataagtacgggctactgaaccatttcgaaaagatcggaatagattggagctttgtggactgggagatcaataaaatcgacggttggattgccttcatgttctccgtcgagccagcgttggcaaagaactttaaagctaagtggaacatcatccttgatgaacacaagaaaagcatgtcgtccgaatctggtgcatataatgtttttcctgagaattga

SEQ ID NO: 14301 - RNA, 957 nt, synthetic construct
  source 1..957: mol_type = other RNA
atgaagaaaataaagttctctaagatccgggatgtgaatgacctggcacgtagtttcggttgtagtaaagatgacttcaaaatcatcgagagcccaagcgaggccgtcagccactatagccgtatgttgatcccaaaaaagaacagaaagaacgctggctcataccgagtggtgtataaagttctcaaccctaaactacgcctgttgcagaaaaatatctccaccgctctggaatatgcatgctttttccccgaatacgtgcaaggatttgttaggggacgaagtattgctactaacgcaagacaccacttagcgaaaaagtgcatcctaaacctcgacatcaaggacttctttgaatccatctcccaggatcgggtaattcgggtattcgaacatattggatgcaattctgaaattgccagcatcttagcgaaagtgtgcaccataaacgggtatttgcctcaggggacatctagctccccaatcatagccaatctggtgtgtaaggatatggacgaagaacttaattctctggctatgtcctattctatcaactactcaaggtacgcagacgatatcactttttcgggtgatgcctgtccgcagagggaagagattgaggtgatactgggccgcaataattttcgcatgaacaacgagaagttcgtcatgatgaaacggggccagaatcagtacgtgacggggctgacagtctttgacgccgagagtcctcgcgtccctaggaagattaagaagcagctgagactgattctctactactcaaagaagtatggcattgaagatcatctcgagaggattttcgccgacaaggtcgggtgcccctacaaaaaggagtttgagaaaagaaagatcgagggttggattggattcctttgttcagttgagccccccctgggctataaacttaaagagcaatggctcgagatagtgaagtga

SEQ ID NO: 14302 - RNA, 1101 nt, synthetic construct
  source 1..1101: mol_type = other RNA
atgaagcatactgagcttagcaccaaaaaggatctcgccaactacctgcgctgtgacctgttgttcctggagaaagccattgaggatgattacttcattcgaaatatcgataccttcaatcaggaagacgtgttgctagctagtctaaccagcctcaataacaacatcatctccgtcgatcaattcaagctccggaagaaaggccacaatggcgggtttagaacagttcataagatatggaccctgcagctcaaaaattccctgaagattctcaacaatcacctgatccaaattttcacaccacttgacattgttcacggattcgtcaaagggaagaatatacgcagtaatgctgagtgccatctggccaagaagctcgtgctgtccgtcgatattaaggactactttgagacaattacggaaaaaatggtagaagaagctctgatctcgatcggctataatgaaaacatagccctgtggatcgcaaaaatcgtgaccattgacaatcatctcgtgcaggggttctgtacatcacccactctggccaacatagtgacaaatcagctggacaaagagcttaagaaactgtgcggcaagaaaatcacctacaccaggtatgctgacgacctttacttcagctcaaatacagaagagatcccactagaatccatcaagctgactattgagaagcacaattttctgctgaacgacaagaaaactaaatttatgaagcgtggccaaaagcagtatgttactggattaacgatcttcgattcatatatccctcggatttctaaaaaacggaagaaaaacattcgcctggagatcaactacatcgagagggtgggttatagatctcatactgtacacaagctcatcaaggagggtgaagatcccgatagcttggacttttactctaagcttggagaggagatcaaattgacccgaaacagattatatgggtggttgcactttatccagagtatagaacctcagtttgccaagaagtactataaaaagctcaacgacatagaccagaagtacattttgatggcgaaacttaacgcattaaaaaagaacgcaaggaactctgatatttga

SEQ ID NO: 14303 - RNA, 1086 nt, synthetic construct
  source 1..1086: mol_type = other RNA
atgaagcacacagaattatctacaaaacaagacttggcgaattatctccggtgtgatgtagcctttctagaaaaagcaatcgaggaggactatttcatccgaaatatggatacatttgacccggaggagattctgctttccagcctgaagagtaacatcagcgtttacagattcaaattgaagaagaaaggccagaatggcgggtatcgaaccgtgcacaggatttggactgcacagctcaataactcgctcaaaattttgaacgcctacttaactcagatcttccagcctctcgaaatcgttcacgggttcgtcaagggaaagaacattaaatccaacgcccagtcacacctagctaaaaagatcattctgtctgtggacattaaagattacttcgagactataaccgaggaaatggtcaagaacggtctgatgtccctgggttaccgcgaggatatcagcctgtggatcgccaaaataaccacgatcaacaaccaattagtccagggattctgcaccagcccaaccctcgcaaatattgtgacccataaactggataaagacctgaagaagctttgcgctaaggatgtgacatatacccggtacgccgacgatctgtatttcagttcagacactaaggaaattccccttgaaaacatcgcctcactgattgaaaagcactcttttgtgttgaacaacaagaagacaaagttcatgaaacgggggcagaagcagtatgtgacaggactgaccacttttgacagcaatatccccaggatctccaaacaaaggaaaaagaacattcgcttggagattaattacataaagaagttcggctacactgctcatgctaagcataggcttatcaaaagaggagaagatcctaatgggctcgacttttttaacaaagttggcgacgagatcacgctgacacgtaatagactgtatggctggcttcattttatacagtcaatcgagccacagttcaccaagaagtactacagaaagctgaatgatgtggacaaaaactctgtactaaattccagtctcaaggagatactgaaacagtttcgccaaaatatgtga

SEQ ID NO: 14304 - RNA, 1098 nt, synthetic construct
  source 1..1098: mol_type = other RNA
atgaaacactctgaacttattacaaagcaggatctggccaattacctacgttgtgacctcgagtttatagagaaaattatcgaggatgactacttcatccggaacctggatagacgcaatatcgaggagctccgaagcgccctgactagcaataaaatcctggtggatcggttcaatctgcgtaaaaagggacagaacggcgggtttcgcactgtccatcgagtctggactgctaaactcaataacactctgaagatactgaatcattacctcgtcaaaatacatcaaccttcagaaatggtgcacggttttgtgaaggggaagaatatcaggtccaacgcagaatgtcacttggaaaaaaaaatcgtgctttccgttgacatcaaggactacttcgaaacaatcacggagtcaatggtcaccaattctctcaagaagctgggctttaaggataacgtagctttgtggattgctaaaatcaccacaattgagaaccaactggtacagggtttctgcacctcccctacactggccaacattgttacacattctcttgatgaggaactcaagagtctatgcggctccaatatccggtattcaagatatgccgacgatctgtacttcagctccaacactgacatattgccccttgacgacattcagctggcagttgaaaaatacggctttctgctgaacgagaagaagacaaaattcatgaaaagggggcagaagcaattcgtgaccggcttaaccatcttcgattcacacagcccacggattagtaagaataggaagaaaaacatccgcctcgaaatcaactgcattacgaagtttggatacaccgcccacgcaaagcataggcttatcgcgagaggggaggacccaaaagatctaggctttttgagtaagctgggagacgaagtgaccaatactagaaaccgcctgtatggctggttacactttattcaaagcattgagccccagttcgcgaaaaagtattataagaaactgaacgacgtgggagagaattctgtgttgagatcgacccaggctttggagattctcttacagataagggccggtcagaaggaaagctga

SEQ ID NO: 14305 - RNA, 1029 nt, synthetic construct
  source 1..1029: mol_type = other RNA
atgaaacacaccgaaatcgagactagacagcagcttgcaaattacctgcgttgcaacattcattttctcgaaaaagccatcaataacgagttctttattcgcgacactaaaatcagcgaggacgtgatcccaaccattagcattccccctagtgaaataacggtcagcaagtactatataaagaaaaagggcaagaacggtggattccggattgtacaccatatctggacataccaattggagaattctctgaagatcctgaacaactatttgaacgagatcttcattccttttgattttatccatggattcgtgaaaggcaagaatatcaaaactaacgccgatactcatctggcgaaaaagataatcctatccgttgacatcgaaaactatttcgaatctatctccaaggagatgattattctcggcttatgcaaaatcgggtttaaagaggagatcgcagaatcaatagccagtatagtgaccattaatggcttcctgccccagggtttctgtacctctcccaccatcgctaatatagtgactcacgacctggatcagcagctgaagaaaatttgtggcacaaatattcagtacaccaggtatgctgatgacttatacttctccagcgatatagaaaatatcccgctcctggaaattaccaagatcatcgagatttatggattcattctgaacgagaacaaaacaaagtggatgaaaagagggcagctccaatacgtcacagggttgaccacgtttgactcgaacacatcacggatttccaaaaagaggaagaagaatatcaggcttgagatatattacctaactaagtttgggtttcggaagcacatcaagaacaaactcattaaatctggagagaatatcaacgctgaggacttcgagtacaagctgattgacgaaatcgataagacacgcaataatttgtttggttggcttcacttcattaagagtatcgaaccagaattttcagccaagtattacagcagactgaaaaaagcaaagcgatga

SEQ ID NO: 14306 - RNA, 1011 nt, synthetic construct
  source 1..1011: mol_type = other RNA
atggaacacaatgagatagatactctcaaagacttggcaaattatttgagatgcgatatcgaattcctggaaagcgctgtgtcatacgaatattacgtgaaagatgccggcgtggactttaaagactccataagcaagataatcgtgagtaagttcaatatcgccaaaaaaggaaagaccggtggttttaggaccgtttatcagtgctggagccattttctctcttcatccttgaagatcctgaataccaacctgaacgagatctttatccctaaccagttctcccacggattcgtaaaagggaagaatattcagacaaacgcttcctgtcacctggggaagaagttgcttctctccgtcgacatcaagaattactttgagagtattagcaaggatcgaatttgtaaatcgctggaaaaacttgggttcaaaaagcatgtcgcggagtggatcagtaacattacaactctgaacaaccacctgcctcagggatttgctacttctcccactctagccaacattgtcacccaagagctggataatgagctctcactcctctgcggcgacttaattacatattcgcgttacgccgacgatttatacttctccacgaatttagacgagatttctctggcagaaatcacctcaattatcgagaactacgggttcaacctgaactctaaaaagaccaagttcatgtctagaggaaaaaagcagtatgttacaggtctgacggtgtttgatgtaaaatatccacgcatcagtaagaggagaaagaagaatatacggctcgagatctactacctaagcaaattcggctataagcggcacatcaggaagaagcttataaagagcggcatgaatcccaaagatccagactttaagtctcatgttagcgtggaggccgacatcacacgcgataagctgtacggctggcttcattttattaacgcaattgaacccgacttcgctaaaaaatactatccgaaactgaaaaaggccaagcaatga

SEQ ID NO: 14307 - RNA, 1038 nt, synthetic construct
  source 1..1038: mol_type = other RNA
atgaagcactctgatttaagaaccataaatgacctggccaactatctgaggtgcgacgtcgctttcctggagagggccacttctaacgaattcgatgtgctcgacctagcaaatggtgataaacttaagcttagcccatccggagtcacagtaaccattgcgagaatcaaaaagaagggcaagaaaaccggctttcgaaaagtccacaagatatggaccgatgagtttaagaatagcctcaagatcctgaacaactatttacgagagatctatattcccaaagactgtgtgcaagggttcatcaagaatcgcagtatcaagactaatgccaacctccatctggggaaacgtctagtcctcagcgtggacataaagaacttcttcgaatccatcaagataaagatgatcgtttccggcctgacagaactgggattccagaagagcatagcagagtttatctcggagtttgtcactattgagggttccttggtgcaagggttctctacatcccccgttctggccaatatagtgtcaagtaaactggacttggaacttattaagttttgcggaaattccctgatttacagtaggtacgctgatgatctctacttctcgactgacgacaatgaaattgagttggacgcaattgaaaagattatcagcagccatggctttagcctgaaccatgacaaaacaaagttaatgaaacgtggacagttgcagtacgttaccgggctgacggtgttcgatagtgatagagctcgcatttctaaacagatcaaaaggaaccttagactggagatctattatatcaccaaatttggttaccggcggcacattcgcgtaaaactgaaaaaggagggctttgattcatcacttgagcacttccggctctttgtgaacgaggaaatcgaggctactatttcacggatttttggctggttgaacttcatccactctgtggaacctgacttcacagccaagtattacaagacgctgatcaagatcaaaccgaattactaccgcaaactcaactga

SEQ ID NO: 14308 - RNA, 1086 nt, synthetic construct
  source 1..1086: mol_type = other RNA
atgagtagctatcccatcatcagaattaactactacctcccgtaccctaatgcccatctctatatctttgacatgaacctgttggagattaacactaagaagcagtttctctatttgctccgctgtcgagagtccttcctgaatctgattaactccagggaatacgtgatcatcgattacactaagaacgaaaacgtggatgtcgaaatttctgaaggtaccatagttatcgaacgcttctacatcgaaaaacgaaatccaaccctggggtaccggaccatctttaaaagtcttaatttcgagctggactcttgccagaagattctgaactcacttctgctcgacgtgtatacgcctctagactgtgttcaaggcttcgttcagaagaagaatatcaaaaccaatgccagcgtgcaccttgccaaaaagcagatactgcggctggacattaaggacttctttgagacaattaccaaagagcagataatcgaatccttgatcaagttaggggtgaacattcagatcagcgagtggattagcaatattgcttgcgtcgaagaacgcttagtgcaaggattcagttcttcacccattctcgctaacattgtcgccagagagatggacctggatatcctaaagaatatcgactccaccatcaattacacacggtatgcggatgacctgtatttttcaagcaatctgtctaagcccaacctcgagcttatagtcgattccgtcataaaattcggctttaaaatcaactacgcaaagacgaaggtgatgaaaaggggacagaaacagtacgtgacaggactgacagtatttgatggcctctttcctaggataccaaagaaaattaaacgggagttaagactggaagcatattacatcggcaaatatgggtacgaggagcacatcattcacaagctgaaaatcaagaaacaccagctaaaggataaggagactcaaaggcttgtggtaaatgagattgatatcaccagacatcgtatatatggctggctgcatttcataaactcaattgagccagaattctcgaagaaaatcttgactgagttgaagaagtga

SEQ ID NO: 14309 - RNA, 1029 nt, synthetic construct
  source 1..1029: mol_type = other RNA
atggatttgctgcagattgaaacaaagaaggaatttctgtacttccttaggtgtagggaatcattcctggatagtgtcaatctccgggaatatgtgatcatagacaacaagaagaacaagaatgtggactttgaaattctagagaataccatcgctatagagagattctacattgaaaaacgcaatcctactctgggatacaggacaattcataactccttaaaccatgagctggaacactgtcagaaaaccctgaatactggcctgtcaaatatctacaaacccttaggatgcgtgcagggattcgtgctgaagaagaacatcaagacaaatgcctttgtccatctggctaaaaaacagatcctgacgctcgacatcaaagatttcttcgaaactatcacgcagaaacaaatcatagaatccctcactaagctgggcattaacatccaggtcagcgagtggatctcaaatatcgcctgcgttaatggctacttagttcagggcttttctacctcccccattttggcgaacatagtggccatagaaatggacctggagatatttaagaacatcgacgaaaccattaactatactcgctacgcagatgacctgtatttttcttcggattccactcaaatgtctctcgagctaatcaccaaaattatcacaaagtacgggttcgagatcaacaacagcaagaccaaactgatgaagagagggcagaaacaatatgtgacaggcttgagtgtatttgaccataactatcctcgcatcccaaaaaagattaaacgggagctccgactcgaggcatattacattggtaagtacggttacgaggagcacataatgcgaaaacttaaaatcaagaagcaccagcttaaacaccaggagattaaggggttgattatcaacgagatcgacaagacaagagatcggattttcgggtggcttcacttcattaatagcatcgagccaaattatagcaagaaaattacccaagagctcaagaagaccagtgccaatcgttga

SEQ ID NO: 14310 - RNA, 987 nt, synthetic construct
  source 1..987: mol_type = other RNA
atggagaatcgggattactacatcttcgaggagtattctgaagccgtggtcagtactgccatcaatataaaacggtttcacatccctaagaagaaccctgctctaggccatagaaccattcacaagcccttcaccggaaacctggaattttgcctcaagctgctgaatagtgagattagcaagctgttcgtccccggcatcgcagtgcacgggttcgttgccaaacggaacatccgatccaatgcctattcgcatctatccaggaaatatctgcttagcgttgacatcaagaactttttcgaatccataagttcaccccaaattgtggaaagccttgtcaagataggagtgaatcgtgacattgcggaatcagtgacctctgtggtgactatcaatggcctgttggtacaagggttttcaacgagcccaacattggctaaccttgtagctaaggaatttgacgatgatattcagatgttcgtgggtgctgatattacatacacccgctacgcagatgacctgtatttttccagtgatacatctttgcctgaggttgacaagatcgaagccattttaactcagtatggattctctctcaaccattccaaaactaagtacatgcctagaggcaaggcccagtacgttacaggcctctctgtattcgacaaagcttacccaagaattccaaaaaagatcaagaggaatgtgcgactcgagatccattacatcaaaaaagacgggttcaaagtgcacatcatcaagaaacacaagattgacgaagatcaggtcccaaaggatatcctcgacgcaataattgagttcgagacgtacaacataaaacagaacttgtttggttggttacgctttatcaacagcattgaaccggcatatgcgcagaaatatctggccgagctttcagagattgagagggccaacagcctggacaaggtcgagctgaatgagatcaaccccaatataaccctgtga

SEQ ID NO: 14311 - RNA, 1080 nt, synthetic construct
  source 1..1080: mol_type = other RNA
atggaaaaacataagctggtgaccttggttaccgccagcttctatatgaaggtgagtgatatcaataacctgaatctgttggctaattatctgaagctggacaaaaatctacttaagacgatttgcgagaacgactatataggcctgtccgccagagaaatactaaagtatcgcgcagataatagcgatctgacactggtcatcaagaagatcaagatctacaagaaaaacgggggcattaggacagtctacagtcccgtttccgactctgtaatcaactgcctcaaagtgctcaataaaaagctgtccaagatctatgtgccatctaaaaacgtgtttgggttcattaaggggaggagtgtgcagtccaatgcctcacagcacctgggaaaaaaatacgtgtataaggtcgatctcaaggactacttcgagtgtattaactctgacatgttggaaaaagcgttcatgcggctcggttttaataaggctgtgcttgattgcctttgtaaaatcgtaactatcaacaataccctcgcccaaggctttcacacctcaccaactttggcaaatattgtgttcatcgacttagacaatgtcttcagtaacatctcaaaaaacatcacttacaccaggtatgccgatgacctttacttctcctccgatgaagagttcgaaatacacgatttcattgtggagaatctgaaaaagtttggatttgaggtgaacgaaagcaagacccgtatgatgaaacgaggttctaaacaatatgttactggcctgacagtttttgaccctgactaccccagaatcgcaaaacggataaagaagaagattcgccaggagatttattacatcaagaagtacgggtacaagggacatgtaatgcataagctcaaggtgaaaaacaaggattacaagacaaacgaagatgtcaaaaacaaagtcgacttagctatttcagagttacagagcaaaattaacggctggctgctgtatatcaattcgatagagcctaagtttagcaaaaagtactctgagtttctctacaagaaaagcttcaaaccgattagcaacaattga

SEQ ID NO: 14312 - RNA, 1011 nt, synthetic construct
  source 1..1011: mol_type = other RNA
atgaagcctactgagataaatacaaccaagcgcttagtcaactacctaaaattagacgagatgagcttcaaattgatgaccaataacgattatgtggtgatcaacgatgtggagaacgaaattgaaattcccgatgctctgaagattaggaagctcaatatctctaagaagaacggggggaagagagtcgtgtacagttgccagtcagacgtattgagcaataccctgaagattctcaattccaatctgaactccctatataaaccaccaacctctgttcacggttatgtgaaaggccgcaatatcaagactaatgccactaagcatctcacaaaaaagtacgtcctcgtactggacatcgaaaactattttgatacggtgaaaagcagtcttgttgaacagtcctttaaagaccttggattcacaacagatactgcagcgtacttaacaaaactggtgaccttccaatcagccctggttcagggctttaatacctcaccgactattgccaatatcgtgttctatcccctggacaaaaagatggagaagctggataaaaacatcacatactcccgttacgccgatgacctctactttagctccgataaggaatttaacatagaggcaaaggtccaagagatcatttcggagttcgggtttcgaataaataaacccaagtctaagctgatgaaacgaggctggcaccagtacgtgaccggattgacggtgttcgacaaagaatcacctcggatatcgaagaaaactaagaggaaactgagacaacagatttactacatcaacaagttcggctataggtcttatgttctgtatgacctcgagaagacgccccaggactacttctccagctctagtcttcgggatgaagtcgacagtaagatcgagtacctccagcgcaaacttaacggttggctgctgttcatcaacagcatcgaaccaagatttgctaagaaatatagcgacttgctgacccatcggaaaattgagccttga

SEQ ID NO: 14313 - RNA, 1035 nt, synthetic construct
  source 1..1035: mol_type = other RNA
atgaaacagatcaactctagttacctgaatcactgctactttataatgagccacaagaaaattgacacggtgaagaagctgtcgaactttctcaacatcgaaaaagagatcctaagtgagttaagtaagaacgactacatcattatcgagcgcaacaattcatccactgacatcctcaataatgtccttacagttgaaaaaatcgagatccctaagaagtctggcggatttcgtgtggtgtacagccccagctctgataacctcacaaattgtcttaaggttctcaactcaaagcttagaaaaatttacgtcccatcaagctgcgtacatggatatatcaaaggaaggggcattaagaccaacgcatctgagcatttaggcaaacagtatattctgaaagtggatatagagaactacttcgagaagattaccaaagagaggattatcaagtccttgaacaatctgggctttcagaatgaaatctccagcctgatcgctaaaattactacccataacaacgttctggtgcaagggttccacacatctcctacactcgccaatataattttccacgagctggacttgatcttttctaagttcacgaatgcctcctatactcggtatgcggatgatctgtatttcagttccaaggaggagattgatattttgtcaaaagtggaagagcaattactaaagtttggtttcaccatcaacaagagcaagataaagctcatgaaaagagggcagaaacagtacgtgaccggtcttactgtcttcgacaataagaaaccgcgaatctccaagaataaaaaaaaggaaatccgccagcagatgcattacataaatcggtatgggtataaagggcatattatgcacgaatttggcatcagcaacgaagaatatttgaataacgacgagattaaggagaacgtagattacaagattcacgaactgaagacaaaaatcaaaggatggctgctgttcataaattccatcgaacccgaattctcgaagaagtacataaccctgaagtga

SEQ ID NO: 14314 - RNA, 1005 nt, synthetic construct
  source 1..1005: mol_type = other RNA
atgaaattagaagagatagtcaatatccagctgttggccaatcacctgaagattgaaaaagagtcccttcagttcattgtcgataacgactacatcactgagatcaccagtaagaaggactttaagaaaggctgtctgatcaacgagatcaagatcaagaaaaggagtaatggctatcgctatgtgtacagtccggtgtctgatattctggtgaacactctcaaaatcctctcaggaaaaatcaaggagctgtataagcccacggaatacgttcatggattcgttccaggccggaacacaaagaccaatgctcaggaacacctggcaaaaagagtggtctattgcgtggacatcgataagtacttcgaaaacatcgatattgagaaggtcaaatcagctattctttccatagggtataacgaatattgttctgacaagatctctaagatcgtaacacacaaaaaccagcttgttcagggttttcacaccagccctgtgatagccaacatcgttttccacgagattgacttgaaattatcccgtctcggggacgagaatgtgagttataccagatatgcggacgatctgtatttcagcacttctggccgcatcaactttgaaaaagatatagaggacatcctcaattcatacgggtttaaagtgaatagcaagaagaccaagtttatgattaggggtcgaagccaatttgtgacaggactgacagtctttgatgaaatgtaccctagaattcccaaaaagattaaaaggagcattcggcagaaaattcacttcatatctctgttcggataccggggccatgtgctacataaacttaacatcgagaagcagctgtacgatcaaaatgaggagattcaaaagcatgtagactcgaagatatacctagagaagctgaatatcgaagggtggctcaactacattaattccatcgaacccgacttctcaaagaagtgctacagcaaattgtccaaaaaggataacccatga

SEQ ID NO: 14315 - RNA, 1026 nt, synthetic construct
  source 1..1026: mol_type = other RNA
atgaatccacaaatcattacagatactaagcagttgtctaatgctcttagaattaacgaagagtcactcaatgaactgagccaaaacgaatacctcattgacgatacctgcgcaaagacattcaatctacatccagactctatcctgaatctgaagaaattctgcatcccaaaacggaataagaagttcggcgaaagggaagtgtatgagcccatagccgaaacccttaaaaacctgttaaaagtcacaaatagcgggttgaataaagtatacgtggcgcctacgagtgtccatgggtttgtaaaaggtaaaaacatcagaaccaacgcaaccccccacctggaaaagaaatacttactgtcgattgacattgagaacttctttgagagcatcaataaggagatggttatcaactgttttaaggagtatgagttcatagaatccatcgccaaagtgctcgccaatatcacaacagtggataataagctcatccagggattccatacaagtcctactatcgcaaacatgtactttaagaagatcgacctcattttcgaaactgtgtttccgaatctgacctatagtcgatatgccgacgacctgtcattcagctctaatgaggagataactgtgacccaggtcaccgacatcataaagattataaacgactttgggttctccatcaaccacgataagacgaagattatgaaacgaggacggaaccagtacgtgaccggcctgactatatttgatggaactttgccccgcgttcctaaacgcattaagcgcaagctgagacttcagatcttttacatcaacaagtatggctaccgtaaccatattctgaaaaagctaggtagaaaacctcacgagtactttaaaaactccagggttaaggagtcagtggatagctacgaggactatcttcacaacaatattgtcggctggctcatgtatattaaatccatcgaaccccagttcgctgctttacacctggagctgttgaacaatcggaggagggattga
